United States Patent Application Publication US 2019/0348154 A1 - sequence listing, part 52

SEQ ID NO: 192547 - DNA, 285 bp, Klebsiella oxytoca
atgaaaatactctatcgttatgatgaagatgggctgtttctcggtgaaatagagcctgtttccaatcctatgttttactttcctgatgaaccaatcgacaaaggctattacgacgctgacggcaatccgcccaagccaccagttgttgggcaaaatgaaagggcggtatggattgggtacaggtattctattgagcctgaatatatttccctgacaaacaccactacaatttcgcctggcgagcagccagaaggcaaattttttgatggtagggaatggaaataa

SEQ ID NO: 192548 - DNA, 1944 bp, Klebsiella oxytoca
atgtccgaaaataattatggtgcgctgatgatgaaaacggcactcagcgccagtgacgatattgataatctgatttccccggggatgtatcccgttccacctggtaacatgtcttcgccatccagtattgggggccttttaaccatttttcccggttcagtaaaatgtcgtaccttcacttctgattcagtaatcatttctgtatcaacatttgatagtgatttatcagtatggggggagtggaacacccctgtttctcgtgcaaacttaggttcaagcgaagatggtcaaggttcatggatggtagcatatatcgctaatgaatctgcggtgtctcgcagtgtcacagcccgacttcgtgactatgtcagcttacacgattactggtatccttctgatggtgatgattattttccggcactaaacaaagcgctgtcagtttctgcaaatgtgttaatacccccaacagggaagcattatttaaaatcgaccgtttcccttatctctggcgccaggcttatcggcctcgggccaaatagtattttgtcatctccagaggccgtatcttctaatggtgcggaaatgattaccgtcctaagaacaacaggcgcatcggatattttacttcaggggctgactattgaaggtggttgcagtgaaatagttagcactaaaagagcagtgcgaggagtgagattcattgaatgccaggatgtaagggttattgattgcgaggtcaataataccggtgactgggcgctgtcttttgaaaaaaatgaccgagtatctgtttctcgatataaacatagaggtactgtcgttaccaatcttaatggcggtcgggatggtttgcactttctcgattgcgtagacttttcagcaacagatctcgatatcgtctctggcgacgatatggttggttgcaccagtgaaaccagagaccagcgcaatgccagcattaagggtgttcgtggatattcaggaattggtagttgtgtcattttcaacgaagagggaacaactactaactcaacagtgaatgtcatggttgaagatgtgagggttacaaacgggcaaacagtaaggaatgtagtacgggtgcagtctatcaatggcgcaaatgtgactggcgtaattattcggggtatacgtggcaccggccgtaatcatggaatacaggtaacgtctgcggcaacgatgacaaacgtggatatctccgacgttaacgttacgtccgtcaatcagcatggcgtctacctcaacagaattaacaacctgagtgcctccggacgtgctaccgcgcagaacagcagtttcgacggctggaacattacctcctgtaattattttgacgtgcaaccggcagcgttgagttctccgggctggggtgtgcaggtgctgaacagcgcaaacttcacactcaacggcaactgctacaacaatggatcaggcctttttgcagcagccaacggaggaaacgggcgtataaacggatgttcaaattacaatgcaactggcgtttatgtcggcggcagtacaacatcttactatggccttttcaatgatgagacccctactggtcgtgttgacccttctacagtgtgcgctggatatatagcaagaaatcgcccacgcaatcttaatgcgttgcgggatgcctacgcagcgtgctcatttggccaaaccgttagtggttcaatttcctctcagggagcaattaattgctcagtagagcttatttcggatggaagatataaggttaatttttctgctccatttgaatcaaccttttacagaccggaaatcgtcgcgcagattatgaatcaggatctgatagtcaggccgattaccaaagatgttaattatttcacattcgaagttcgcaattcatccggccctgtaatggctaactttatactttgcgaattcaaaaaggcgatttaa

SEQ ID NO: 192549 - DNA, 492 bp, Klebsiella oxytoca
atgcgtggaggtgcaaagtttgaaacgaaggggtttgaccgcgtaatccgtcagcgcgtgaaggcgctggcggggatttcaataaccgtggggatccatcgaggtaagatgaatgaaggtctggacgttgcgacctatgccgcctggaacaacttcggtacaaaaaatgcgatggggtgggaactcatcccggcgcgacccttcatgatgtatgcctctcgaagaatagccggatggatgcaagggcaggaataccggcaattattagcatcggttattgacggaagccggacagcgcaacaggtagccacaataattggtatgaaatcatcactgatgacgaatcaggtcatgcacgcgtccaatctctataaaccaaactcaccagaaacaattgcaagaaagaaaaaaaagaacgggggccaaagggtattagaagattcaggctctctatttcgctatggggctacgtttaaggttaaatactcatga

SEQ ID NO: 192550 - DNA, 1893 bp, Klebsiella oxytoca
atgacagaccagtcagccgatctcgtaacgaaaattgacgttattcccgaccttgacgggctcaacagctttgatgctgcgattgataaggctatcgcaaaggttaatcagcttgacgccgctatcaagcgtgtcaacaacctgaagcctgcaagcccctatgcgcccagcagtgcatcaacagcgccgacagcagcagctacagcagcaatagccacagtagccgctacaggcacgaatttgattgctcgtacacctctggcggagactgtacgccgcgagtctcagaaggtcgcacgtgcagccgttcagggcatgggtaacggtattggccttcctcttctgggcggtggcggttctggtggcggaggtctgctattgccgccgccccgtgctggtggttttaacccgttcgacgcgtccaatttttccggcgagccgctaaataccaggaagaaacctgttgctgatgccgtacagagcgggatacgtaacccgtttggtgttgatacaatgctggcaagtgccgggctaactgttggcattatggcagcgggtaatgcgctggctgacagccttgattcaatccagcggcagcaggcgcagattgcgaggttgacgcagacaaccggcgacgcaaaagaggcgttctttgcacttaatcaggccgcgagtgatgttcgaagcgacagtggggcgtttatctcaacctataccaatatggcgaccgccacgcagaagcttggaaagtctcaggaggaaacaatacgggcaactcaggggctggtaggagcattacagctaggtggcggcagtgctgaagcggtaaacgcagcgctttaccagatgggccaggcattttcttctgacaggttcggcggggatgagtttagatccttcatggaggccatcggcacaatggccccggaagtggcgaaggctttcggcacggatgtaaaagggctacgggcaatgtcagaagccgggaaactcacggcggaaacgatgattaacgcctttgagaaaatggcggcgagtaatgccgacctgcttaaaaaacagggctggacgtggggccagacaatgacagtcatgaaaaatgactggcaagcatttttagcgcaggcaaccatcggcggagaatggagaaaattcactgattgggccgcaaatacacttattcctttagccagaagcgcagaaaaagaggttgccgcgttctggtcaacgctggcagatgaaagtaaatcagcgattctaataggtattcttggcgctgttggggcggcttttaccgcattagcaattccggtcatggctgctatatggccttttctggctattggcgctgctgtatgggttgtttatgaagcgtttgtagaatggaaagcatggatggcaggtgaaagcggaacaatatttgatggtttattcggtagttttgatgaatttgaaaagcgatatccatcgattgtaaaaggtctaaaattattgtctgaatggatagggaaatcaggtggtcttgcgccggaaagcgcggttccgtcacagacgcaaatagatgaatttctgaagaataaaaacggtactgacggaaaaccagaaaaaggtttaatcgagaggttccttgagtacaacggtaactttaacccattgccgggggttgagaaatttttagggctatttggtggtgatgatggtgccaggcaagacgcatcattgatgacaccaccaccaaaaggaggggtaattattaacaatgatgtaaaaaatgaaaataacattaatgtccctgatgctaaggatgtgggatctgtcgtcgagggcctgagcaaaactagtacgacacaaagtcttagtggggtaaactgggcagaggcgaacggtgcttaa

SEQ ID NO: 192551 - DNA, 738 bp, Klebsiella oxytoca
atgaaaaaaatgatgattttatgtgcaattgtttctttgcctgcattttcagcggagacaacgccattcagtgatgcagaggtattggaatatctaaagccatcaaatgaattggtttttactaatgccgttgctgtaatggtggaaaatgaagcaaaagcgtctttgcaacagaatgaaacggagcgcggaactaagctcattccgattacagtaaaaaccattgctaaagatttcgaaaataatgagataaccgctattgaaaagtataaaaaccagcctataagaataaaaggggttattaaaaaaatagggttggacgctttaggacgtggggttgtgactgtatcaggggggagttcattctcagggaatttaatagcttcggtgaataaagaaagtaattgggttcgagaggcatcaaaaggagacaaaatagatttaacttgtaatatttcaggctatgtaatgctaaatgtggctgcaacttgtgaagactccttaacctacacccaaagacttataaaaaaggaatatggtgttgaggaagcttttcacctacccacaaaacaatcagatgcttctttgacctatataattaaggcaaatgaaaatgagatagcaaaaagctgctctaagccagacgataaatgttttaagacggttatggatgccatggaaaagactaagaaaccagatccacgattcgtggcatgggcaaacaagttaccggaataa

SEQ ID NO: 192552 - DNA, 414 bp, Klebsiella oxytoca
atgatgccggagctgccgccggaatcattggtcgtcagccgccatgcgctggatgacggtgatatctgggttaatgagaaaggctgtaaagccggcattgtaacctttatgcctgccggtggtttccgtttgacgttaacgggcgatagcggccagcaaatcatcctcgaacaggagggtaaaaatctgacgctatatgaaaaaggccgggacgatgggcgttaccgcgcgccgatggccggcgtcagcgacgtcaccctgtgttttgatgccgggattgttgaggtcttcgcaaatcagggcagcgtatgcggtacgcgacgctattactcatgcagtcagctcacccggatccagctctccggcgcgccggcacagcttacgcaatatcgctcgacgtattcgcaggaataa

SEQ ID NO: 192553 - DNA, 975 bp, Klebsiella oxytoca
atggggttttcatacgggttcagacccgggcgaagccagcacaatgcgctggacgcactggccacagggctggttcggaccaatgtaaactgggtactggatgccgatatcagtcagttcttcgacaaggtaagccatgaatggctaatcaggttcatagaacacagaatcggcgaccagagggtaatcaggctcatacgaaagtggctcacagccgggacctcagaggaaggagaatggcgggcatcggaggaaggcaccccacagggtgcggttatctcgccgctgctggcaaacatctacctccactatgtcttcgatctgtgggcgcatcagtggcgacgccgccatgccacaggcaatgtggtcatggtcagatacgcagatgacatagtcatcgggttcgacaagcgaatcgacgctcaatgctttcgtatagccatgcagcgcagactgaaggagttcggactcacggtacatccgaagaaaacccgactgacggagttcggccgcttcgcagccgaaaaccgcgccagcaggggaaaaggtaaaccagaaacgttcaacttcctcgggttcacgcatatcagtgggaaagatcgtagtggcaggttcatgctgatacgaaagacacgccgggacaggatgacggcgacactgaaagcgatcaaggacggactacgaaagcgctggcattactcaatccccgaacagggaaaatggctcaggagagtggttcagggatacctgaactaccactcagtcccgggcaactatcccatgatgcggaagttcaggatatacgtaacagacctctggcgacgggcgctgaggcgcaggagccagcaggatgatacgacatggacgaaagcaaacagactggcagccgtatggctgccgaaggttcgggttctgcatccatggcctgtggagcggttcaccgccagacacccaaggcaggagcccggtgcgtga

SEQ ID NO: 192554 - DNA, 222 bp, Klebsiella oxytoca
atgaaagctgctgtcgtcacgcaagatcatcaggtcaatgttacggaaaaaacgcttcgtcccctgcaacatggcgaagcccttttaaaaatggattgctgcggcgtatgtcataccgacctgcacgttaagaacggcgactttggcgataaaaccggggtcattctgggccatgaaggcgtgggcgttgtgcagcaggtcggccccgcgttcattctctga

SEQ ID NO: 192555 - DNA, 642 bp, Klebsiella oxytoca
atgaaattaacatgttggtcttgggaaaaaactgcaattgttattcctataattataagtttatgtaccgcttatctaagctatgtgataggtgacaatcaaagcaaaatatcaaaattagagtacgctcctatttttattttccaaaagagcttggagtatgatgaagttctaaaaatctatcacactgaaagactgaccatttccaacgaaggataccctgttcaaaattttgatgaaagcatccatacctttttattagtaaaacaatccactgatcgagaaacaaaagaaaaactaatccctatcaattatttctggattggttacacagctaatggtggtaaaggtaaactgtctgagttatttgggaaaaacaataactcttattatttcgaactttcacgagaaattattgaatttaatcaaaaaaacagagaaaaaaccataaacataagcctcataaatacagcaaagctaagttatgttgaagctgatggaagtattaaggaatcctattacaaagacgaaaaactgacaactaaagatgatgttatggctttagaggaaaaatcaataaagatgtttcctaaagacattcaaaacttcaaacttgatgatctattggagttattaaattaa

SEQ ID NO: 192556 - DNA, 294 bp, Klebsiella oxytoca
atgaacatagctgaaaaaattaaggcaatacgcaaggcggaggggttaacgcaagtaaagttctgtgaaatcagcgggctggcattaagtactttaaaaaactatgagggcgggcatgcggagccagggttaggggtcgtgctgaagatcacgaacacctcacagcttcaaaaatacaccctatggttgatgaccgataagactgcgccccaggctggtcagatcgcaccggccctcgcgcacattgggccagaatcaacggaatcagaccaatccgggaaacagactggctaa

SEQ ID NO: 192557 - DNA, 186 bp, Klebsiella oxytoca
atgatgagcgaagggaagtcaacagggtttcagcttagcgaaggtagcgcggttgaacgcaaggatcatgtacttttggcgctggtagctatagaggctgtaacagcaaaagccggtgagtcagataagaatctcaccggcgcagatctaagcaaggttatggagttagctgcttacttatcttga

SEQ ID NO: 192558 - DNA, 207 bp, Klebsiella oxytoca
atgactcaagaagaaaaaacactctttctcttcactcaaacttgcgtaatgctgtccagcccttcggctacggtgtccgccgggggtagctctatccctgtacctcaatccacgcgcatcaaaagaaatttcgacgccatctatgaggagctggaacaaaagctcaatgaaaagctaaataaccagagcattcctcaagataagtaa

SEQ ID NO: 192559 - DNA, 219 bp, Klebsiella oxytoca
atgaaaagtggaattagcggagcggtgtcgcatctgaatagtaaaaccagcctttatcgtggctttactattctgaagctcccacgcaaaaaaccatacagccgccagcgctatcagatcacgcatagtggccactacttcgggattgactttgcattagctgaagcatgcaaaacgatagaccgaattattaataaaaaccgcttttttactcattaa

SEQ ID NO: 192560 - DNA, 231 bp, Klebsiella oxytoca
atgagcactgaaaacatcccttcaattgccagcctgctgaagcatggatgccaggtcacacatttcaggaatacacgcggttggattgaaactcctgacgggcgtttctttaagccagaacctaataaggttcgttttattaaagaaatgaacaggccttttatttatacgcagaaaataaataaaggaattgtcgccgcgttgattaacgcgcttaaaaaaatcctgtag

SEQ ID NO: 192561 - DNA, 273 bp, Klebsiella oxytoca
atgtttaccgaagaaaaaacatcgtgggaacgtgaaatgctgatacgcgaagcggtggaaagcgcagagcagggcttcaccgttcacctgaagaacggcgctcgcgttaacgtcaccgctgacagcccgtcgattgacttaattatttacggtctggagaaaacaattcgcggtaatcatgagcgtgcacgaatgacctttattgattatctgtatttttggcacgaaaggttattcaagctggctaaaagaaaaccgcgccccaaccactaa

SEQ ID NO: 192562 - DNA, 228 bp, Klebsiella oxytoca
atgtcgatcaagtcaataaagttggaaagcggaataagtgatccggagtttatggaaataagcgccaacgctcggaggcacgaacgcgcccaccttctgggcctgctgcgtatttttgtcggccagctgaaaaaggaaagctccaccccggaagagatttattcatcaatcgaacagtgggccagcgcccgcgagctaaccatcagtgagggaaaataccatgaataa

SEQ ID NO: 192563 - DNA, 195 bp, Klebsiella oxytoca
atgagccattcaccggaatacatcaagggagccattgctgcgctcaacgaagttaaggccatcgggttagccgcagccatgcacgcggggatcattcacggaaaagaaaccgggaatgccgtaagagcaacagtcgatagtgttgctgatccgctcattgataaatacaaagcgatggtggtgaaaaatgattaa

SEQ ID NO: 192564 - DNA, 954 bp, Klebsiella oxytoca
atgattaaatcacctctgaaatgggcgggtggtaaagcccgcgttatgtcgcagctgctggagcacctgccgaaagctgattgcctgattgagccatttgtaggcagcggaaccgtatttatgaatacggattaccgccgttatgtgctttgcgatagcaatccaaatttgatcaacttttttattcaattaacaggacgcccagcggacacaattgcagcatgtcgggaggtttttaacgggggaaatgacgctaaggaattttataaacgccgtgtagagtttaattcgctaattcaaaaatcggactcagatccggatgccgcactgcttctggctgcgtattttctgtacctgaacagacacacatacaatgggttataccgcgtcaatctcaagggggagtttaactccccatttggcaagtatgcttcaccttacttccccgaaggcgaaatgcgcctgtttgccgaaaaggctaatgatacaaaggcggttttcgttcatagcgacttccgcgattcaatccgtgacgtcatgcagctggagcatgacgccgttatttattgcgatccgccgtacatcccaaccagcaaaaccgccaatttcaccgcctacggcaagccgttcacgttagacgaccaccgcgcgcttgtttcagccctgcttgatgttaatcgccagcatggcacgtgctcggtgatctccaacagcgatacaccggaaacgagcgagatctattccgctttcaaccttcacgccttcagtgtccgccgctctgttagcgccaaaagccgggatatggctggcgaggtaatcggcgttctgctcgtttgcgatggctgcggccgtgctggcggtggttactgtccggactgcggcccggctatggggaatgcaacttacaacgcaatggtggcagcgggtgcattcgacagagcggagggattctga

SEQ ID NO: 192565 - DNA, 273 bp, Klebsiella oxytoca
atgaatgagccagtctggttagcagtagatcccgccgatgagtcaggggatcgcaccacagttacggcgctagtttaccgcataaccggtagtcagcagtaccccaccttcaccctgattgattttagggcgttcatccttgatgcggctgtaccggcctctaggtcctgcgtatacggcatgggccatgatgaccagcatatcaagaagggcggacttgtacgcctgcaactcccttccgaaagacttaaagaggagttgccatccagatga

SEQ ID NO: 192566 - DNA, 693 bp, Klebsiella oxytoca
atgagctatctgggaagcaaggcggcgagcggtgtttatcaaaaaattatcgccgaaatgccgccgcatgatgtctacattgaaacgcatctaggcggcggcgcgatcatgctgcgtaaacctccggcaaaagtgaattgggggatcgatatcgacccgcaaaccgtcgaagcatttaaccagggcaaccctgactttctgaatcggctggcagatacattgtttattgatgttggcgatgccgctgagtttttgcgtcgttttgattactcatctgccggtcgggtgttgatttattccgatccgccataccttcatgaaacgcgctccagctccgcgcgttatcgccatgaatacaccgttggtgatcattaccgtctgctgggcttgctctgctcgatgccggaaaatgtgagcgtaatagtatcgggatacccctcttctgtttatgacaacgccctaccgcgctggcgcagcaaggagtttcaggccatgactcgcggcggcgtacgaacagagaaaatctggatgaactacccggagggggccgcgtactcgcatgctttcgccggtaaagactataacgatcgctatcgtattaagcgaaaagcgcagcgctggaaaaataagtttgcggcgttacctcccgcagaaaggcttgcgatcatggctgcactcggggaggtggagtag

SEQ ID NO: 192567 - DNA, 1149 bp, Klebsiella oxytoca
atgaacatacagcagcgtattgcagaacgcctaattaaagccagaactgatgcgggcttgaacgccagcgctgtcgccgagcggattggcgtggtgcgccagacttacagcaaatttgaacaggctcagggtgtaccaagcgttacccagctcatatctctttgtaaggttttagataagcctattggctacttttacgacgaagatgatggagagttccggtttgctatgcgagcagatagcccggatttactcgattccaagttgagaaatgagctgattgaaaagctcaaaaacattaatgctattgaagaagctgcggatgccactcttcccgaagatttgcccaattcgattccgattttcactgccagagatgaggatttacgcagggtcgaagataaagcgatggaggagagatttcgccttggtataggtaatgcaacctgcgttggcgatatagtagctatcctggaagcctcggatatacgagtcatcccctttgatcgtgaagagaacgagggcggtaaatcggtgttcggtttttcagcattttcaaacaattacggaactgctatttacgtaaatgtaaatgagtccatttctgtagagcggcagatattcagcatctgtcatgaatatgcacaccttatttttcatcgtgatgaatatgatggccctgctaagagctataaaactaaaggtagaggaacttcaccagaagagaaagttgcaaatcacttcgctgcttgtttccttgttcctggaagtgcattgcgtaagcagtttgctatgcagggaggtggttgggcttatgaggaaaccgtactccggctaaaaagcattttcagggtatcagctacttgcatcattgatcgtttgttcaagtgcaaattgattaccccgcagaactctaagtatctatgggctactgcaaatagaaagggttggttgaggcatgagccaaatccaatcatagaacgtctaaattacaaggggcggttaactgtactttcccgaaaagcatgggaagcgggatccgcgtcagaaactttcatttcagaattgctggaattaaacaggaaagagttaagcagcctgctggatgagtggtacgacgagcaggaggctggagaggatgccatttga

SEQ ID NO: 192568 - DNA, 519 bp, Klebsiella oxytoca
atgccatttgaatgcccccgatgtgttgtagacactaatgttttgtcggacttttatgaaagcggttgtttggctttgatttggcagatatttccgggaggggtttggattgacccctacgtctgtgaagagctcaaagtaaaatacgagcttgatgttcagcgtgagcttgccaggcttcaacttccgtataatttcacaaacgattatgagcctgagcacctagtggaaatggctgagataaaaacgcgtagaagggcgctgaagtatgcggatataagctgtgtggttaatgcccggatacatgaagctacgtgtttgtcagcggataatgcagtttataaaacatgtggtgagcgcggtgttaaggccgcgcgacatggcgggatcttacaggaagccgtgagacgcggtatgttgactaaacatcaagcgcttgcatactttcagcactttttggatcgtggtttaaccatgaagccatctatacgcgagcaaattattgtgagcttcacgtga

SEQ ID NO: 192569 - DNA, 3657 bp, Klebsiella oxytoca
atgccagatattattgaatccggaaaatggggaagtagtatcccgttaattacccgcactgacagggtggaggggggtaaatcaggacttgtaaatatacaaacggagattctggcgaaccgcacgcaatatctgaaatggatttccgagtcattgcaaaatgcaatttatatcggtggaagcggtgttgcactctattctaccgagggagtattgcgccagtcgattcccgatgaaggaaaatacctggctatagatcagtctaccggacgatattacgtctgggatacgtccgttattcccttacaggatgagacaacagcatatcttgcgaggatgactacgcagcccacagccattcagaaagcggccataaaccgcctctactatgacctgaaacgggcgggtatcctgtcaaaacttgatggtctctggcttggtatcagtacgagccgcactgatgcccggttaaatatggccggaaactcactgacgcttaccgagcatggtgacatctcctttaatgccacatccgggtggacatttcacggcagtgactggctggatacggggcttaatcccggcgcagcgacggtgcattatggcagggacagcgcatcgtttggcgcgctcgttgctggcgcatcaaactccggggtatttatgggggcctttgatggtgtttccgggctgacactttcccgaaccgataacatactcaatggccggattaataataaccagcttttgtccggtgcaatttcgccgaccggaacaaccttattttcggtttccagaacaggtaaaaatgatgctgtgctttattgcggaaatgaagtggtggagcgcaatcaggtatcgtccctgaatctcatcaattcatctgtcagcatcgggcgcgctcaggatgcctccgggtggtacacaagcgctaatatatgcgcggcatttgccggggccggactcagcgagacagaaatgtttgcactgaatgacgccgttcagcgctatatccactcattccgtcagacagttgcatccggcgcatgggtgcaaacccctttctcactgctcagccctgactcagtagaaagtatttcatctggcattgttgacaggaagaccacattactcagcaatgcgataattgcctacgaccagtatggcgatattgccagaacaacagctgactcgacgggcattcgtgcactggatgaatcgacgggggtaatttatgaaccgtctgatattcccgatgccgtccttggtgaaaccacggcattcattgccagaatgacaaccagaccggatgccgtgcaacaggtggcgctgaatcagctgatttatttgctcaaaaaagacggcgtctgggacgcgctggaggggctgtggcttggcgtcagcacgagttatgctgattcattgctgaacgtggttaaaaataaatttaacctgaccagcgataatgccccttcctggaatcagtccggtgggtggacgttctcccgctcaggtatgacctggctggatacggggtttaatccctcacttgccgcaggaaagttcgcccttgaggatgcctcctttggtgcattgctttttcccccggcaggaatgacggcaacaggtcacatcatgggggcattcaatggcaccgacgggatggcgctggctccgcgcccgtcacaggcaaccagcagcccgatggcggtacgactgaaccagggtaaagcctacatgccgggtgattaccctgtcgccaatgctgtatacggggtttcccgtctcaatggggagcttgccgtatatcgtgaaggtctcctgctggggtcaacgacgcaggcagcgacagccctgacaaattcgaatgtgttgctgggatgctctcagaaaacaaccgggtatcatatgtttgacggcgctatcggtgctgcatgggtgggggcgtccctcaccgcaaaacagatgctgaccctgaccaatgccatcaggcgctataacgatgtattccgcagtcgtatatccccggacgcttcctggtggtcgccgactgaccggcggatgtattcgcaggccgatatcattgctattgccgggagcagagcaggaagctcagcacttgaaccgcccgcctccgaggccaccgtgaccgccgatatcagcctggcactcagtgaacaggggcagacgtaccggggcgggtatatcgaaattcagcctgattcgtttatcggcggaaccgaaccagcgaccgacagtaccacagagctgtgggggttcccgcactcgcttaccctgtcagagcagaaccgcctgcgaagcatgatgctgcccggcaacgggtacggtattcattatattcgcctccccctcggctttgcctatcgtggttttcgcaacatcgataccgcgacagggctggcgaaaaatatcggtgagcggtatgcggggcaaaatgccggcctgaaaagactgatggctaacattgttgatgcggggggcggtctggcgccggagtactggtgtcctgcaccctactggatgaccaacggcaaatacgcgggtacaccgtcagcgtataaccagccgtgggccgggggggcgtatccccgtaaaacgaccctggattcaattaaagggtcagacccggagcagtacgcggcgcaaatcgacgcgatgtcagatgcaatgctgaatgacttcgaatacctgcatcagaatgttggcccggtgcgtatgtatggcctgcagaatgaaccgcagtacggccacgagttgtatggcgtgtgcaaatacaccgaccgcgtatacagcgacctgctggcagcactgcaaccgaaaatcgcagccagcgctatcctgtctgaatgggaaggccaggcaaacaccccgttattgcacgtagcctctgataacgactggcatattggccaaacctatatcgacgcccaccctgaaaccatctggggatacagccatcacaatattaccgccattgccacggacgccgactggttaaagtcttcgacgtttattaaccagaaagggggcaagaaaaatgttttcgtgaacgaaacggaatatatgcacccggaaaacagcagcaacgcctggaagtgcgccaacaatatgttaagggatgttcataacctgacgtttggcggtgcggaagttgtcatgcctgttattcacctttgcaaacagctgggagaaagtaccagttacacctcaaacactgacggctacgccattatgcgctgtaacctccctcagaagtatggcgtcgctcccggcgcgtcaggtaatgaggatttcatcggctacggtggttttggtgaaaatgcctggaactataacgcttatcgtctgacggctgacaacctgcctgtaggctccattcgcgtgggaggtcagccgacgatatcgacagcgggaattggtgttgcggcattcagggcgggaggaaagctaaaactcttcctggttaaccgtaacgctggtgcggcagcaatcactgtgtcacttggagcagccaaaaccctgacgggcagacattatgacctgtcacatgccggtgatgctctgacgtccagaaccggcagcgccattacatttgtgctacctgcatacagcggccagtgctggtctgaaaaataa

SEQ ID NO: 192570 - DNA, 984 bp, Klebsiella oxytoca
atgggtgttggtgatggtggcggggtcgggttaacccctgatgcagccagaagtcagttaattaacgagttataccgcgccccgttaaatcgcgtggtgatagctgaccaggcggcaaacattatccgtacagagatgataatgatgccgcaggttggcggcttctggctacgcgaggccgcgctttatgacagcaaaggcttatgtctggcggttgccagcctgccaccatcctataagccattactggctcagggttctggccgattacaggccgtcaatatgtggattgcggtcagcaatacggcaaatgtggagctgaaaactgaccctacggttatccttgcttcagttgatgaggtgaacaaagccagggatgaggcaaaagattatgctgataagattgtgggagacctcgatagtgatattcagaaggcaatttctgacgccataacggcagcgcggcgtgagttctgggaggaggaaaacccggtcggcacggtgaagttttatgcgcagaatgttaaccctaacgagcgttatccatggtcacaatgggtgtacaccggcgaaaataaatcaattcgcgtcggcaaggctgatggttcggacgtcgggcagaccggcggcggcgataccgtcacgcttcagaaggctaaccttcccgccgtgcagattgatgtgagcggcgaaaccagtgagcaggaagaaaagacgctgacaacaacggaaaacggagcgcataaccatcagggcggtgacggtgcaccgggtgaacagtggcgggaagggacacacggcacggataaccagaaggatgctaattttaacctgaccagtgatgcgccagcgcactcgcatgacgttactatcccaccgcataagcactcgacaaccggcaaaactgacaacctcggcgagggtaaatcgttcagcgtggttgaagcgcacactctgctgatgtgctgggcgcgggtggcgtga

SEQ ID NO: 192571 - DNA, 516 bp, Klebsiella oxytoca
gtggctattccgaaaaaactccggctgttcaccgtctttgtggacggcgtgaaccatatcggcaaagtccccagcgtgacgctaccgaaagtgacccgtaagaccgaagattaccagggcggcggtatggtgggtgcggtggctgtcgatctgggtctggattccggggcgctcgatgcgtcaatggttgttggcggtgtggtcgaagagctaattctgaaatacggcggtgatatcgacgaaatgcgcctgcgctttgtcggcgagatttacagcggcggtaccagctcactgctggaagttgagatgcgcgggcgtatcaccgaaatcgatccaggtgatgccaagcagggtgatgataccaaccacacctacgccatcaaaaacacctactacaagctgtcggtggacgataagccattgctggaaatcgacctgctgaactttatctacaagcggaacggtcagaatctctatccggatcgcattatgtcggcgctgggcctcggcggctga

SEQ ID NO: 192572 - DNA, 384 bp, Klebsiella oxytoca
atgaaaagggtattgcctttaatcgcgatcatcgccttggctgggtgcaaacctagcgccgacaaggccattgagttggcaaagaaggagatcgcagccgatataagagatccggatagctctaagtttagatacgtgagattcattcagaaagaagaagcccaggacgggactattgtcggctatgtttgcggccagataaacggcaaaaatgcttttggcgcttactcaggatttacccccttcatgcttgaaataaagatgaaatcaaaaggtactttcagtaactcggttacttactctgtatatggcaaacaaattttcacagagtttggccggtcaacaccatattcgtattctagtatatgcggtggagacgaatag

SEQ ID NO: 192573 - DNA, 588 bp, Klebsiella oxytoca
ttgaaaaatataattgccgaggttgccggggaggtgcttttgaggaaaaagaatctgcaaagccagcagagtactaatggtcaactcaacaaaatcattcatgaagacctcattaacgactggtttacttctcttgttgatatgcgaatggcagaagcaagaattggtttccatgatcagaagcgtaccggcagttctgcatcaggaaaaagtcccggcgagagtgatgggttgatcactaatagcaaaaatagacgaattgcgattttcgaggcattccgccttttttcacttgataaaacagttataagcgatcatctcaacaaaatagtggggtacgatgccgaagcactgagcccagtattcatggtcgcatattgtgatgttccagacttcattgcacttacgacgggatattatacttttatatccgaaacggactatgccggttacaaaaagaatgggcagatagctaaggttgatgatagaactacaactgacaatctttggacttgtaccgaaacccgactcagaggagggcgtgaggttatattctgtcattttttacttaatatgcactgtaattaa

SEQ ID NO: 192574 - DNA, 969 bp, Klebsiella oxytoca
atggcaataaattacattaatggcagacaaatacccgttaaaaatcgtgacatacgaatctgcaatttttatattacctggttagaaataaacaaaaacatcagagcagaaggggttaaccgtcaggaagcaggcagctgccatcaggcagttaatcatctcctcaataagtactatcctgataaagaacagcaagacagactcctggcagatatgcataccgcctgcgacgagaatatcttacctgcagaaaaatttgactggattgaaaacgacgagcgggccgcattctggatgtggggttatctctgtgaagcgagtgactatcagcttggtattctccgttcaggagatgcccctttcggtcagaactggtatcagttccttcaactcaataaatccccggcaagccaccgggaaagaatgcaacttctcttcaatttctttgactggataattattcctgccccaccagttaatcaccttaagagccaggtaatggacaggctcaaagaccagtggaaaaatatttacagcaaacctgctccgctgaaatggttacctgatgaggaagaggcggtactgtgggcatggaacagtcttaaatcgctacaggaagaaagaaacgcccccaccggcggactttcatttacgctttcttcgccggggctgagcacctggtttacccctctgagccatgctgaacgaaatttagcgctacgtgccgcacttgatttatgggatgacgcaccggataccaaacggctattcctgcttaatctgaataaagcctggaatcagcagaagctacgtcagtcccgcacagataaaaaagcactcaatacgtaccttaagaacgaaactaaaatgcgactcgactttatggctgaacgcagcggagttcgcatcagcgatatgctggaaactctgattaatgaccattaccgaaaaacctgtggtggtgagtga

SEQ ID NO: 192575 - DNA, 417 bp, Klebsiella oxytoca
atgcgcgtactgaaatgttacctggcaaatgaccgtgaaggtcactttgtgacggccggtgaagccatgagcgcaccggggcaggtatggagctgtgcttcctgtggctgtcgtctggtgctgcatgctggcaccttcagcgaccctgcgtggtttgaacacgatacgcggaccgtggcccgggatgtgctgatgaactgtgcccatctcgacccggaagtgaaagccggggcccggcacaggaagctgcgcaatatgctcaacggactggatgctacggtgatgacgctgtcctggtactgtgtgtggtgcggcgaccattatcagggcgtgaagcactgttaccgatgccagaccggtatctacagcatcgaagaagtgaactggcagagaaactactgctacagtaccggatag

SEQ ID NO: 192576 - DNA, 408 bp, Klebsiella oxytoca
atgagcgaataccggtcattgattctgcgttttcatactgaagtctggcagcgcaccggcgaatattcgcgccagcgtcagcaggcgcggcagagttcaccgccaacgatcctgcgatggatgtgggagtctgccagtgcaccagagcgcaaaatactgctgctgattaatcttgatacgctgggggccttgcgcgatggggtcgtacagcaggacatgagcaggatactcagagaggcatggtgtgcggtgatacacactgataataacgttaccagcatgtcatctttcatcattagtcgttcagataagaacgcttttaccgtgccgtttggccggttgaaggccggaatggataacatggtacctcccgtgattacggccagaacgggtgttatttgcccgtga

SEQ ID NO: 192577 - DNA, 399 bp, Klebsiella oxytoca
atgacacttgggcgccagaagggctttgctgccagcttattcactcgtctggaatatctctggtcttcgtgctcggggccggtgtctgctcagtcggatttgtaccggctgacgtatgcaattgaacaacttaaatcgcaggactgggtcaatgcagtggtgagtgacgaggactgggacaatgaagcgcttctggtccaggaattcagcgatacggatgcattgctggtaaggaagtcggcactgaccggtggattttcggatgagggtaaactgattgcgctggtggaatttctggtgacgggcaacctgtcaacatgtgcagaggtttttcaggcccatgccctcccgccagtcatgatggcgttgaaccggatcgcattacaacctgagcaatag

SEQ ID NO: 192578 - DNA, 510 bp, Klebsiella oxytoca
atgtctaactcttcctttcagtccgaaatccctaaagtgcgtattaatttaaaacttgatttgcacactggtggcgcgagcaagaaaacggagctccccctgaaattgctcgtggcgggcgacttcagtaatagtcaggagtctgcccccctgtctgagcgcaaaaaagttgatttgaataaaaataatttcgactcagtgttgtccgaatattccccaaacgtcaatctgaccgttaaaaacacgctggctgatgacggcagcgaagacaacatcagcctgaccttccggagcatgaaagatttcaccccggagcaggtttcccggcaaatccctcagttgaaggccatgctttccatgcgcaatttactccgtgatctcaagtgtcaacaacgggtaaaaagtgatccacttaccgtcaccaccaacggtctaatattgatccaccttgtttactcaggattagcttccgctataaccccggcctttcgtttctgcttcagtcgatag

SEQ ID NO: 192579 - DNA, 780 bp, Klebsiella oxytoca
atggtcgaactacaacatcaacggctgatggtgcttgctgaacagctccagctggacagccttatcggcgcggcgccggcactgtcgcaacaggcagtggttcaggaatggagctacatggacttcctggagcacctgctacatgaggagaaactggcccggcatcagcgtaaacaggcgatgtacacgcggatggcagccttcccggcggtgaagacgttcgaggagtacgacttcaccttcgccaccggcgcacctcagaagcaaatccagtcgctgcgttccctgagcttcatcgaacgtaacgaaaacatcgtgttgctgggcccctcgggcgtggggaaaacacacctagcgatagccatgggctacgaggcagtacgggctggcatcaaggttcgcttcacaacagcagcagacctgctgttacagctatcggcttcccagcgtcaggggcgttacaaagcgacactcaatcgtggtgtcatggcccccaaactgctcatcatcgacgaaataggctatctgccgttcagccaggaggaagccaagctgttcttccaggtcattgccaaacgttacgaaaagagcgcgatgatcctgacctctaacctgccgttcgggcaatgggaccagacgttcgccggggatgcagcgctgacatcggcaatgctggaccggatcttacatcactcacacgtagtccagataaaaggagagagctatcgactgaagcagaaacgaaaggccggggttatagcggaagctaatcctgagtaa

SEQ ID NO: 192580 - DNA, 1023 bp, Klebsiella oxytoca
atgatcacttttgagattcgtatgaaaattaaagtcctgcacaagcggggaatgagtatccgggccatcgccagagaactgggtatttcgcgcaatactgtccgcagccacctgaatgccaatcctgaaaagccgcagtattcaccacgcccggcatcatcatcactgctcgatgaataccgcgattatatctgtaagcggatcagcgacgcgcatccctacaaaatcccggctaccgttattgcccgggaaatcatggagctgggctatcgtggaggtctgactatcctgagggagttcatccgttcgcagacactccccgtacaggcagagccggttgttcgcttcgaaaccgagcccggacggcagatgcaggttgactgggggaccatgcgaaacggtaagtctcccctgcatgtgttcgttgctgttctggggtacagcagaatgctttacatcgagttcaccgacaacatgcgctacgacacgctggaatcctgtcaccgcaatgcgttcagcttcttcggcggcgtaccgcgggaagttctgtacgacaagatgaaaacggtagtgctccagcgagatgcttaccaggccggacagcaccggttccatccttccctgtggcagttcggcaaagagatgggcttctctccgcggctgtgtcgccccttcagggcacagactaaaggtaaggtggagcgaatggtgcagtacacccgcaacagcttctacatcccgttaatgacgcgtcttcgcccgatggggataaccgtcgatgttgagaccgcaaaccgttacggtctgcgctggctgtacgatgtggctaatcagcggaagcatgaaactatccagacccgcccctgtgatcgctgggtggaggaacagcaatccatgctggcactgccaccggagaaaaaacagtatgacgtgcaggttgacgaaagcctggtgaccttcgacaggcagccgttgcatcatccgctgtccatctatgacacgttctgcagaggagccgcatga

SEQ ID NO: 192581 - DNA, 357 bp, Klebsiella oxytoca
atggctactaaaattcgcatggagaatccacgtactggcgagacagtaacaggattttatggtttttcctggactacattgtttttcggagcgtttccagctcttttcagaaaggacttcataaccttcatcggtacttttatcgtgctgattatccttgcttttctcaccatgggtattggctcgatgattggcatgattatttgggcattcatgtataataagtactatacaactaatcttattaagaagggttttgcttttgcaggaaccaacacagagaatgagcttgcatcaggtaagcttaatctccacttaaatgctgataactgcctcacatacagaattggtaattaa

SEQ ID NO: 192582 - DNA, 456 bp, Klebsiella oxytoca
atgattaagaaaacattatgcagcttattgctggccgtactttgtggcggcatggttggccccgcagtgagtacggagaatgaccatcggtatattagtattcgtaatacggatagcagttgggtgcagggcgtgtgttctttggtattccggctggataacggcggtgatgggacattcaataacctgacagtcagcttacaattaactgataaatcgggagccgttctggaaaaaggaactcttgatgttcagccgtttggcgatagcagtgcaactcgctcaaccctttcggcaactgaattcagctgtgatgcggttgaaaatacagccaacatcgtgattaccgacgttgaggaaacgtcttcggatggttcagtccatgctctgccactgtcgatgtttgatccgcaatattatcaaccattaaaaatgagcgtacaaaaaagcggatag

SEQ ID NO: 192583 - DNA, 504 bp, Klebsiella oxytoca
gtgaaattaactctacgaattgcggcgttgaccattgtctgtatgtcactcagccagacagctttagctgcgtcttacagtgcggaggatcaggaacaattaacgctggaatgcctgctcaccaataataaatacgccagcgcctttattgcgcaggatagcgcgggatatgccctgggaacccagtctgctccgactgctgagctgaatcttgtcactaatcaaccgggggttaacgcctactataattctcagatgatcgccggtggctcgctttactggatacgtgtcgtcaaaggcccctatgaatatattgtttacgataaagagcagcacggcgatatgtcaggtgtggttgtcacaaaaaaagggaaaagaatcttccgcaaagattgcaaggaacctatcaaggtgggtacacaaaacgatggcagcatctttagccgatttgcgcaagaagatacagaaggcgatcgtattatcgatttaatcaacaaagcataa

SEQ ID NO: 192584 - DNA, 1569 bp, Klebsiella oxytoca
atggcctttactccttccacattatcgcgctgcctggcgctagccctgctggtgaagatctcccccgcgctggcagaaccgtgggcagagaaaacctataatccgaagccagatagcgatgacgtgattttgcctatgccctgcgaaggttcgatggtatttcgtcgggtagaaattccagtagccggtcctctggatgatattcccatcaccttaggggaagatggcggtgaatggggctttgtggaacacagttatcccacgtttatcgccggtagctttactgaaacgccccaaaataaaggccgttattatttaatggcgaaatatgagctgtcggcattgcaatatcaggcattaacttccgatacttgcccgacaccatcgcgtaaacttagcctccctcaaaccagcatcagttggtttgaggccgttaatttctccgataaatataaccagtggttacgcgcaaacgcgctcgacaagctgccgaaagaagataacaagccaggttttttacgactgcccaccgaagtagagtgggagtttgccgcgcgcggcggtctgaaagtggataccgcacagtttcgtgattcccgttatccgatggacgacatcaaaaattatgagtggtattccggttcgcagtcctcaaacgggaaacttcagctcatcggtctgttaaatcctaacccgctcggcctgtacgatatgttaggcaacgtctctgagatgatgtttacccccttctacctcaataaaattaatcgattgcatggccaggctggcggttttgtggtgcgtggcggcagcgtgatgtccagtgagtcggatatccgcagcgctagccgtaaagaaattaactattacgataatgcccagccttttaccagtaaaacaatgggcctgcggttggtgctggtttcccaggcaattacctcaacggaccgggtcaaacttcttgagaaaaactggtcgactctcggtgatgataaaacgggcgcagagagcagcaaatccgggtccaatgatacggcgaaagcgttaggtagcctggcttctggcgttgaagacggcgagctgaagaaaaagctgaaagatctggaaaaccaacttcgtgccagcaaccagcagcagcaagaagaaagagcacagtctatccgcgccagcctgaatctgggctcttttctctgtaccaaattacaggacgatggtcgtttccttgacttcctcaatcacaattatgagctgctgtgcaaagataaagacagcagcgatgccaactgtgccatccgcaaaaataagctggcggaacaaaccgatcgtctacagcagctaacgagctactacgccagcagtctggtggattccggcaccctgtatgggcaagcagggctaaaaggcgaagtgaacgtgttcaatcagatgctgatgctgaataaacgtctttccggtcttaagccgttcctcgctgctcattggcagaatcagcaaaaatacctagcgaacggcaaaattgatacagctggctggctggatacctgcaaacaagtaaagaacggccactaa

SEQ ID NO: 192585 - DNA, 1215 bp, Klebsiella oxytoca
ttgtcctttaatcgtgcaagactgctcggtcgccttgcaatgcaagacctgtggcacgatcgcatcatctctttttgcatcgtctcctctcttgttgcggtcatcgcccctttactgctcctttttggcctgcgctttggcattgtgaaccagttacaaaacgatctggccaacgatccccgcaatctggagatccgcatgttgagcagcggaagctacgatcagcactggatcacgcagctacggcagcggcctgatgtcggcttcgccatcgggcaaacgcgctcgctcaatacgctgactgacttgcagacggacagcacacattttattgaaaatgcggaagtcattccgacagaggctggcgatcctttgctcggcacgcaggtgctccatcatgaccatgaagttgttattactcaggaagcggcacgcaagctggcggtgaaaaccggtgatacgctcacgctacgcgtgagtcgtatgctcgatgaacgccgcgaatggggacgtaagcgcgtgaccgtggtggggattttgccagccacctattttaatcgccccgctatctttacccgccccgcgttattaatggctcttgaacattttcgcgatggctatgcggtaacagcgttaggggtcgccagcggcgctcagcttaacggtaacgcgccgcgctacgcccgcgcaaggttgtacgcacgcgatattgaccatgtcgccagccttgaacgcgatttgcgcgcccaacgcatcgaaaccaccagtcggctggcggatattgagaatgtaaaaagcattaaccgtgtgttgggcatcatctttaacacgatcgccatcaccgcgctcattggctgtatcgcctcgttaatcggctcgtttatcgccaatgtcgatcgtaaacgtaagcatattgctgtacttcgtctgctgggcttcacgcgaccagccgtaggcgtttacgtcattagtcagggcgctttgctcagcctgatggcctatatcggcggttttggcatctattttttagccagccagatatttaaccgggcgctgtccacaagccaggccaccggtcagatgatttgcaagataacgcccttacacggccttatcgccctcttactgacgctggttgtggcgacgctggttgccggtatcggtgcctggcgcgcgatccatattgaacctgcgcagagcctgcgcgaggcataa

SEQ ID NO: 192586 - DNA, 726 bp, Klebsiella oxytoca; identical to SEQ ID NO: 107909

SEQ ID NO: 192587 - DNA, 1020 bp, Klebsiella oxytoca
atgctagctaaaatcatcgcctgccaaccggcagagccgggtaccgcacaattgatggttcgcctgcgcggcgaaactgcggtgctgcccgatctgacctttacgctttgtaataacgagcagaactatctgcagcccgatggcagctggagccctgcacagcactggtttacagtcaacggcggttactccctggccaacggcagcggctttcgtatcggccctactctacttgaccctttgctggcaaacgcaagccaggtccagattcagatcaagctggcttcaggagaagtgcgcaataccaccctccaattggtgcgtgatgagttgctctcttctgaagccaggggcgcgacgggtaattacagcagcagcagtatgctggcaaccccagaaaccgactccgcaccagcggccatcgtagaagcgcccgtcgcagaatctgaaaccattgcgccgaccattcatgccgagccgcagccgcaacaaaaacctgcggcttcccgcctcccgctcatcatcgccgccatcctgcttttagtggtgattgctggcgcgctttggtggttcatgggccgggacaaaggtcaggaggtggtcccggcggtacaagctcagcaagcccccgcagccgccgcccctgaagcgacgaacaccgagcctaaagccccggctggctgttccgcacagagtttagacacgctgagcgagcttgaattcgtgcagacgtgcgttcaggaaaaactcgatagcgataaactgctggccattatccagtcagcgaaagaggcgaagaaatgcggcgtcgcccagcgcctgtacgcaaatcgcgcgcagggcggcgataccaaaatcgccctgatttacgccggtgagtacgatccgaaataccatcaggcaagcgaatgtttcaaagaggcggataaagataccgcggcctattggtacgaaacggtactgcaatcagaacccgagaaccaaacggctaagcagcgccttgaggagctagcaaaatga

SEQ ID NO: 192588 - DNA, 2715 bp, Klebsiella oxytoca
atgaatagcgatcaaaaatctctcactcagggctgggcagctatcgctcagggctgtcaggacgcacttggctgggttgatgcagtgcgttccggttcacgtcgcctcgacaacgaggcggataaactcaaccttagcttgctccgcacgcgtaaccaggccaatagcctgacactggtcgccagaacgccaatgaccttcggttttttcggcatttctcaggccgggaaatcctatctcatctccgcattggcagctggcagcaatggttcactggaagccctttatggcgaacggcgcgtcgactttatcaaagaagtgaatcccgtcggcggcggtaaagaggccaccggcctggtcacccgcttcacccgccaggcccccgccgcgcctgcgggctatcctgtgcctctgcgcctgttcagtgaaatcgatctggccaaaattctggcaaacgcctggtttaatgatttcaaccacgagcagctgagctttcaacttgatgaagccagggttgaagagcgactgcgccccttcctgcaacgcgccacacaagcaaaaagctataacggcgtgagccaggaagatgtggttgccttatgggattacctgaacgcctcgttcagaaaatcggttgaaaaacttgaacacgcctattggccgcaggtgttgaaaattgcccctgcgctgagtcctggtgaacgcgcagagctattttctttattgtggggagaactgccggccctcaccgagacctatcgttcattagccaatgtgctgaccaaactcaatcatgcccggacggtgttcgccccgctggagacgcttatcgatcacagtaatggcagcattatgaacgtcgacagccttaaccggctaggctccagccaggatcgccacgtggagatccgctactggaaagaggagcagcaaatcggcagcgccagcttaacccaggcggaactggcagcgttaaccaccgagcttatcttcccgttagcggaagtcgaggccgacagcgtcgtggagcaggtcgatctgcttgacttccctgggtatcgcgggcgtcttaaaattaccgcactggaagaggccggtagagaggggcttaatcccatttgccagcttctgctgcgcggtaaagtcgcctatctgtttgaacgttacaccgataatcaggagatgaacgcgctggtcgtgtgcgccagctccgccaaacagagcgatgttgctgacgttggtccggtattaaaccgctgggtagaaaaaacgcagggtaaaagcgccgaagaacgtcagggccgtaaccctgggctgttctgggccatcaccatgtgcgatatgcgcatcaacagcagtctgcaactcaccaccgaacagttaaaagaaggctgggaaggtatgctgcacatgaccttgctggagcgtttcgcccaatatgattggctgcagcaatgggcgcccggccaggcgtttaataactgtttcctggtgcgaaaaccggggctggataatccgttcatcgacctaaaagacggtacagaacaggagcgaaacaaggaagcgtgcatcaccgagcgctatcgccagaagctcgacgaaatgggcagcaccttcattagcgctaaaaacgtgctgcaacacgtcaccgagccgagcaaagcctggcacgcgatgctcgagctcaacgatggcggcatgggacgcttaaccaaagcgctgcgcggcgtcgcgcatctggaattcaagctggcacgtttgcagcaacaacttgagcagtgtcgcgaggagaccggcaatcgccgcctgggccgctggtacgaaaaagacggcgacgggcagctcgtgaaaaaacaggccatcgcgaaagagctatggcaggggctgtccgcctgctcccacagtatgggagagctaattaatcgtctggatctgccgacgcaggagcttaataacatctatttaagcattcgcgaccgcaacccggaaccgtcaaacgatggcgacagcctggcggcaaacgcgtttaccgccagcccatttggcaacaaccccttcggtgataacccgtttggcagcgatcccttcgccgacgcaccggctgaaatcgccgtggttgacgcgccagcgtcaactgcccaggaaagagtcggccaggacgatgatttcgcccatcaggcgtttaaagcctgggtcgcgcatttgcgtgaactgccgcagcaagcgccgcagtggcgtcagttggggatgaacagcgaactgattaatcatctcagcgaagaattgatcaccgcagccacgcgcctagatctggaaggcacgctgaaacgcgcgctggcgggtcaggagcaagcgggtacgcggcgtgaacatcttatggcacgccaggttctgcgcgcccaactgactatgcgtgattttatcgcctggtttggttatctcactctaccgcctgaaaaggtgcccaacagctatgttggcgagaaaaataaagtcttcctgcgccagaaaccgctgatgaacgacgagctgccgcagctcgccgccgttgcgccgcagccgggtgtctcttatctgggagactggctatccgccctgatgagcgtcgtacttgataacgctggtcatagcgccacgcgcgatatttccgtcgaacataatcgccaacttggtcaaattatcagccaattgaaacaagagaacatgccatgctag

SEQ ID NO: 192589 - DNA, 1449 bp, Klebsiella oxytoca
atgcgaaattcgattcagggaccactacttcgtaccggaaataactcttcattcaaggcgctgggtgaaacgggctatcctgttttcaagatggccttccagctacgcgaagccatctatcgtcttgatgcagggcgcgatctggcccgtcatctggctatcccgcaaaacgatcagggcggtgacagaaccgactggtacagcagttttcccggcgatgttatcccgtggagcggcgcaagcgaagcggagcgagaatcggcgcgccagcaatttaatgcgtttcgaatggcagtgcagtcactaagcgaacagttgctcaacgcggagcaaagcggaaccggcggcgatcgtcgggtctttgcccagttgctaaaatctgtaacccatttccccgattatgagtttgtctatctcgttaatggaacgctggtgatcaccttttgggggtttgtccacccggaaggggaacaacgtcacccgatgcattggctgagttcatcgtccgttcccgccgccgccctcgcggccgttccgccgcaggccagcgccacggaaaaaaccgtcgaacccgctcccgcgccctttgttgatgttcgaacgcgccgctggcgctggcgttggttgctatggctacttttggcgttactgctgctggcgctgctgttagggctgctccgcggctgcgctccttctctttccctgccgggcctccctggtctttctgcggataaaaccacggtcaccgctgaacctgtggctacgcacccggccaccagcacccatgacgtggcgatcagggggtcagaaaccgccgttggcgctcgcgccgtacccggcattgtggaagggtcaaccgcggacgcgcatcctgcgctggattcaacggtgcccgcgatgcctgccgacacatctgacagagcggtagacggcgatgcgacgccgccgccggctaacgcaaatgaagccagcgtagaaccgccactgccgcccggcgtacaggatacccacgacgagcagacgcctccgggcgtgactccggtaaccgccccgccgctcgttgcgccgcagggcgaaccgttaaccctcccggccaccctgccggacggcccggcgaagtttcttaacggcgaatggcgcgtgaatggcggtattcaggacaagcacaccggacgcccgctccagctgcaatataattttgaccagggcaacggcaccgtcagcatccgccagtccagcggcgtaacgtgccgtggcccagccaacggtaacgtgcagcagggggcgctcaacattaccaaccctgagcaaatgacctgcagcgatggctcaaactttattgtgccgaccatcgagtgcaaatcaccttccgcgggtcatgccgattgtattggcagcaacgatggggaaaaaaccttcccgattcgtatgcttcaacctaattcctga

SEQ ID NO: 192590 - DNA, 1146 bp, Klebsiella oxytoca; identical to SEQ ID NO: 107915

SEQ ID NO: 192591 - DNA, 483 bp, Klebsiella oxytoca
atgagaaaatacgcacttcttgccgcccttgtccttacgggttgtactacgtctccccaggactgtgatttacacgcacaagatccaagctttattaccaaactgagctgcgccacgtcgggtggttatcgtcagcaggttgatcaaaaagaacagcaggttcgcctgagccaatatcaaaatgaatcggccaggcaacagcaggattatacccaaaacagacagcagaccttaaatcaaaagctggcagatgaacaagcaaggctaaatgccgtgcgttcggatctgtcgcagactctcgcaaaactgaaatcaagcaagattcaaagccgcgaacgccagcaggaaattgccaaattgcaggagctgcagcgccagtcacaaacggcaacgagcgccagcgaaatttcagcgattgagaaaaaggtcgccgaagccaagcacaaaataaaagttctcgaagaagcaaatacgctccgctaa

SEQ ID NO: 192592 - DNA, 453 bp, Klebsiella oxytoca
atgaccgctaactactatcttgacagactgaaaaaagattatgcctccaccgccgatcgtctgcaggcaatggataacgacatcagcaaagataccgcagcggttgaaaaatcgacgctggcgatgaaacaagttattagcgaaaaccaggccaccttaaccaaaatcagcatccaaaaagataaagctggatttgataaagccggtgcgaaaacccagctggcgcaaattgatgccaacatcagcaagatgaaagagaccatgaaaggcatgaaggataaagaatctgcctataaggtcgctttacaaggtcaaacgaccaccacaagtgcagagaaaagcaagctggcaaatttgaacaaagaatatgccaatctcaatagcaagattgctgctctggaacaagaaaccaacgagctgtatgaacagcgccaggcgatctcccttggttaa

SEQ ID NO: 192593 - DNA, 915 bp, Klebsiella oxytoca; identical to SEQ ID NO: 134464

SEQ ID NO: 192594 - DNA, 1368 bp, Klebsiella oxytoca; identical to SEQ ID NO: 134463

SEQ ID NO: 192595 - DNA, 1716 bp, Klebsiella oxytoca; identical to SEQ ID NO: 134462

SEQ ID NO: 192596 - DNA, 255 bp, Klebsiella oxytoca; identical to SEQ ID NO: 134461

SEQ ID NO: 192597 - DNA, 780 bp, Klebsiella oxytoca; identical to SEQ ID NO: 134460

SEQ ID NO: 192598 - DNA, 597 bp, Klebsiella oxytoca; identical to SEQ ID NO: 134459

SEQ ID NO: 192599 - DNA, 231 bp, Klebsiella oxytoca; identical to SEQ ID NO: 134458

SEQ ID NO: 192600 - DNA, 1233 bp, Klebsiella oxytoca
atgaccattccggcagacagcatagttgctcatacactgtccaggatgcagcgtagtctcgaacggcgtacagacactggtgatgtcggtcaggagcgcagcgggcttctttttatgggaaatgtacatgatgcgtttccccgacagctgtttctggatacccgtctttcgccactggataaaaccgcctgggtgatgatccggttgtatgcacagcagaatgaaggtgctgttttcccgacttatgatgagctccaggttcaactggcgtcggcacattcagagaaggcctccagagatacggtcagccgcgttctgctgatgctgcgtcttacaggctggctcagcctgtgtaagcgtgttcgcgacgaccatggtcgtgtgcgaggcaatatctatgcacagcatgatgagccgctgggctaccgtgatgctgagacttttgatccgggctggctgacccttgttgaagagagttgcctgagcaggaataaagccgtccgtatgacggcgctggctgtagtcaatgacatccttcatgatccgggaatgcgccaccgtcacagccgcctggccattattgagagccgactaagtgcacctgccacaccagaacaaatggctcgtcagcgacaggctgtgcaatcgagtccgaaatcaggactcagtaaaaaacgcataaaaaacagcccgaattcactgagtccggaaaacggactcagttcccttaaacctgataattcacagagtccggaaaatggactcagtaaaaaatcaaggagttacgccggagtccgaaattcggactgtaacgtacgttctttcacacacagtgtgaataaaaaaacgtacgtaccgtgtggtgagcaattcctgccagatgattttctgaacgctctgaacagtgaagacaggcagatgctgagtacgcagatggcttcgcttccggagacaatggcaaaagcccttgctgacatgctgcgtgaacaacaggcccttggaaggctcaacaatccggtgggctggatgttctctatgcttcgcagggcgcgaagtggtgagctgaaaatttcagaggatacggcgactgccagttctggtggaacaatttcccgcccggttgaatcacgtactgtacccacagccgacgtccctgttcaacctgcgaaacgcccgtctcaggggcaggtaagggcgatgattgcggctattcggcaacaggtccagaaatga

SEQ ID NO: 192601 - DNA, 723 bp, Klebsiella oxytoca; identical to SEQ ID NO: 134456

SEQ ID NO: 192602 - DNA, 2010 bp, Klebsiella oxytoca; identical to SEQ ID NO: 134455

SEQ ID NO: 192603 - DNA, 492 bp, Klebsiella oxytoca; identical to SEQ ID NO: 78755

SEQ ID NO: 192604 - DNA, 204 bp, Klebsiella oxytoca; identical to SEQ ID NO: 134453

SEQ ID NO: 192605 - DNA, 549 bp, Klebsiella oxytoca; identical to SEQ ID NO: 134452

SEQ ID NO: 192606 - DNA, 243 bp, Klebsiella oxytoca; identical to SEQ ID NO: 134451

SEQ ID NO: 192607 - DNA, 249 bp, Klebsiella oxytoca; identical to SEQ ID NO: 78759

SEQ ID NO: 192608 - DNA, 879 bp, Klebsiella oxytoca; identical to SEQ ID NO: 134449

SEQ ID NO: 192609 - DNA, 873 bp, Klebsiella oxytoca; identical to SEQ ID NO: 134448

SEQ ID NO: 192610 - DNA, 660 bp, Klebsiella oxytoca; identical to SEQ ID NO: 134447

SEQ ID NO: 192611 - DNA, 246 bp, Klebsiella oxytoca; identical to SEQ ID NO: 134446

SEQ ID NO: 192612 - DNA, 1356 bp, Klebsiella oxytoca; identical to SEQ ID NO: 134445

SEQ ID NO: 192613 - DNA, 228 bp, Klebsiella oxytoca
atggtgccgttaccagacagtcgtatcaaaagcattattcagaacggtcgcctgtggatctgggtacctgaaacagacggtgtttatgccgcgttgcgcgcccgctcagtgacttctgcgcttgccctgaccgtcagaggcggtcgtctgcggatggcggatggcactgatatgaacctgtctctgccgtccggtgtgacggaaggcagcattgtttatcttaactaa

SEQ ID NO: 192614 - DNA, 1674 bp, Klebsiella oxytoca; identical to SEQ ID NO: 134443

SEQ ID NO: 192615 - DNA, 1281 bp, Klebsiella oxytoca; identical to SEQ ID NO: 134442

SEQ ID NO: 192616 - DNA, 498 bp, Klebsiella oxytoca; identical to SEQ ID NO: 134441

SEQ ID NO: 192617 - DNA, 1575 bp, Klebsiella oxytoca; identical to SEQ ID NO: 134440

SEQ ID NO: 192618 - DNA, 1116 bp, Klebsiella oxytoca; identical to SEQ ID NO: 134439

SEQ ID NO: 192619 - DNA, 597 bp, Klebsiella oxytoca; identical to SEQ ID NO: 134438

SEQ ID NO: 192620 - DNA, 480 bp, Klebsiella oxytoca; identical to SEQ ID NO: 134437

SEQ ID NO: 192621 - DNA, 669 bp, Klebsiella oxytoca; identical to SEQ ID NO: 134436

SEQ ID NO: 192622 - DNA, 252 bp, Klebsiella oxytoca
atgcccaacattattctgagtgacacaagcgcgagcatcagcgaactaaaaaaaaatccgatggcgacggtcagtgccggcgacggcttcccggtcgcgattctgaaccgtaaccagccggctttttactgcatcccggctgaactttacgagaagatgctcgatgccctggatgatcaggaactggcaaagctggtatcagaacgcagtaaccagcagctgcttgacgtggatctggatacttatctatga

SEQ ID NO: 192623 - DNA, 288 bp, Klebsiella oxytoca
atgacttatacggtcaaattcagggaagatgcgctgaaagagtggcaaaagctggataaggccattcagcagcagtttgcgaagaaactgaagaagtgctgtgacgaaccacatatcccttcagcaaagctgagaggaataaaggactgctacaaaattaaacttcgtgcatcaggttttcgcctggtgtatcaggtgatagatgatcaattaattatcgcggttgttgctgttggaaagcgtgaacgcagtgacgtgtacaatctggccagcgaaaggatgagataa

SEQ ID NO: 192624 - DNA, 318 bp, Klebsiella oxytoca
gtgttcgtttacaacaaaattgtcggattgctcgatgaatgctcagcggaaaaactgagtacgccaaagagcaacacctgggacattatcgccgtttcggttaacctgctggactgggtctggatgactgaccatcgctacgcaaaagtcggagtcctgctgaacgatttcagcccgaacggcgtttctcagctgaacctgtccgatgaagtacagccgcgggcgcacagtggtgagttgatgaaggtactcgacggtattaaccattcaggcaaagggaagatcaggttcgcagatcgcggcattgcctcggaatga

SEQ ID NO: 192625 - DNA, 525 bp, Klebsiella oxytoca
atgcccaacgggtggcacggtgacgaacctcgggggcaaactgattgttttttgtcatcctgttacctctctcgcaaggagtttagtctcaaggagactaggtacggttcagtgagaacgtgttcccagttgaagcaccggtaccagcatggtgctgtgggagcatggtcccagatgaaggtccggttccggtatgcggctgtgggaccgtggtcccagctgaaactccggccctggtatagggctgtgggaccgtggtcccagatgaagctccggtcccggtatagggctgtgggaccgtggtcccagatgaagctccggtcccggtatagggctgtgggaccgtggtcccaactgaagctgaggtcctggcatggggctgtgggaccgtggtcccagttgaagctcaggtcctggcatggggctgtgggaccgaggtccctgttgaatttcagcaccctgcaacacctgttgagttcagactacaacagagatttagttcgacgtagaaattctgaatgttaa

SEQ ID NO: 192626 - DNA, 972 bp, Klebsiella oxytoca
atgaaacgtgcgccagttattccgaagcatacggttaatacgccagcaactgaaactccctcttctgctgtgccggcagcgccgatggttgattcactcattgcgcgagtaggtgcgatggcccgcggtaattccattgtcctgcccgtttgtggccaggaagtgagattttcacttgaagtcattccaggcgattctgttgagagccactcccgggtctggtcaggcaacgaacgtgatcaggaacttctgaccgaagatgcccttgatgacctgatcccctcttttttactaacaggtcagcaaacgccggccttcggccgtcgggtttctggtattatcgaagtcgccgatggaagtcgacgtcgtaaagcggctatcctgacttcaagtgactaccgtatcctggtcggtgacctggatgatgagcaaatgacggcactctcccgtctgggcaacgattaccgtccgaccagtgcctatgagcgtggtcatcgttacgccagccgtctgcagaatgagtttgccggcaatgtctctgcacttgccgatgcggaacatatttcccgtaagatcatcactcgttgcattaatacagccagactaccaaagtcagtggttgccctcttctctcatcctggtgaactgtcagcccgtgctggtgaagcgctctttaaagctttcgctgataaagaggaattattaaagcagcagacaaaagaactgcatgagcaaaagaaagcgggtgtcatatttgaagctgaggaagtgattactctgttaactgccgttcttaagaaaacgcctgcagccagagtaaaccagagttcccggcatcgatatgttcctggcgcctctgccttgtataagggcgataaagtcattctcagtcttgacagatcgcgcctgccttcagaatgtattgagaagattgaagcgattctgaaggaactcgaagctaaagcgggctga

SEQ ID NO: 192627 - DNA, 1683 bp, Klebsiella oxytoca
atgcaaaaaaagacaaatgatcaaattattcttgagcatattctcaaagataagaaaagtgagtttgatattgaaataaatgaagccgaacattttgagatatattcggcttcggagattttaaaagattacgacatcacttatgatgatattatgtatagtatcgttggtgatggtgggtttgattcaatctttacatttgtcaatggagaattgcaaaaagaagatacagaattgaatacacaaataagaaagaatcatatcgagttagttgtaattcaatcaaaaacatctcctacgtttaaagaagatgctataataaaatttcgcgaaactgtacaggatttatttgatctttctaatgacatatcaaaattcaaaaaaagatataatccattattaatcgaaaggataactatatttagagatgtatatgcaaaacttgcaaaaacattcccatcatttatcattaaatttttctatgccacgcaaggtatggataatgagattcatcataatgtccttgataaggcaaacaagttgcgtgacgacgtccataaactatttagtggtgccacatttgactttcaatttattggcgccacgactttacttgaaatgagccgtaatattccagccagttcaagaacactggagatttcagagcaacctatcagtacatcggctggaagttatatttgtcttgtgtcattaccaaaatattatgaatttatttgtgataatggtgctttggctagaagtatatttgaatctaatgtcagagattatcaaggtagtgttacggtaaataccgggattcgattaactcttcaaaatttaaattctgacgatttttggtaccttaacaatggggtaactataatcacgccaaaagcagttagtgcgggtaaacaactaacaattgaagacccacaaatagttaatggacttcaaacatctcatgaagtatacagacatttttcaactcaagattcaacaagtgatgataaacgttcaattttgttaaggataatatgtgaagaaaacgaagaggcacgggatagaataatacgtgcaacgaatagtcaaacagctattctcccagcttcattaaggagttcagacgaaatacataggaatattgaggactacctcaaggcgaatgatttttattacgataggaaaaagaattattataagaatcttggtaagccagcatctaaaattattagcattgcttatttagcacaagcaatgatgaccattgtattatttagaccagatagtgcacgagcaagaccgtcaacattaattaatgctgataatgaatataagaaaatatttagcttagacattaatattgacacctatctgaaagttatattaataataaaagcaactgaaacataccttaaaaacgatgccggaccagatgtaacggatgcaaaaatgattaccaacattaaatattatgttgcaatggtagcagctattatatatttaaaaacaaagacagatatcttgaataaacttgcatccgtatcacaaattgcaatcccttatgaaatcttcagtgaaagccttacaattgttcttaaaaattatcatgcattgggtggtgatgatcaggtggctaaaggaggagcattaaccccagctatccagaaagatataacactatag

SEQ ID NO: 192628 - DNA, 297 bp, Klebsiella oxytoca
atgatggatgaaacagaggcggacgtgctggcgtacttcggcttctcgaaagcgcgccgggtgaaaatccactcaatgaacacgctgaagcgccttaacagagaggtgaaacggcgtccagacgtggtgggcatcttccccaacgaagagagcattatgcgactgcatggtgcggtactgacggagcggaacgaagaatggctgttgcagaaccgctacctgccgcagcacagcatggcagagatagaccagcctgcagagaatgaagtgcttgaagcgctgccactcagcgcataa

SEQ ID NO: 192629 - DNA, 669 bp, Klebsiella oxytoca
atggctgactggtttattgcgactgaaggcgtgaaggtggtcaaggacagtgccagtctgtggccgcagatcatcacgggggtttcatctgcaggcgctgcacttggtggtgtgtgtcttacacatcgtttcacacgcaggcgggaagaacgtgcggcagctgataaggcagcagctgaacgtcgttatatcgctactgaactggtgttcttgcttgaacgctatgctgtggcctgggtggctctggaatatttccttatccatgaattacatgaaaaaaacaaaacacctgttctgaatctttcagtagttaacagcgactggaggaccctgccagcacatctaatattccggctccgcttacttgaaacatatcaagcggatctgttgttacgcatagaacggaagatagttaatgaaaatccaatagtatccgtgcctctctccattgattgtttgaaaatgggcatattcgcttttattctggccgccaaactacgcagagaagttggattgccggattctgtccatctgagaggtaagcaggaagtgtttggcagacttagaagtaggcgcaaattatattggcgcaaaattgtcctgcaaaagaggagagccaaggaaatgccaaatggatctgattacaaggataatgataggttgttatga

SEQ ID NO: 192630 - DNA, 1200 bp, Klebsiella oxytoca
gtggatggcatcaggtggatggactacgccggaaacatgaagaacaacataacagatctgcaccggaggctacatcagggcagctacagggcgcagcccggcaggcgtcactacatcccaaaagcggatggaaaacaacgcccgctcggcatcgcctcgctggaggacaagatcgtccagtatgcgctggtgaaaatcctgaacgcagtctatgaaaacgactttatggggttctcatacgggttcagacccgggcgaagccagcacgatgcactggacgcactggccacagggctggtacgcactaacgtaaactgggtactggatgccgacatcagtcagttcttcgacagggtgagccacgaatggctgatcaggttcacagagcatcggatcggcgaccggagggtaatcaggctcatacgtaagtggctcacagccgggacgtcggaggagggtcaatggcgagcaacggaggaaggcaccccacagggtgcggtcatctcaccgctgctggcaaacatatacctccactacgtcttcgatctgtgggcgcatcagtggcgacgtcgctatgccacaggcaatgtggtcatggtcagatacgccgatgacatcgtcatcgggttcgacaaacgatacgatgcccggcgcttccgtatagccatgcagcgcagactgagggagttcggactcacggttcacccggagaaaacccgtctgatggagttcggccgcttcgctgccgaaaaccgtgccatcaggggaaaaggcaaaccagaaacgttcaacttcctcgggttcacgcacatcagcgggaaagatcgcaacggcaggttcatgctgatacgaaagacccgccgggatcggatgacggcaactctgaaagccatcaaagacggtctgcgaaggcgctggcattactcaatccccgaacagggaaaatggctcaggagagtggttcagggatacctgaactatcactcggtaccgggcaacttccccaccatgcagaagttcaggacacacgtaacaaacctctggcgccgggcgctcaggcgcaggagccagaaggatgatacgacctggacgaaagcaaacaaactggcagccgcatggctaccaagggttcgggttcttcatccatggcctgtggagcggttcaccgccagacacccgaggcaggagcccggtgcgtaa

SEQ ID NO: 192631 - DNA, 1167 bp, Klebsiella oxytoca
atgaaaatcaattttcccctgctcgcgctggcgatcggtgcctttggtatcggcacaaccgagttctccccgatggggctattaccggttatcgctaaaggcgtggacgtttcgattccggcggcgggaatgctgattagcgcctatgccatcggcgtgatggtcggcgcgccgctgatgactctgctgctctcccaccgcgcgcgcagaaatgcgctgatcttcctgatggcgatttttaccctcggtaacgtactctcttccattgctccggattacaccacgctgctgctgtcgcgcattattaccagccttaaccacggcgccttcttcggcctgggttcggtggtggcggcgagcgttgtgccaaaacacaaacaggccagcgccgtggcgacgatgtttatggggctgacgatagcgaatatcggcggcgttcccgcggcgacctggctgggcgaaaccatcggctggcggatgtcgtttcttgccacggcggggctgggcgtgattgcgattatcggtctgtggttttctctaccgaagggcagcgccggcgagcgccctgacgtcaagcaggagctttccgtgctgatgcgtccgcaggtgctgtcggcgctgctgacgacggtactgggggcaggggcgatgttcacgctttatacctatatttctcccgttttgcataccatcacccacgcctctccgctgtttgtgaccgccatgctggtgctgattggcgtcggcttctcgctgggtaactaccttggcggtaagtttgccgaccgttccgttagcgggacgctgaagggctttctgctgctgctgatggttatcatgctggcgatcccgctgctggcgcaatcgcaggtgggcgcggcaatcagtatggtggtctggggcgcggcgacctttgcggtggtgccgcctttgcagatgcgcgtgatgcgcgtcgcccacgaagcgccggggctgtcatcatcggtcaatattggggcttttaacctcggaaacgcgctgggcgcggcggcgggcggcgcggtcatctctggcggcctgggctatgcctttgtcccggtgatgggggcgattatcgcaggcgtggcgctactgctggtgctgttcagcggccgggcgcagccggaagaggcgttcgccaaccgttaa

SEQ ID NO: 192632 - DNA, 153 bp, Klebsiella oxytoca
atgagcggcatcgccctgctgctggccagcgccggtgcgggcgtgctgtgggaagttctgggcgccgcctcgacgttttacgccggcgcgataatctgcgtcgtgacgctggttggcatgcgctgcatgccgtcggcttatcagcaaaactaa

SEQ ID NO: 192633 - DNA, 1227 bp, Klebsiella oxytoca
atggctggcgaacttaacaaactgagcgacaggaagttaaagggattacatggcatcccggccagtaagattgagttttatgctgatggtgccgggttgagcgctaaggtaacgaaagctggtggtattagctgggtgtttacttaccggctcgacgggcagaagctgcatcggctaactctggggcgataccctgatatgagtctcaaagaggcccgttcctcgcgtgataaatgtcgccagtggctggcctcaggtaaagacccaaagcaccagttggcgctaactactcaggaaacgcttaaaccggtcacggtgcaggaagctatcgaatactggatacgcgaatatgcggaagaaaaccgtgcgaacgttgagcggcataaagcggagctacgcaagcatatttacccttacattggaaaaatggcgctcgctgactgcgaaacccgatactggcttgaatgctttgacaggatgaaaaagaaaacgccagttgctgcgggttatgtatttcagatgtgtaagcaggctctgaaattctgccgcgttcgccgttacgccgtcagtaccgcccttgaagatttgagtattcccgatgttggtaaaaagcaggcgaaaaaagatcgggtactgaaagataaagaggttgggggattatgggctgctatatcgtccggcgatacttttctgccttactacacaaacttgctcaggatcaccactttgtttggttgccgcacccaggaggccagattgtcagagtgggccgaatgggatatggaggcatgggtgtggacagtaccaaaagcgcatagtaaaggcggtgaaaagattgtgcgtccagttccagaggcgatgcgttcatttattgaaatgctccacgatgaaacaaaatcatccggctaccttcttggggttgtgaagaatagcgaagcggttagccagtggggccgtagtgtttataaaaaactgaggcattctgaaccctggacattgcatgatctacggcgaacgcttgcaacgcatatgaataatatgggtatagctccgcacgttgttgaacagttgctgggccactcaatgccaggggttatggcgatttataaccgtagtctgtatctgccggagaaactggacgcgctgaataagtggtatgatcgcttagaacttcttgcgggtaatcatcaaaatgtggttctgttaactgtagcgaatagagattaa

SEQ ID NO: 192634 - DNA, 942 bp, Klebsiella oxytoca
atggcagaaaaagaaataaagattccattttcatattgtagattgtccagaggtgcatcatttctgggggttgaaccgtcagatttgatcaaccttgctattgaaaataaaatcgaaataagcatgatgctgaaaaggtttcactgccgaatccttcttcgtgaagattttagtgatgtaaaggattggtattcatcactatattttcctcgtacttttaattctatgtcagggcaaacccgcgcgataacgaatcactcttttattgaatttactaatggccgttattttgaacctgataaactattatctggttcagacatctttacggaacaagaaagtaaagggttccttgtcggatatggctttgcattaggtctgtggcgggtaatgcccgatcagtttgagtcatctttacctgtgaaggattttttccccggatttttcccgtgcctcacgggcggtgaaactccagtaattcagattctgccagcccaaccttttatcgatcaggctaatggcaagaggtttaattttgacccttatgagtttgaagccgggtatgatgatttatgggttactaattatgatattaaacggcttatggaaagcggccttgatttcgataagctgccaatgctcaatgatattgaacgacctgatttagactctgattcaaaaaatagtattaataaacgctcagaaagtgcaaaagaaaaacatgcacgaaatgaactattaatcttaagtgctgcaataaaattcaaagaaacaagtgctgatattttcaatgaaaagtgcttgaaaaaagatgggagctacaatttctcagcatgggccagagaactttccgacagagtgcacttattccctgacggacaatgcccggtcaagagcgttgacacaattacgtcatacattagtaggcactttaagttttaa

SEQ ID NO: 192635 - DNA, 285 bp, Klebsiella oxytoca; identical to SEQ ID NO: 152370

SEQ ID NO: 192636 - DNA, 780 bp, Klebsiella oxytoca
atgcaaaaattaaatgagttggttccggttaaccccggaaatattggcggcgtggcggtatcgctggtcagtgctaaaaaactccatgcgtttctcggcgttgggcgtgatttcaccacatggattaaggggcgtatcagtcagtatggttttactgctggcgtggattttactgtggttgaaaatttgagcgcccccgtttcggggagcgcaaaatatcgccaacaaattgcacatgattacttgatcactatcgacatgggtaaagagctggcaatggttgagcgcaacgaaaaagggcgggaggtgcgccgctacttcatcaactgcgaacgccaggcaaaagccgccgctaatatcccccagacgttaccggaagccctgcgccttgctgctgatctggcagaaaaggcaagcgaacttgaaaaccggctggtggccgctgcgccaaaggttgatttcgctgatcgcgtggcggagatcagcaagggtatttccattcccaactatgccaaagccgtagggcttggccccatcaaattattcggctggatgaggcaacaggggattctcatcaacggcggccagcgccacaacctgcctatgcagcgttatatcgatagcggttattttgccgttcgccagggaacgtatgaaacgaatggcgaggtaagagcctcattcacaacgatgctgacagggaaaggtgagcagtggttaacgaagaaactgatcgctggtggtgtattgccggaggtgccgaatgctgacgctgaataa

SEQ ID NO: 192637 - DNA, 186 bp, Klebsiella oxytoca; identical to SEQ ID NO: 28742

SEQ ID NO: 192638 - DNA, 270 bp, Klebsiella oxytoca
atggctgacaatcagtctacccaaactcgcccggaatttacatggttattcctggcaacccccgatcacactcctgaatgcacaccagtagtgcttcgctttgatgctgatacggaagctaaagcccgcgccgctttccccggctgggatttagtttttgccgccaaaatccgcgctcaggctccttgccgcgttgcgttcttcgattacaccacccgccgtggctgggagttcgacagtgccgcgattcaggaggtacgtcatggctaa

SEQ ID NO: 192639 - DNA, 213 bp, Klebsiella oxytoca
atggctaagcaaaccatagagaacaatgtgcacttcgcatcgttgaaacagcgatccagccaggtagatgcgctgatggtagcgcttgaaattgcctgcaatgaaatggagtcaggtgatatcgaaacagcgatagccggaatccgctcaatgtctgctgatattttcacggccatccatgccattaaagatttggaggtgcgcaatgtttaa

SEQ ID NO: 192640 - DNA, 267 bp, Klebsiella oxytoca
atgtttaaagagataaatctggatgcttactatgaagatcagcagcgtgttaatgctctgattggttccactagtgcgcctgtaccaactacaccggagaacatttcgcgcaatcgtctgttacgtgttcaggccgggttgcggcatttactgactgaggtcataccacaaatcaccgacgagcagcaccgccatgaagtctatttgtgggttgatgggatttattccattactcgctttgaggaagttgacgcggagaaggtgtaa

SEQ ID NO: 192641 - DNA, 369 bp, Klebsiella oxytoca
atgatcagtctcacaaaatttaatgagctggaaaaccgtgtcgatctgctggttaaccgcgtcctggagttagaacagcaggtgcgcacactcaccgaaagccaggggggagatattcctcccggtatggccccggtcgccacgctggcggctgagttcggcatatcgacgaaaaaagccgaagaactggcaaaaaacacgggcgtgatactggtcagaatgaaagctggtggctttatcgcgccggataataagttcagagaggtggcgaggcaggttctgcgcagcgcgaagcgcaaatatgggtcggcgtactggtatcacccattacttggcaaatttcagatgagcggaggtatcccacaatga

SEQ ID NO: 192642 - DNA, 366 bp, Klebsiella oxytoca
atgaccgatatttttgatgtgctggggccgttgttccgcaaactgaccgaaacctgtattgctcaccagatagcggaaaccggttcggcgacattgctggtggaaagcgataagtatatggcccgctatcgcttcacgctggagccgcgcgtaactgaaaacgtattgatgaaatatatgatttttggctgctttgacgaattcgggcgcgatgaggggttaaggcgtttgcgggatattctgctgacctgctttaccgacgatggcgatattaacgaaatggggttgcagatagtgaaaagctgccaccttgagtacctgcatgaagacctgggcgcggatatgtccaataaggtgttgcactga

SEQ ID NO: 192643 - DNA, 2136 bp, Klebsiella oxytoca
atgaagatgaagaatgccccgaacattaaattcctgccgaaagataaatttaccgaggcgattatctttgcgggtgaagatgcctattcgcatgtgcagcactggatcgagagcgaaggtaaaagggcatgggatgatgtaccgcctgtttatctgggtaaaaggcaacttgcggaactggaacggttaaacattgttgataacggccgtcgcagtgttcgtgtgatccgcgctggcgaactttccgaaatgcagataagcactatcgcaaccaaactggcgctggcggatgtgaaagaggcccggctgtttaatggcatgtttgagcctcagccaaaggaggactggacgggcaggcttccacgtctcaaagaagaggccgaacgcggggaaagtattgtggtgaacctgcctgtgaaaaaacgggagccaaagcctgaacagggcgatgaactcaaaccccgcgtggaaagccgcagcgatggcctgtactggatcacgccaaaggtggacaaggatagtggcgagatcatcaataacgaaacgtggctgtgctcgcctcttgaggtggtcggctccggtagtgacggggcagagcgctatcttgttttgcgctggcgctctccgcgtggtcatgaagatattaccagggcgatcccctgtgctgatatcggtgagcgcgacggttggcgctcacttaaagctggtggggtgaatgtgaccactaaaagcaccttccgggcgattctggccgactggttgcagcaaagcggcattgatcgggaatggattatcacccataccactggctggcatcacggcgcatatatcatgcctgatggtgaagtgattggtgatccagagacgcccattctctttaacggtcgcagcgctgcatcttccgggtatgccattgctggtactgctgccacctggcgggattccgtcgcccgtctggccgggggcaatccgtccatgatgctgggcgtggcagcggcattatccgcgccgcttattggcctggtgggtgctgatggtttcggcgtccatttgttcgagcagtcgagcgccggtaagaccactaccgccaatattgcgagcagcctgtggggtgagcctgatgcgttgcggcttacctggtacggtactgcgcttggcatagcaaacgaagcggaggcgcataacgacagcctgttaccgcttgatgaggtaggacagggcagcagtgccaaagatgttgccacgtctgcttacaccctgtttaacggtgccggaaagttgcagggagccaaagagggcggcaaccgggagcttaaacgctggcgcacggtggcgatcagtaccggggaaatggatattgaaaccttcctggctgctggtgggctgaaagtgaaagcgggccaactggtgcgcttgctcaacatccctatggagaaatcgacgacctttaacggtctgccaaacggaaaggctcatgctgacgcactgaaagaagcctggattgataaccacggggcggcggggcgtgagtgggttaaatggctggcggctaaccagcaggaggctaaacaggcggtgcgtgacgcgcaaacgcgctggcgcggccttatcccggcggattacggtgagcaggtacaccgcgtggccgaacgctttgcaatcctcgaagccgcgctggtaactggtgcatcaatcaccggatggagtgaacaggcctgccgtgacgctattcagcatagctttaacgcctgggtgaaagagttcggcacgggtaacaaagagcaccagcagatcatcgagcagtgcgaggcgttcctgaatgcctacggtttaagccgctttgcaccgttgccctatgatccgtccagtatgccgattcgcgatctggccgggtatcgaaagcgcaaaagcagccatgatgatgcgccgctggtgttctatacgttccccgcaacgtttgagaaggagatagctcagggctttaacgccaggcagtttgcccgcgtgcttgccgctgctggcttgctttctgagccgtccagcgggcgtggataccagcagaaatccccgcgtattgatgggcgtcagatcaacgtttatgtgcttcaccaggttgcggaagatggagaagaataa

SEQ ID NO: 192644 - DNA, 336 bp, Klebsiella oxytoca
atgaaactgattggcaaagataacgggcatatgagcgatcttaagtttctctacagcgccgttgatgagctttcaaataaagatgagattacggtgacggattttctggctctgagcgcttttgtcacttctgaaaaacttgatctggaatcgtaccagtctgggctggaagaaggtgggcaagagctgtcgaaatatgccagcgcttacctcgatcttctacagaggatggcggctgatttgtcgtacccaacctctggccttgagaacgctatccatagcgcacaatcaacggcaagctgggctttctatcagtgtgggctggataaagaataa

SEQ ID NO: 192645 - DNA, 471 bp, Klebsiella oxytoca; identical to SEQ ID NO: 120002

SEQ ID NO: 192646 - DNA, 1167 bp, Klebsiella oxytoca
atgaagaaattacttgaattacgccagcagaaagccgcactcaaaacccagatgcgttccatgctggaaaaagctgacaacgaaaagcgaagcctgaacgatgaagagggcaggcagttcgatgaactccgcgtccaggcagatgtgcttgaagttgaaattacccgccttgaagctgtcgccgatgatcagcgcaatttgcctggtacttctgttgaaggtaaaggtgtaagcaacgatgagctgcgccactacatcatgactggcgatacccgctctctctccacgttggtgcaggctgacggcggctataccgttatccctgagctggacaaagagatcatgcgccagttgcaggatgacagcgttatgcgctccatcgccacggtgaagaccaccaaaaccaacgaataccagaagctggtgtcagtgggcggcactaccgttaagcgcggcaccgaaggcgaagcgcgtaccgaaaccagcacaccgaagatggagcgcgttgatatcaaactcaacccgatctacgcctacccgaaaaccactcaggaaattctcgacttctccgaagttgatattctgggttggctgtcttccgaaatcaccgacaccttcactgctaccgaagaaaccgactttgtgaacggcgacggtgataaaaaatccaaagggttcctgtcctatccgcgtgcggccaccagcgataaaacccgtccgttcggcacgctggagaagatggaagctgctgccgtttcctctgatggccttatcgacctgctgtataagctgaaagccaaataccgcaaaaatgccgtatgggtgatgaactccaacactgccgctacgctgcaaaagctgaaaaacggcaacggggattacatctggcgtgatcgtctcgtcgctgactcccctgataccctccttggccgtccggttcaatatctggaaacgatgcctgatgcggctgcgggtgaagcgttcctggcagtcggcgacttcaagcgcggttacttcatcgtggatcacactactggcgtgcgtacccgccccgacaacatcaccgaaccgggtttctacaaggtgcatactgataaatacctgggcggcggcgtggtggactccaacgccatcaaggtgcttgagctttccggctccggttcctga

SEQ ID NO: 192647 - DNA, 561 bp, Klebsiella oxytoca
atgaaaacaatcgattttgaaatccgtacctccgaactgagtgccagcaacaaaaagctggtgggctatgccgtgcgctggaacagcctgtcagaagttatctgggatgagttccgcgagcagtttgcgccgggggcgtttaaagatagcctggaatccggtagcgatgtgcgtgcgctgtacgagcataactatacccaactgctggggcgtaccaaatccggcacgctggtgttggccgaagatgataccgggctacgcttcgaactgaccccgccgaatacccagcttggaaacgatgtgctggagctggtggagcgtggagacatttccggcatgagcttcgggttccgtgcgctgaaagagtcctgggatattactcctacaccgtatattcgcactgttaccgctgccgagctgcgggagatcaccgttacttctatgcctgcttaccctgagtccggcgtggaaattgcgcaccgttctctgttctcccaacatcctgaactgcgccgcgctggtgataaccgccgacgctgggctgacttagcggggctgtga

SEQ ID NO: 192648 - DNA, 1242 bp, Klebsiella oxytoca
atgtggaatatctggccttttggccgtaaatctgagccatccgaacagcgcagcatgacgattgatgagtttctggcgatggcagggattccaaacactggttcaggcgaatatgtgtctgctggtactgcggaatctctgccggcggtgatgaacgccgtttcagttatcagtgaggcagtggcaacaatgccctgctatctctaccgcgtgcgcaacgataacgggcgagaagcgcgggagtggttgagtaatcatccggtagattttctcctgaacgagcaaccgaacgactgccagacgccataccagttcaagcgcacgatgatgcgtcattgcctgctgaatggtaacgcctatgcggtgatccaatggggccgtgacggccagccgcaatccctgcatccgtatgcgccgggggcggttgttcctgagcgtatcggccagcataagtacaaatacactgttactgagccgtttaccggggcagtgcgcacttacttgcaggaagagattctgcacctgcgctactcgaccgatgatggttttctggggcgctcgccgatcaccatctgccgtgaagcgctggggttaggtctggcccagcagcgccacggtgccagcattatgaaagatggcatgatggcggcgggcgtagtcactactgctgaatggctcgatagtgtgaagggtaagcaggcgctggacgcgcttgagcgctacaaaggtgccagaaatgccggtaaaacaccgatccttgaaggtggcatggactataagcagcttggcatgagcaatcaggatgctgagtggctagcctcccggcgcttcaccatcgaagatattgcccgcatgtttaacgtttctcccatcttcttgcaggaatacagcaacagcacctacagcaattttagtgaggcgagccgcgcctttctcaccatgacgatgcgcccgtggctggcgaacttcgagcagcagattaaatcagctttgctggtggcctcacctgtgccgggcattcgctatcaggtggagtttgattcggctgacctcctccgtgctaccccaaccgaacgttacgccacgtatgaacgaggtatcaagaacgggatcatgaacccgaacgaagcccgtgagcgcgagggtatgtcgccgcgtgaaggtggcgacgaatacagccaggcatggaagcaggaagtgaaggtcagtaccggttctgagaataaggaggatgcgtcatga

SEQ ID NO: 192649 - DNA, 336 bp, Klebsiella oxytoca
atgaggccaggaggattaaggcaacgcgtcacgattcagaattttactaccagccgaaccccttctggtggcgtcattcaggaatggtacgacgttgcgagagtctgggcagaagtgaaggggatcagtggccgtgagctgatcgctgcgggtgctgaaatgtccgaggttacatttcgtatgtgggtacgttaccgctctgacgtaaccagtgccagccggatcatctggaaacagaaaggacatgatgcaaaagcatttgatattcagtcggcaattcctgatgaaaaggctaccaggctggagttgctttgtaagggagggcttaagccgtga

SEQ ID NO: 192650 - DNA, 300 bp, Klebsiella oxytoca
gtgagtgaactaattgggcttgatgaggcaaaacttcactgtcgcatcgataacgatgattcctatgaagatgcaatgattcaggcatacatcgaagcgtcactggaagtctgccagaagcatatcggtaaacggttcggtgctggcctggaatttactcctgccatcaagatcggatgccttatgtacgtttcccaactgtacgaataccgcacgatgattagtgatgtggaggcgaaagagatcccccttgctatctctgcattgtggtctgtgtatcgcgatgtgggggtgtactga

SEQ ID NO: 192651 - DNA, 444 bp, Klebsiella oxytoca
atgccgtggcaaccaatgcgccggtgcactgagccgggatgcaataagcgggtgaagtctggtaagtgcgatgagcacaagcgcgaagcctggcgggcggaagatgccagacgcggccaccgtcgcgcccgtggttactcagcatcatgggagaagtaccgcgctcagtatctgaaacgtcagccgctatgtgtcgagtgccagaagttgggcctctacgttcctgcaaagattgtcgatcacatcatccctatcgacggcggtgatgatgttctgttctggcctgagtggaatcaccagccgttatgccagatgcatcataaccagaagaccacgcagcaagaccccatcaccaaagcgaaccgtaaggcagggctgtaccgagagcaggaagagcgtgcagcccatcgcaatgactggatgtatgagggcagaaatgaatga

SEQ ID NO: 192652 - DNA, 153 bp, Klebsiella oxytoca; identical to SEQ ID NO: 84401

SEQ ID NO: 192653 - DNA, 192 bp, Klebsiella oxytoca; identical to SEQ ID NO: 20371

SEQ ID NO: 192654 - DNA, 1662 bp, Klebsiella oxytoca
ttgaccgtctggaatgagtacgcaaatgcgataaaaaagggcgaaattccggcctgtaagcgcgtaaaacaggccgtggaaaggtacttttccgacctgaatgaccctcgttatgagttcgatacggcgaccgtagagcggtttattgcgttctcccggctctgtcctcacgtcaaaggcccgcttcggggccagccaattgatctggaaccgtggcagcagttcgcctttgctaacctgctgggctttaaagtcagagagacaggccgccgtaagtacagcagcgcttttattgaggtgccgcgcaagaacgccaaatccaccgtagccgccatgctggctaactggtttctggtaatggagaagggccagcaggatatctacacggcggcggtgagccgggatcaggcccgaatcgtgttcgacgatgcccgccagatgtgcctgctgtcaaaaccgctgaaaaagcgcgtaaatattcaggcgcataaagtcattttcccgaagagcaacagcctgctaaagccgctggcggcgaaagcggccaccattgaagggactaaccccagcctggcgattgtcgatgaataccaccttcacccggataacggcgtttattccgcccttgagctgggtatgggcgcacgtcctgaggcgattttgttcgccatcacgacagccgggagtaacgttgtctccgcctgtaaacagcattatgactactgctgtcagattctggccggggaagagagcaatgactcgctgtttgtcctgatctacgaactggacgacgaaagcgaggttgagcagccggaaatgtggatcaaggctaaccctaacctgcatgtgtccgttgacgcggcgaaactggaatccaccatccagaaagcgcgcggcattccgtcgcagtgggtggagatgctgaccaagcgtttcaatatctggtgccagggctccacgccgtggatgggggccggcgcatgggatgcctgtgcgctcgactataccgaagacgatctggccggaatggagtgctacgccgggtttgacctgtcctcaaccagcgatattaccagcgtgagttacgctttcccgtttgaacgcgagatcaggcttcttacccggcactatctgcccgaagcgcagctacttaacgttgctaacaaaaaccgcgccatctatcgccagtgggtaaaagcgggatggatacgcaccacccccggcgactgtatcgactatgaccgcatccgtgacgatatcctgcgcgacgctgaaacattcaatatccggctggtgggctttgatacgtggaacgccacacacctgcgcacccagctacagggggcggggcttgatgtggagccgttcccgcaaacctatctcaagttcagtccggtagcgaaatcctttgaggtttttgttaaccgcaaggtggtgcgccatcgtggcgatccggttctggcctgggcgattggaaacgtggtgatggagtccgacgccaacgccaatatcaagcccaacaaaaagaaatcctctaacaagatagaccctgcggtttctgcgcttatggcgttcggcacattccaggcagagcacgaggattttgcattcgatatgagcgatagccataagcagcgacttgccgaatttaccgggatttga

SEQ ID NO: 192655 - DNA, 192 bp, Klebsiella oxytoca
atgctcaaacacaagaaaattgaatctgtgatcgacgaaatggcacgtcaattgggccatgaacttaacgggcaggataagctggtaatccgcactaaaacagctatggttttggccgctaaacagcggcaccgccagcggatggaagcgccaccctatcagtggaaaaagcccgataaattaaggcgttga

SEQ ID NO: 192656 - DNA, 1359 bp, Klebsiella oxytoca
atgagttcattaagtcaggcggcgagcggcgctgaaaagcgcaccaatgctcgctactggatagtggtgatgctgtttatcgtcacatccttcaactacggcgaccgtgccaccttatccattgccggatcggagatggccaaagatattggtcttgacgccgttggcatggggtatgttttctccgcgttttcatgggcctatgtgatcggccaaatcccgggcggttggctgcttgaccgtttcggttcaaaacgcgtctacttctggtccatttttatctggtccatgtttaccctgctgcagggcttcgtcgatatcttcagcggcttcggcattatcgtcgcgctgtttaccctgcgtttccttgtcggcctggccgaagcgccatctttccccggaaacagccgtatcgtcgcggcgtggttcccggcgcaggagaggggcaccgcggtggctatctttaactccgcgcaatactttgccaccgttatttttgcgccaatcatgggttggctgacccatgaggtgggctggtcgcacgtgttcttctttatgggcggactcgggattatcatcagctttgtctggctgaaggtcattcatgaacccaaccagcatccgggcgtgaaccaaaaagagctggattacatcgccgctggcggcgcgctgatcaacatggatcaggcggcggccaaagctaaggtgccgtttagcgtaaaatgggggcaaattaagcagctgctgggctcccgcatgatgattggcgtctatatcggacagtactgcattaacgctttaacctatttctttatcacctggttcccggtttatctggtgcaggcgcgcggcatgtccattctgaaagccggttttgtcgcttcggtgccggctatctgcggcttcgcgggcggcgtgctcggcgggattatttccgactggctgatgcgtcgtaccggctcgctgaatatcgcgcgtaaaacgccgatcgtgatggggatgctgctgtcgatggtgatggtgttctgtaactacgtcaacgtggagtggatgatcatcggctttatggcgctggccttcttcggtaaaggcatcggcgcgctgggctgggcggtcatggcggatacggcaccgaaagagatcagcgggctgagcggcggtctgttcaacatgttcggcaatatctccggcatcgtgacgccaattgcgattggctacatcgttggcaccaccggttcgtttaacggcgcgctgatttatgtgggcgtccatgcgctggtggcggtgctgagctatctggttctggtcggcgatattaagcgtattgaactgaaacctgtggcaggacaatcatcatga

SEQ ID NO: 192657 - DNA, 555 bp, Klebsiella oxytoca
atggccgggctggcacccgtggcgaccaggcagcggtcgaacgccaccacacgctcgccgccatcgtttaaacggacggcaaggctctggtcgtccttgaaacgcgcttcaccatgcagcacggtgatggccgggttgctgtccaggatgccttcgtacttggcgtggcgcagctcatcgacgcgcgcctgctgctgggccagtagtttgctgcgatcaatcgcaggcacagtcgccgcgatgccactgtcgaatgggctttcacggcgcaaatgggcgatatgggcagcgcggatcatgatcttggacggcacgcagccgacattgacgcaagtaccgccgatggtgccgcgctcgatcagcgtgacgttcgcaccttgctcgacggccttcagcgccgccgccatcgcggctccgccgctgccaataacggcgacgtgcagtccgtccccatcaccaccagccttgtcgccaccgcccagccatcccagcgccttgccaagcagtctgccccgcgctgaagtggatggggcatcggcgggtgtggccttgtag

SEQ ID NO: 192658 - DNA, 2373 bp, Klebsiella oxytoca
atgagcgagataaaatccctgctgttcagccacagccaccatctgttaacggtgcgcggctgcagcgcccttctggacgtgctgagctttgaaggtgaggaggccctgagcgaaccgttcagatacgtgattgagttcaccagcgccgacaaaaccatcacgccgcagcagatgctgatgcaggacgcgaccttcaccctgcaggcgccggcggaccagggtttcgggattaacattcagcagccggtgcgcacgattcagggcgtggtgatggcgtttgagcgcctttccgcatcccgcgacgaaacgcactattccctgaccctgcagccccgtctggcgctgctctcccggagccaccagaaccggatttaccaggatatgtcggtgccggatatcgtggagcatatcctgcgtacccgccacgccatgcgcggggaggactttgtcttcaccctggcacaggcgtatccgcgtcgcgagcaggtgatgcagtacggcgaggacgacctgcgctttatcacccgcctgctgggcgaggtcggtatctggttccgcttcaccgccgacacccggctgaacattgacgtggtggagttttacgatgaccagcggcactacgagcaggggctggttctgccgtcggtgccgccctccggccagcacgacggcggtaccgagtcggtgtgggcgctgaaaagccagcataacgtggtgcagcagtcggtgttcacccgggactacaactaccgcaacgcgccggaggagatgagccagagcgcggacgtgacgtccggcgacgtcaccacctacggtgaggcgtatcactgggcggataactacctggcgccgggcagcgacggccagcgcaacccggagccggagagcggggcgttttatgcccgtctgcgccacgagcgctacctgaacgaccagacccggctgagcggcagaaccagcagcgcggcgctggcgccgggccgggagctgaaggtcaccggaggcgctgaggtgacggaggttttccgccagggcgtggtgattaccggcatccacagccgcgcccgtcgcgaccgcagctatgaggtggcgtttacggccatcccgttctcggaaaattacggcttccgtccgcaaccgggcgacaggccggtcatggccggcacgctgccggcgcgggtgaccagcacaaaaaccaacgatatctacggccatatcgaccgcgacggccgttataaggtcaacctgctgttcgaccgcgaccactggcagccgggggaagagagtctgtgggtacgtcaggcgcgcccctatgccggggacacatatggcctgcacctgccgctgctggcggggacggaagtggccatcgcttttgagcagggagacccggaccgtccgtatattgccggtgtcctgcacgactcaacgcacccggaccctgtcaccatccgtaactataagcgcaacgtcctgcggaccccggcgaacaacaaaatccgcctcgacgacgcgcgtggcaaagagcacatcaaggtcagcacggagtacggcggcaagagtcagctgaacctggggcatctggtggacagcgaaaaacagccacgcggggaggggtttgagctgcggacggacagctacggagcgatacgggccggaaaggggatcctcctgacaacccaggctcagcctaaatcagccgggcagcaactgaatatggatgagataaagcgtcagctttccgatgccctctctctcgctgaatctctgtccggtttattgcagacggctcagcttgagcccctggataacagtacccagcagagttttctgcaacaaaacgtagatacccttaagcaacctgtaattgttgcgggtgcgcccggcgggattgctctttcaactccccggcatattcagctcagcgcgaatggcagtcagataatgacggcgggaggcaataccgaagtctcctccttacgacgaatggtgctggcagcaaaacgcggcatggtggcgtttgcacatgaactgggtatgaaactggtggcagcagccggaagagtgacaattcaggcgcaaactgatgcgatggaaatgacggcgatgaaaggcatcaccatcaccagcacccaggatgaaatcgtgatctccgcacagaagaaaatcacccttcagtgtggcggctcttatctgacggtttcgcctggcaaaattgaaaatggaactggtgggcatttttatgtcaagagtgctggctttgattatgctggaccagcaacccaacaggcaccatttccagagtttacggcatgtgaaaatgctgtagctgaggcctcaagtcagggtgatgcgactgtaccgttaagctaa

SEQ ID NO: 192659 - DNA, 231 bp, Klebsiella oxytoca
atggaaaatgactttttaagagatgctccgccattaagtcagcatgactttgcgattattgacagagttcagcatcctgatattgataaatcatggccagtgctggaaatggtttcccccatgctgaaacctcaggcgcatctttatccctggttactgccgttgaaagaaatgagtgctgctgactggaatatgcttatgacaaatctgaggcaggaaaaaaaaacctga

SEQ ID NO: 192660 - DNA, 300 bp, Klebsiella oxytoca
atggaaattccatttattactgatattgcagaacgtcgaaactgtagtcagcgtattgaaaaattgctgagtcgggggctgagtctgggcctgacacatcacaatgatcttattgcctttgcctgtagtggcttgacccgtgagcctgatttctggcgtattccaataatccaggaatggttaaggtgtgcagaaaaaacgcctgaacttttttcgcggatgattaatggtttgagtgatattgaatggcagacgcttctgttgcaacaggaaagatataaggaaaataatcatgagtga

SEQ ID NO: 192661 - DNA, 2622 bp, Klebsiella oxytoca
atgagtgaaaataaccagagatgcggtttttgtagccgttacgggctacccgttctacctgtacggccgggtatcgcagataatcatgataatatcccatatttgcctgaaaatatctcaccgtccatcgctcctcgtggccgttctgcctatacagggcgtttattgagagaaggttaccttcatgtctatgatgaaatgattaatcgatggcaggattactatgtgacggaagaaggttattattatcctttgcctggatgtggtgatgtgccaccaagattgttaagtggtgaaatgaagccatgtattactaagccagaagatctggcaaaagcttcattaattacgttacctgtaatgccgccgccaatgaaaaacggcatattctggtttgcctggtcgcaaaacaaatggacgcctgcggtaaggaaaaaatatgaagatcctgcggtccgtcaaaaaataatgcaaagatttgatatggatggatggctaagcagcggtaatggggaaaagctattagccctttcccaagtgactaaagttgttgccgagtatagcccaatgtcagcttatgccgaaattaaggactactcggcgtcatattttcagccccttccacttgccgcgaccaatttgattaagtctgccgagaaattaatgccgggtaaaggggcaattttagtgcttcaggatccagtggcaatactgcaagaaatttcatcgctgctgtcatatcaaacaacccgggatctttatggcaatgagaaatatatctggaaacactctttagcttccacactgattggcttaaaggagtcaatgacccgtcagatggcgtgggacaagattgcaaacgttgagttcacttccatgagtgagaaactcggaacaaaaacacgagaaggccttgatttattaccttcccaggagctcgcaaagcagcgcaatgctgatttggatgccacactaaatagtcgcgttgagacagaatggcagacctacgcgtcacattatgatgaaaaacagcttgaacaatttatcaaggaatttaatgaagaagttaattcctacgatgaatcagtcgtcggtcctacgacagagatgtacctggagtggttcaaaagtgaagtcaccactgggtacttcaagtgcaattttgatgtggccgatattcagagtgggttcgattatatacagacagtgggttattgcatcgttggcatgcaagataaggcattgacgctgcgctatttcaccgaacagctaaaaatgaagtctaatgattacaacaatatcctgatgcgtgcgctggtgtttaatcaggacaaactgtcacagcgtctgggagcgttagttcaggataatagtagtttgtgggctcagccctggaatggggttgctgatgcttttaaagatacgtttgacaagatgcaggaggccgccgcaggttaccttggaacctttttgggaaaagtcattggtcctgtttcacaaattttacaggcagcagcaaaaagtcatttgagttatcaattatttagcatgatggccgttattgaccgacgcgcatttattcctgtaactcgtattgggagcgaggctgattttgtggaggacgttgtcagagtgctgggcagaaatgccgggattaccggggacagtactgaagatgttctgcgtatgtacgtcagatgggaagttcgccgacttggaattgatggcgtgccacttaccggagccggcgaacgccattatattgccgctgttgatatgaatacgttcaatgagctggctgcgctaccggaaagtcaacgcgtgtatcgcctgagtgaatccttatgcaccgatgctgatgttgacaggttattatttgctcgctggcagaaccatatcaacgcgggtttcagttcgataaagcaaagcgtgcctttggcgctcggggtggtctcaatggcgttgcaaacagcgtcgttgtgggtaagcatggatttcagccataagcccgtaaccgcaagtcagcaggaagccagaaatcgcttctgggcaggaacactgtcattaacgggaacaacagccggaacgatagagtcggcgataattcgctttaataaactgggtgcggagtttcccggttcagcggcggaaaaaattgcaaaatggtttgctgcatccggacgtttccttggtgctgcagggggactggtggcggcttattatgatgctgttcattttcaggaagaatggaacagtaagcgtaaagggttggcttttgcctatggagcgtcgacggtatctggtttgtatttagcttttgcgccatttattaactggaagtggttgggaagggtactagggagaataggctggcgtgtaggtagtcggacgttggttactgttggagcaagtgctgaagttattggtcttactgtgggatggataatggtggcggtgcttctgattgcagccttttatatttcatggaaacagaccaatgagttgcagcaatggctggagaaaaccatgtggggagtaacgccggagggacttcatcctgaaccacatcagacacttcagattgaaatgcagagtctgaaagatattatgcaggtgggataa

SEQ ID NO: 192662 - DNA, 1059 bp, Klebsiella oxytoca
atggattatgatggtttgatgttcaaatatgacaaaaacagatttcctgatatagagttaacagatgatgaaataaataatcaattacatcagaatgaaaaaatagacctgggtgacaagaaagtcatggatgatgcggcggtgattcatctcagctcgggttatatggaggtggtggataagtggtatgcgataaaaggatttttaaccgtaccgtcactggcattacttgtgctttttgcctcaggtgtaatttatataccctgtaatatgtttgttcatttttttttgcagcaggattatgacggatggttttatgccatcggttttattgctctttttgtgtcaattctggcctctttgttctgttatttaatgctaagagttgaatgttttcgctggacgcattatcccgtcagatttgacaggaaaaacagactggtgcatgtattcagcgtggacggtgaggtttacagtgccccctgggacgacatctttttcaccaccggcgattgcgtgacccataaattaacgaagcggaagaattacgatattcgcggacatgtgctggcggaggatcgcaaaacggtgctgaaaacgttcacgctgtcggtttctgccccgcggcgtgaagacttataccgcaactgggaatttgtgcgccgctatatggaagaagggccggaggcggttgccggcgtgctgaaactgatgccgccggtggagggacgccgggaagggatattttttggctactggtatctgatgttcagcgccacctacggggcgccattttttgtggtgccctttctgatggcgctgtatctgacggcctggccgttccgggtctttgcgatgtacacctgccggatcccgcgctggagtgaggaggtgcaggccagctgcgtgattgcgccggacgatccctgggatatcagtgccgcgcagaatccccgttcgctctggcgctggatgcttggaatggacaagtcgcacagcatggtggataaaaaacgcgccatgatggctgtgacaaaagtctcagacgcttcagagtga

SEQ ID NO: 192663 - DNA, 5892 bp, Klebsiella oxytoca
atgggtataaaagcgcaggtgagtatcgcgcacaagctggggttcacatcacaccagaatgcagttccgctgttacgtgagctcatcttgcataatgagtccgaagagacatttcaggatctgacgctgcatctgcggaccgcgccagccgtgctcgaagataaaaaatggaatatcgaccgcctgcttcccggtacttcactggatatcagggatcgggatgtcaaacttaatgccaaatggctcgccgaactgaccgaaagcgtactctgcgaagtcaccataagtttgtgccagggtgaggaagaaatcttcattactcattattcgcttgaggcacttgcgaaaaatgaatggggcggcagcgcaatgattgaattgctcccttcatttatcattcctaatgatccggcggtagatcgtgtactcaaggcagcctctgatgtccttcgccgtgcaggcaagaatgacgctcttgatggttatgaaagcaagtcgagaactcgtgtctgggaaattacctcagctctctggactgctgtctgcaacctcaatatcagttatgcccttcccccagccagctttgaacggaatggccagaaaattcgcacaccaggcatcattctggaaggaaaagtcgcgacctgtctggatacaaccttattatttgcttcagcactggaacagattggtttgaattcactgctaatgctcagtgaaggtcatgcgtttgctggcgtctggttacaaccacaggaattttcgcagctagtgacagaagacgtctctgcggtgcgcaaacgtgtcgacctaaaagaaatggtcgtatttgagacaactctcgcgaccagagcccacccgccttcatttactcaggcatctgatgaagcgttaaagtatcttaacgaggatgtttttcacgcagccattgattcgcgtcgcgcgcggatgcagaaaattcggccactggctctgggtgtcactcgccttgaaggacagcctgatgctgaggaggttatttctcatgggtttgaggacgctccctctctccctgatgttgacattgatattgaaacagctggcgaaaaagaagctgggggccggcttgtacaatggcaacgaaaacttctggacttaaccacccgtaaccgcctgttacacctgcctgaaagcgctaaaggcattcgtttgatctgtgcgaatcctggccatcttgaagataagctagctgaaggcaaacgcattcgcattgtcccgctccctgatctagagagtggaggccgcgatgccgaactttatcagcagctcacaaacgagaacctgcgggaagaatacgcccagattgcgctggaacgcggtgaagtcgtctccgcaatggaaaaataccgcctcgagtcatccctaatcgacctctatcgaaaatcgaaaagtgatttggaggaaggtggtgccaacactcttttcctcgctgtgggcttccttaaatggaaaaaatccgctgatgatcccaaaagttactcagctccactgatactactgccgattcagcttgaccgtaaaagtgtactttcgggcgtgtccatgcgtttgctggaagaagagccccgcttcaaccttactctgcttgaactgctacataatgactttgctctgacaattaacggcctcgatggcgatctgcccaccgatgaaagtggtgttgatgtggatggcatctggaatatggtacggcgtgctgtgcgcgacatacccggtttcgaagtcacccgtgatgtcgtgattggcacattctcttttgccaaatatctgatgtggaaagatctaatcgatcgggcacctcagttgatgcaaagtgcgctggtaaagtatctcatcgaacgcggccaggacaatgccgttctggataagagcggagaagtcatcaacgttgaggaactcgatgacaacgtcaatacgcaggatcttttcctaccgctgcctgcagattcctcgcaaatcgccgccgttgtagcctctgcaaaagggagggattttgttctggatggcccccccggtaccggtaagtcgcaaaccatagccaatatgatcgcgcataatcttgcgctgggaaggcgcgtactttttgttgctgagaagaaagcggcactggatgtggtctatcgcaggcttgaggctcagggactcggtgaattttgtctggaactgcactcgagcaaaacgtccaagatggattttctgaaacagctagagcgggcatgggatgcgcgtgatctactgactacctcggagtggaaggaagaagcggccaaggtgcagcacctgcgagacaaactcaatgaggttgtccgtttgctccatctgcgctggccaaatggcttaacgctccatcaggcaatgggcacggttatcagggatgcaagtagcgccacgccgcactttagctggcctgcatcgactttgcattcttcttcagagatgactcagttcagagagatagtaaaacgtctggagctgaaccgtgatacctggaaacagcacggcgatcattttgacctcatcacgcaggctgactggaccaatgggtggcagtcttctctcattgctgcagcaaattcattgcctgcaatcatcgatcaccttgaaaacgccaccgaggaattactgaaggcgacgggagttactctggactctactgagcccgagagactgtcgcaactaacttcattctgtgaattattgacggaagcttacggcattgatctgaatttcatgttcgcaccggatgccacaagccgtatagagtcagcgaataaagccgttcacctcctgaaagagattgaagtgacaaaggctaatctgtcagttacctaccctggtaacagctggcagtacgttaatgctccgcagatcagaaacgtacttgacgtcgctgacaaaaaattctggttctttgcgaccagtgcccgcaagaaagtcattggtgaagttatccgacaatactcgctaacgtcagctcccgacttatccgttgatctccccattgctgaaactctgcagacattgctgcaacgtctgaccgagcttaactctgtcactttatccctgccgggatgggctgggctggataccaacgttgcacagttgcagaccaccctggaacttgcagaatctatccgcaattcgcttggtggttttgcttcttcgccacagcagttggtcgagatccgcactgctgtaaaaaatctgattattgatgccaatgaccttctcggttcgcagggtgttatctccgccctgactcggaaactgcgcacagcaatcgccaatttcaatgatgcacaggttagcttctgcaatctgataaaaccagctgaggacaaaccatcgctcccggcactgcgtgactgcgcactcaatatcctgcaacatcagtctgctcttaaagcctggagtgactggagccgtgtacgtgaggaagcgatttcacatggcctgcagccagtgatcaacgcgctgatccatcttaactcaggagaaataagcgctgcagagatttttgaaactgcctattgccgctggtttgcatcgtggatgatcgattcagagccgctgctgcacaattttgtgccggctgagcacatgagtgatattgaggcttaccgtgctcaaaccgatcgtctggccaaactgacagtacgctatatccgtgctcgtttatgtggcgtcattcctgcaaaaaatgaggtcagcaagcagagtggttttgcactgcttaaacatgaactacagaaatcccgtcgtcataaaccggtacgccagatggcagccgaaatgggcgatgccatggccaaacttgccccctgcatgctgatgagtccgctttcagtcgcccagttcctgccctccgaccaagccttgtttgatctggtgattttcgatgaggcatcacagattgccccgtgggatgctatcggcaccatggcgcgtggcaaacaggtggtaatcgccggtgatccccgccagatgccgccaaccagcttctttaatcgtgcagctaatgacacggacgatgatactgaagaagatatggaaagcattctggatgagagtcttgctgccggcctgtataaccacagcctgagctggcattaccggagccgtcatgaaagcctgattaccttctccaaccatcgctactatgacagcaacctgattacgttccccgcttccgaaacaaagcaaagtgctgtccagtggtgcaaggttacaggcgtctactctaaagggaaaggacgtcataatcaggtcgaggcagaagcgatcgtcgctgaaacggtgaagcgactgactgataaagagttcgttgcatcaggcagatcgataggcattatcacgctgaatactgaacagcaaaagctagtcagcgatctgctggaccgtgccagacagcatcaccctgaaattgaacccttcttccagtctgaactggaagaacctgttgtggttaaaaacctcgaaacggttcagggggatgaacgcgatttgatcataattagcatcgggtacggcccgactgagccgggcgcaaatacaatgtcgatgaattttggcccgcttaatcgcgagggaggctggcgccggctgaatgttgccgtcacacgtgcgcgacaggaaatgatggtcttcagctcgttcgatccttccttcatcgaccttaatcggaccagcgcccgcgcggttgctgacctcaaacactttattgagtttgcccagcgcggccctgaagctctttctcaggcagtacgtgggtctgtaggcggttatgactcaccgtttgaagaggcagtagcaaatggtctgaggagaaaaggctggcatgttgtcccgcaaattggcgtatcccgtttccgtattgatttggggatcgttcatccggataagcctggcgactatcttgtcggtgttgaatgtgacggtgccacttaccatagcgcagcaacagcacgcgatcgcgataaagtccgcagcgctatcctacagggcctgggctggaaattactgcgcctctggtcaactgaatggtggattgataaagaaggtgcactcgacaggctggatacagcaataaatcgcctgctggaggaatccagagcagcggaagccgcactgattgctgaagcagaaaaacaaaagcagattacgccagtcatcggtcacgtaaccaatgatgccagtgaagacatactggtatctgaaattacacctgtcgctaatgatgaagaaatatccacgtcagtaaaccctatcatcacgcctcccgccgaagtaagcgaagatgatggtggcactgagttgaagtatgcatctacagcttctcagaataacaacaagccagcgcatgccggtaagtatgtcgttaacgatcttcaggaatggcacgacaggacagatgcagaacaattctatatcgctgaatatgatgagacacttaaaaccctcattgaagcggtggtaacaagtgaatcacccgttctggatacaacgcttgtgcaacgcatcgcacgtatacacggcttcactcgcgctggcagactgatacgtgaacgcgtaatggaaattgtggatcaacactatcaccttgcagccgatcactcaggtgaaaacttcgtctggctgtccgctgagcaacgtgctgactggaatgcgtttcgtttgcctgccacggataacgacattcgccaggttgacgcgatccctagtgaggaattgcgcgcactggcgctgagtattaaaggtgacaataagatacaggaaatgacccgctcgcttggaattaagcgcctgaccagtcaggcaaaaaaaaggattgaatcaatacttaatgttgtttga

SEQ ID NO: 192664 - DNA, 927 bp, Klebsiella oxytoca
atgtttccagtcggcattgacgtaagtaaaaacaccctggatctttgcatgctttatgacggtatcaaaggacgcataaaaacccgtaacatccagaataacagacattcagttgaaaatattcttcgctggctcaggcttcaacattgcagtccggaagatgttcatgtggtaatggaagctaccggtgtttatcacgaacagctggccactgaattacatgatgccggtttccgggtttctctggccaaccctcaccgtagtcgggagtttgcgcgtggcatgggaatcatgacaaaaacggataaggtggatgcgtatatgctggcctgttacgcattccttaagaagccacaccgctgggagccgccggcacccgaaatcagatatctcggtgcactcctgcgacggcgggatgttctgctgggtgatgccctgcgtgaggagaacagactggaaaaatacctgtcgacagacacacctgcagatattatcagttcctgcaggcgtatggcgcagcttctgcgcgaggagataagtaatatcgagcggcagataaaagcacatatcaaagccagccctgcactgaggcgtgattatacactgctggcctcaattaaatcggttggtccccagctggggatgcatatgctgatcgtgcttcgcagccataactttgtatcggctgagcaggctgccgcctttctgggcgtggtgccgatcgagaaacgctcaggcacatcggtccggcgccggccgcggatgtcgaaaatcggcccccctcagttgagagcgaagctttacatgtccgccctgtgcggaaaaatctacaataagcgaatgcgtaatatttacgatgagatgtgcctgcggggtaaacctaaaatggtggccattggcgcgctgatgcggaaactggtgcactga

SEQ ID NO: 192665 - DNA, 1413 bp, Klebsiella oxytoca
atgctgtgtggtcgtcctttccctgtacatgtgttcccacagatcatcagaaatgcggtatatgaagtagagcagcatacacaggccccccaggctttgattgccgcatcagtactgggagttatttctcttgcctgccagaacaagattgatgtgtgccgactgaataatctgtacagcccagtatcgctttttgtactgacgctagcggaatccggtgagcgaaaaagtacagtggacaaactacttatgaaaccattatatcaactggaggaagaatggttcgaaaaatatactcaagacctgattgtttggcggagcgattacactgcttttaatattgaaaagaaagctcttatgtcaaagctgaaatccgatattcgccgtaataaagatcactccacaacgaatgagcggctgaaagcgttgctggctgcctccccggaagcaccgaccaggtttaggcagatattcaatgatgcaactccagcggcgataaaagattatctcggtgggcgctggcggtccatcggacttatgtctgatgaagcgggcaccatttttaacggctacgcgctgaatgaactgccttttatcaataaaatgtgggatggtgcaatgtttcctgtggaaaggaaaagtgagccagatagattaatcaaagatgccaggatgacgctggcgctgatggttcagcctgatgttttcaaaaaaggatatctggaacgaaaaggcgataccgcgaaaggcataggttttttcgctcggtgtctgatatgccagccgggttcaacgcagggtagcaggcaaattaccaacccggttgtctcaagcgagcatctgccagtattccatcaacgactgctggagatcgttaacgaaagcattgccagaaacaatgaaaatgatcggaagcgcctgcatttctctgccgatgccgaaaaacgttggctcgaattttataacaaagtcgagtcagaaatggggctgcttggctacctgtccgcctttaaggattatgcctccaaaatggcggaaaatatggcaaggattgccgcattactgcatgaatttaatggtgataaaggggatatatcccttactgccgtggaagcagcagtggagataagtgcgtggtatgtggatgagtatgtgcgaattttctctaaaccacagacattactcttggtcagttcagaagcggatgaactttactcgtggataaacgattattgctacaggtgtgtactaccatacatcagaaaaacaaccattctgcaatatggaccaaataagttcagaaatagaagtaaactgaacgaactgctaagtacactgtactcgcaaaacagaatacgggcagagaaaagagggaagacccttttcgtacaacctatttataatcttatataa

SEQ ID NO: 192666 - DNA, 438 bp, Klebsiella oxytoca
atggttgaacatcctgattttacaaaagagaattttgatgaacttcttagaataaataatgatttaagaagaaaaaataacgatcttttagatgatataaaaaactatcgtaaagatgcggaaggttttcttgcggataaagaaaatttcctcaaagatcttgaaatgctcagaggtgaaaataatgaactgaaaaaagaattatcaaatgatgaaaaaaaatcaaaagttaatcgtggtgaaacaaaaataagaccgccagcagtaaatgcaatttatcttctcagcaaagatcattatcaacttgataagtttgttgcaaaagatttacttaaaaaattagattccctcgtatcgcaatataaaattgattactcctttgagttaaagactgttgaagcctggtgtacagaattcaaaaaaatggacgctaaatag

SEQ ID NO: 192667 - DNA, 156 bp, Klebsiella oxytoca
atgagcaaacatacatcatctctagtgagcaaagcaaaaatctaccgcgccgttgccagctcgaccgcgatagaaaccggtgcttctgtacaaaaaattgagcaacaacttaaacgtaaccaagcacaggcaaaagccgtcggtctcgcccgttaa

SEQ ID NO: 192668 - DNA, 1032 bp, Klebsiella oxytoca
atgattatcaatatgataatttttcagggacaacactgccctggtttaacggaacttaaacatctctctatgaatgacgaacttatgtcaacgcacagtaacaattcagcaccgtttagacagccgttatctccacaagatgacgacgaaaatggtaaaaaaaacataccgacagacccgagatttactctcgataaagatgtcatcttatccctagccacccgctcctctcttgatgaatgcatggctcgtctgcgttttcataaaacgatctatcaggaatggaatttttcagccgttgatcctatggggtcgacggcgatactaaatttttatggccctcctggcaccgggaaaacgctttgcgccgaggcactggctggacagttacggatgccctttattgctcttggtattgcagaactggaaagcaagtttatgggagaaacggctaaaaatatccaggctgctttcgcgctggctaaggaaaccggagcgctgctctttttcgatgaagccgacacgttactggggaaacgactctcctctgtcacacaaggcgttgataatgaagttaatgcgatgcgctctacgttactgatcgagctggagcgttttgacggcattgtagttttcgcgactaatttcgcacgtaactatgatgaggcgttccgcagccgtattggctatcacgttgaatttacgcttcctgatcttacagtccgttaccatctctggaacaaattcctggttgctgaaattccactcgctgaagaaagagaaagccttctcaccgccgcaagcgaactatccgaaggcctggcaggacgagagatccgtacctgtatgcgtctggcactgcctaaagcgctactggaagcagaacgcaccggagaggctgcacaacttaacatcgctcatttacggagtgcgatagaacagattttggcctcccaccaggcgatagccaatcattcggtacgtacacccagtgaagtcaacacagcaaaaaaattattaggtatccaataa

SEQ ID NO: 192669 - DNA, 1272 bp, Klebsiella oxytoca
atggggttatggtcaggtttcagcagtttttgcagcagcgtagcaagtgcagtgacaagcactgctagtcgggtatggaatggtattaaagaaaccgcagctaaaaccgtttcctggatggcagaaaaagctgagacctttgtgggaagcgtaaagagcgtctgggaaaaggtgaagccatttatcagtaatgtgattcgccctatcgtgcaaaacgcagcaaaattagctgaaaagatgttgccacaattcccgtgggtgggtggcgctttaaaagcgctggataaagcgttggggctgctggtcgaatgggataagagtgagctggcgaaacgtattggtaaggccattgagtgggcaattaataaagccaaacaacttaaagatttgtttcttacacaggaagaaatggatgaggccagtgagcatgagcaagcactacgcgaagcacgtaaccagatgcgcggggaagcagctagtgctgttgatctggcgagcctgattaccttatatgcccaactctcaacgcgtattaaggacgtcttggataacatacagatcaacgatttcgaacattatctgcggttacgcgcttcgcagaagttactgaaagatactgagctgcatcttacgcgtgcgcaggacattgatacgataaccgatgacgacctgtttcttattgaaactggcaacgaattgctaaaacccaaccctcagttgagcgatgacgcaacgcaacgcctggatcgtgttgtgatggcgcgttttggcaagaagcttatccccttcgtgttcgaagaaatgataatggcctgggggtataacctgcaggatatggaaaatgaatggaaatcgctgaatgacggtctgtcgaaagaacaagtacttctgcgacgtctacagattggccagcgccttggtgatcttcaggaagatgaagtaccaatgctcaacgacctagaagctcgtttaccagtgcaacaggctgagatggaagcaaaacgcaaacgaaccaatgaaatgcgtaattatgtttttgcagcagaaggatttctgcaaatgctagaaaaagagcctgaagaatttgctgaccaagaatatttgatggaagacagcagcacggttgggatgattattattgactgtgctcagtttggtaagcgttgggaagaacttcataccgagcaacaaagcttaattatcgattttgccaatatctttgaaaaagccagccgcgcacgtgcaagcaagcttgtcgaggtggcagcatga

SEQ ID NO: 192670 - DNA, 1953 bp, Klebsiella oxytoca
atgacgtttcatgaattttttgcctttatattgccggaattcgacgtcattcagatgctgtttggcggcacaatgctttttttggttttactgacgattggtttattgctctggcaggcaaatcagcgcttttgggacagaaaatggcaaggtgatgcactgaataatggggcagaccatctcgatgttgatcatggttcagtcaacgaaatcagcgcagcagttgccagtcccgcagaaaaaatggccgatattatgccgggcattttgttaattttaggcttgctaggcacctttctcggtctgggaattgcccttaataaagcatcggatattttgattgatgctaattccgcaggcatggataacgccatgtcgaatctgatggggatgatggaagggctggggacgaaatttaaaacgtcgacatgggggataatggcgtatctgatccttaaagcctgtgctgctgggttaggatatgacgagaagcgtttgcgctggtgcgcacagcagatgaaacaagtgtttgatcagtctcgagagcaaaagcgtgctgaacataaagagacccagttgcagtatctggcagcattacagggtttgaacgatagaatgcaggtggaaagcgaagccacacggcagttgctgagcaagttctcttcaggtatggagtcgtttttgcaatccctgattgcccagggccatgctgccgcacaacaacgcaaaatacaggaaacatatctggaacaattgacagatatatcccgtagtactcagcagcaacatatcgatggattgcagcacgtatgcaacagtattcacgaggaaagcgaaaattcccggcaggctaaccattcacaccatgccgaggtagctgcgatctatatgaggatcgccggtcagggtgataacgctgaacaacagcgtattagccagaatgagcaattggtcaaactgcaaaacctcttgcatgaaattcaaaacgatatcgttaaagctacccaagatcagtctgtgcaagggcaacaacagataacagagttaacgacgacccgagaatcgttacagcactttattaatactaacagtagtaacctgtccgcaattcaacattcagccgaaaaaatgtcatctgcagcacaagaaatgggtaattccgcaggtgatttgcaacaggttatcggcgatttccgtatgggcattaccgatatgttaggcacggttaaaaccgaccttggttccaccatctcccaaatgggcgaaagttttagccagaatatggaatcgatatccaccagtatggcaaatgcaacagatggcatttccagtgcagttaccgacctttctcaaaacgttggcaccacaatgagtgaagttcgaatttccatcgatcaatcgatgaaaactcagcgtgatgcgcagcgtgaatttatgatcaccagtgaaactttaaatgaaaaagtgatcgctatgacaaaactggttgatgatttacgtgagcaaatagttaacgggctaacagcagtatccagcagcaatcggcaagtagcaagcctgaacaaccgttatgcggagataacgacatcaggcgaaagaaatgcagatgcgattgaaacgctggtgaatcaacttcaactcatgcagaaagagagccctcttcagccgggaatggacagggttgctgcaggtgtcggtaaactggtgcacagcattgaatcattacgtgatgaaatgctgagtaatactgatgcctctgctgcactttcttcgctcgatgacagattgatccgttctctggaagagctgggggggattcgtaaaatgctgtcaccaccagaacgtaaccacctggttcagcaaattgaaaaaagcctgacgccacttgccaatacattgcaacatatcgaccaaacgttatcgaccatgaacatcgttaatgatgcagtctaa

SEQ ID NO: 192671 - DNA, 642 bp, Klebsiella oxytoca
atgaaagataaacctaatgagtgggtctcgatctccgacctgatgtcaggagtaatggctgtagttatgttactgctggtgatgtctgtactacagaaaacatggtcagatattaagcataagcaggaaatggaacagggaatcaatgcccagcgagcccgggtaggggaaatgttgggaagtattaaaaccatgcttgatggaacggcaaatgaaggcttagttgcgctggatgtcaactcgcaaaaaattacgttgcgtgatggagttttcaatcgcggcagcgcctgcattgcatctcaggcaagccaggcattagcgacaattgaaacgcaggtcgtcagatttcttaccgaatttagaagcggacaagtttatattgaagggtatacggataatcttccggttacccgtccggtgactaattttgaaagtttctgcactgtctatgacgataattttaccttatcggcagcgcgtgcaagagaggcgcgtaaatttatagttggcgatcttgctcaggcttttgcacgtcgggtgattgttgccggatatggtgattcgcagcctattcccggtgttgcaccggaagatgcacgtcagcgtcgtattgaagttcggttcgtgttgccagaaaagtag

SEQ ID NO: 192672 - DNA, 261 bp, Klebsiella oxytoca; identical to SEQ ID NO: 191074

SEQ ID NO: 192673 - DNA, 306 bp, Klebsiella oxytoca
atggtattaaaaatgaaacaaaaagacaataaaacaatgaataatattaaaatcattacgctctttaacgccaatgaaaacataccatttttgacctgcatagttaaagatgttgaagagaatgaacacggaataaagcttacccttgaaaacgacaataacatcgatgttaaagattacgattcattttttctgtctgaatcagcggatgattgcgacaaggaaagaatggttaatgtatataggaaattgatttctgaacttagccaactcagcgaagaaacagtaagagcactgatgccgtaa

SEQ ID NO: 192674 - DNA, 759 bp, Klebsiella oxytoca
atgccatatttattcactcgcctaaattttgaagtcccgttttccggtgcggaatatctgaatgaatcggacgtcagccgggttatatccgctgtgaccccgcagcccggattcttcaactggttgtttggcggttcatctgccagtctgacatcttatgacggcgctcatgtcatgacgcaggcagatgctacgttgacgaaaacgtacggtgataattacgttcagttgccatccagtacgggcactctgaagaacgggttacaaacggagtggggggataccagtatttacacctggtgtaccgtcattcagtattcaggagctgcttctcaggtgcttggtggggcaacggataactcgacaggtgaggtggtgcagatgtcttccgccggagtaatcgtgtttgcctacaaagaaatcggcacgggaacaaccaaagcgcaggccattccggtaccgtccggtctgagcgcgggagcgaatatttttatcgccgtcacccgtagcggcagcaatctgacggcatttgttggcggagcatcaaccaagcttgcgcttacagcagcaaaaaatgccaacgcagcgttgaaaattggtccgggtaacacatcctatacaggcgcgtcaggctactctaaagagcttcgctgttatgagttcctgtactcaaccaatgcagtgtctgcttcagatctggacagtatctatgttgcggcaaaagagcgctgtgcggtgagggggattagcgttctgtaa

SEQ ID NO: 192675 - DNA, 285 bp, Klebsiella oxytoca
atgaggcacctttcaaaatttggtgccgttaatgccttttatgttaaatatcagcaacttatcgtcaaattacagctattcttctgcaatggcctgctcactatcactgccagcacggcttcagtcgggatagatggattcttttctggcattaatgccataaagacaaacacgttttttttcaggcaaatggatacccatcaggcgaagaataaaaccgcgccacccccggttaacctgacggttatagtcatacaggtctgcattttcttttttaagctttga

SEQ ID NO: 192676 - DNA, 1275 bp, Klebsiella oxytoca
atggacgctcaggactatgggaaacaggtcaacttcgcggacggccgggagtgtggggaacaggtcaacttcgcggacggcccggactatgggaaacaggtcaacttcgcggatggccgggagtgtgggaaacaggtcaactttgcagacgacggggactgtgggaaacaggtcaactccgcggacggccgggagtgtgggaaacaggtcaactttgcagacgaccgggactgtgggaaacaggtcaactccggggacggcccggactatgggaaacaggtcaactttgcagacgaccgggacagtgggaaacaggtcaactccggggacggcccggactgtgggaaacaggtcaactttgcagatgaccgggactgcgggaaacaggtcaactcctcggacagccaagactgtgggaaacaggtcaactttgcagacggccgggactgcgggaaacaggtcaactttgcagacgaccgggactgtgggaaacaggtcaactccgcggacggcccggactatgggaaacaggtcaactttgcagacgaccgggacagtgggaaacaggtcaactccggggacggcccggactgtgggaaacaggtcaactttgcagatgaccgggactgcgggaaacaggtcaactcctcggacagccaagactgtgggaaacaggtcaactttgcagacggccgggactgcgggaaacaggtcaactttgcagacgaccgggactgtgggaaacaggtcaactccgcggacggcccggactatgggaaacaggtcaactttgcagacgaccgggactgtgggaaacaggtcaacttcgcggacggcccggactatgggaaacaggtcaactccgcggacggcgcgtactgtgggaaacaggtcaactttgcagacgtccgggactgtgggaaacaggtcaactacgcggacagccgggattgcgtgaaacaggtcaagttaggcaagcactatgggaaatacagcaagtttagtatccccccatatgtcagcaacaaactaaggggggaggaaataagaaatacaggttattgttttttatcaagaaaattaaacagcaagcgaccatcttcttcagtggtatatgttacctttaatggcgtcttctcattaattttcttcagagcaggttccaggaaggtacgcttcatttcagcaatattgtttttctgcgaggcagggagcataaacctttcacataaccagtcatgtgtggtgatccagacaccagtgctccggaactga

SEQ ID NO: 192677 - DNA, 849 bp, Klebsiella oxytoca
atggctgtccttaatcgtgaactggtgcatagcgctttagcaggccgtatcgactggctgattgggcctgcagcgctagtaagtgcactggatatgaaaggtttttccatcacggcaatggtaatggaaggcaatattgaaaaagcgctgataactgatgtagaaaccgctaactggcaaacactggttcgcctgcgttcaccgcgcatcataccctgtgctttacaaagcgcccgagtcgcattccagccttcagaaaataacgcagtgggtcactatgtggatgtggtcacccaaacgttatcgagcctggaaagtgtacttaatgccctggatgccaaagtgggcgacggtgataccggttcaacatttgctgccggagcccgcgaaattgccttattacgtcagcaaagccagttaccactgaatcagctggaaacgctttgcgcattaattggtgaacgtttaactgtggtgatgggcggttccagcggtgtattgatgtccattttctttactgctacagggcaatcactccagaaaggtgagtcagttgtagcggcactgcaaacgggtctggcacagatgaaatactatggtggggctgatttaggtgatcgtactttaattgacgcattgcaacccgctctcgaagcgcttgcaaaccaaccaggcgaccttaaaaacgcatacctggcagctgaagtgggtgccgagaaaacctgccatgccgctaaagccaacgccggtcgctcgtcatatctgaatagcgacagcctggtaggtaacatggaccctggcgctcatgccattgccatggtatttaaagccctagcggggcacgcttag

SEQ ID NO: 192678 - DNA, 303 bp, Klebsiella oxytoca
atgaaaagaagaaatttcagtcctgaattcaaacgcgaatccgctcaactgatacttgaccagaactacaccgttgcagacgcagccagcgctatggatgtcggcctttccacaatgacgcgatgggtgaagcagttgcgtgatgagcgacagggaaaaacaccaaacgcctcccccattaccccggaacaaattgaaatccgtgagctcaggaaaaaactacaacgtattgaaatggaaaatgaaatattaaaaaaggctaccgcgctcttgatgtcagactccctgaacagttctcgataa

SEQ ID NO: 192679 - DNA, 678 bp, Klebsiella oxytoca
atggcgacccagagaggctatcagatggggcgctggcttgctggcaggctcatgaaagaactgggactggtcagttgccagcaacccactcaccgctataaacgtggtcgccatgaacacgttgctatccctaatcaccttgagcggcagttcgcagtgacagagccgaatcaggtgtggtgtggcgacgtgacgtatatctggacaggcaaacgctgggcgtatctcgccgttgttctcgatctgtttgcgagaaagccagtgggctgggcaatgtcgttctcaccagacagcagactcaccatgaaagcgctggaaatggcatgggaaacgcgcggcaagccagccggagtgatgttccacagcgatcagggcagtcattatacgagcaggcagtaccggcagttgctgtggcgataccggatcaagcagagtatgagccggcgtggaaactgctgggataatagcccaatggaacgcttcttccgaagcctgaagaatgagtgggtaccagtgacgggttacataaacttcagcgatgcagctcacgcaataacggactatatcgttggatattacagcacgctcaggccgcatgaatataacggtggcttacccccaaacgaatcggaaaaacgatattggaaaaactctaacgcggtggccagtttttgttga

SEQ ID NO: 192680 - DNA, 1074 bp, Klebsiella oxytoca
atgccacatcaacaggttagaggcccaatccgcacggctctggtgggttttggcgtcgccggcagcgtgtttcatgcgccgctgattacccctaacaccgactatcgtctcgacgtcatcgtcactggcgatgcccaacgcgtagcgacggcgcagcaacgttacccacaggcacgggtgctgccggactggccggcgttgcttaaggcaattgatggcggcgagattagcatcgatctcatcgtgctggccacgccgccggcgcaacatgcggagcaggctgtgcaggccagccagagtgctatccatctggtggtggataagccgtttgcagcagatgtacaagcggccgaaatgatgatcgccgcagcgcagcaggctaataccttgctcaccgtttttcataaccgacgctgggacggtgactttctgacattacagcgcctggtacaacaggaagcctttggcaccgtaagaagttttgagtcgcgtttcgagtggtggcgaccgcagggatttggcaactggcgtgacagcgtcactcttgcgcagggcggcggtttgttgctggatctcggaagccatttgattgaccaggccatgcagctatttggcccggtagtctacgccacggcggagctggcacgccattccgggcctcagccggacagtgacgaagacagtttcgtctcattgctgcatcacaacggggtgcgttcccggctgtggatgaatggtcaggcggcattgaatgcgccgcgcttccacctgctgggcagcaaaggcgctttcacccactgggggctggataatcaggagccgcagctggcggctggcatgtcgcccaccgatagccagtacggcgtcacgccggcaggtaattttgcccgggccggcacggtcggggcaaccacaacggtgcccattgaacgtggccactaccccgctttctatcagctgttagcccacgcgctgttacacggcgggccgccgccggttgatgcacgtgaagcgctcagtgttttacagcttattgagcaactccatcggcagcatcgcgtacgtattgcctga

SEQ ID NO: 192681 - DNA, 864 bp, Klebsiella oxytoca
atgttaatacaagaagaatataacagagataagtatataaatcaaattcaatcatggactttatgcgctgatgatttcgaaaatggcacatacagaaagcctaaaagcaaagcgttaaataaaaaatacattggctataataataactactttatgaatggttttgtgtttgatatagaccaaccagaaggtgcaatcgcatgggatgcttgcggattacctaagcctaatataattattcaaaatacaacaaatggtcatgcccatttgctttatgctttaaaagctcctgtatgcaagacagacaacgctagaacaaaaccattaaagcttgcaagccttatccaaaaaggatttacagatagattaaaagcagatcgagcatatgctgatgtgctaatgaaaaacccaattaatgaagcagaatggcgtacaatctggggtaatgttgaagcgtatgatctcagctatctaagcgagtttatacccgatgacattcaagaacaaaaaagattgccctcagatggtctaggacgcaatgttaatttgtttgaagatctaaggcattatgcatataaatctgtattaaagttcaaagaaaaaagcaactatgaaaaatgggaaagagaactgatattaaaagcggatggattaaataacttctgcaatggtagtaatctattaagttataacgagataaaagcaacagcaaagagcgttgcaaaatggacgtggcgaaacttcaataaagaatgcttttcatcaattcaatcttttagaggaaaaaagaacactggaaagaaaaaaacaaaagatagaagtaaagcaatgttagaacagatcatgaaagcagatgcggagtaa

SEQ ID NO: 192682 - DNA, 171 bp, Klebsiella oxytoca
atgtatgcgtatacccatatgagcactatatcgattactactgaaaccatcagtacggctaaaaaacctccaaagccgcgcggctctaccattaaccaactgatccataaggataatatacataatactatgttcattgcttctgcctttcctattttgtactgtccgtga

SEQ ID NO: 192683 - DNA, 1206 bp, Klebsiella oxytoca
atggctttatataggttagaaatgcagaacgtaagccgtgcaaatggtgtcagctcagttgcaaaggcgtcttatcgtcatcgttccgtcatgatagatgaacgaaccggagaaatacacggcgagaaatcagctaatcgtgacgatctagtttatgctgaaatattagcaccagataacacgcccgattttttgataaaatcaagcaatgatctatggaactttgtcgaaaaaacagagaagagaaaagacgcaagaacagcgaaagaatttaaaatcactttgcctagtgagttatctaatgaacaaaatataaaactactgaaagaatacttaataaaaaactttgttgacaaaggtatcatttgcgactttgttatacataacgataaagacaataaaaacccgcacgctcatgtgatgattacgacaagagaaataacgccttcaggatttggtaaaaaagtaaggtcatgggatgaagaaaaaacccttcatgaatggcgtaaggattgggcaaaagttcaaaatcagcatttaaaaaaattaggtttaaaatctcgtgttagtcatagaacgctagaagaacaaaaaaacataatgatcgatttagctaaaaaagcagaagatgcaaaggattttgacaagtctattttatatttagcaaaagctattgaactagatcgaccaccaatgcagaacatgagccgcaagaaatggaggacaaaagaaggtcaggaacaacgcaaacgtgaccaagcgatcagagacaaggcaagagaagatgcaagggctgtcagggtgttgaggggtgttgcagttgttgatgttgcttcattcacagttcatccactgcagaaaaaagagcagtcaaaaaataatgacttttcagaaaaaaaatcgtggtggcgttctactgttaattttataaaaaatattaaagctaagttctcaactaaaaaagatattaaaaacgatgtccatgcatcagacgatttaatgactgatcccgtcactggtttaccgattaccaaacagaaatgggatgagatggcagaaagagcaaacgtgaggactccacaggctgcgatctcatacaaagttaagcaatcacacgctgacagtgagaaaacgcctcagaatgcgttacaggacgttttagagcacgctcatagagcaggaagcgcaaaaaggaagatgcgataa

SEQ ID NO: 192684 - DNA, 408 bp, Klebsiella oxytoca
atgagaataaaacataaaatagatgcacttcaaatgttttactataacgatcatgatggtaactatattttagctctggagtttttacttgatcagattaaagaaggtgtatctttcaaaatggcaaaagaaagagcatttaaagaagctaaagatcgtttagaaaacacgataaggcaggtattagaacttgaagaggaaaaatattcagaaagtgaaataaaatttgccattgaagaggcacaaaatgattttagctttttgtgggtatttgatgagatggcatctatttatgaccagtacggtttttcaggtttatatgagctattttttataaaatataaagcaatgaaaaacgaaaggttagaacgcaacgaaaatgacgaggattattgctatgggaagtaa

SEQ ID NO: 192685 - DNA, 279 bp, Klebsiella oxytoca
atgggaagtaaaaaaacattagagcaaaaattggcacttgcacaagatagattatctaaacttaaaaaagaagcatcgcagaaagaaagaaaagctagagaacataaaaaatttactgctggcggtgaagttacaaaagtttttggcttggattatgatcctgccattttggtaggttttctagctgtctatgaaaagctatcagaagagcaaaaaagacagataaaaattgacggtgaacgattgctaaaatcacgcatagaaaacgctgacaagtga

SEQ ID NO: 192686 - DNA, 1233 bp, Klebsiella oxytoca
atgccgaagtataatatttatacaaagattgaatcgaatgttccagcagttgaccttttttatgatctcaatgtgtatagaactgacgccaataataaaaaacatgtgctgttgtcagtggcgcaacaaccagtaaaccaaaattatcaaactcagtcccatgaaacgaatgaaactgaggatgaactgtctgtaatctacattatagaaatgaacttgtatcgaaagcacggcggtaagttggtttctgttctttcatcgcctgcgaaaaaaatgtacacacttggtgaaatggcatcagggcaagcgtactctaaaaataaacgcgaaaacgtctgctattttgagactaaagcgcagacaaaaccggttaatgataagggtgaggataacacacataatgtgcaaatcacttgtataccaaggttttttgtcgctctggagcatccaataggagatccattagacccttttacgaaagataatataaaaagtgaacttgataccagaaaagctgcatccctgttaggcccagaaggggagtattatccaaaccagtattattcgatgctatgtggccctgctgcattttattattgtttaatgatggatcgatatgatgtttatgagcaactagtctgggaactatggagtcatggcaaatcaatgctgggatcttttttacttcagccgagcactagtacgatgaaagtgaatgatttattttcaggggcgagtcatcctcgagtttccgcaattgattggattactatggccagcttgcgtgattcatctaataatttgttaaaatatgaagcagttggagataaggtatctgcaattacattgtggggagatattgaaaaatggatgctgtatgcaggtgcgcaaaagatatttagtaatataagtttgtatcatagcagcttaagcgatatttgtaaattaaactcattaatgtgtaatgatgtccatatctttagtttgatatctgctggcatgctccaacaaggcgcggatgttccattcaaagatcactggattgtttgggatggaaagttaaaattagtaaacgggggtagtattactaacgaaacgagtttagaagaacttgtctcgctgagacttttttcatggggtgaagttaaagataactcgcttcgagtatcattaacattaggtgaatttctaagccatacttttggggggatggtatttacaaaaataccataa

SEQ ID NO: 192687 - DNA, 357 bp, Klebsiella oxytoca
atgagcacacaaaacgtcaacgtaaaaccctccaccaaagaaagcacaaccctccggactgacggttttgtgcgcaacattcattcccgaaacccgttcgatgttatccgcgccgatgtagtgctggaacgtatcgagaaaaaggctggtcggtgctgcgggatgcattacgagctgtatcaggcccatctgctgggtggtgcgctggattatctggatgcgcttccgttgaaagaccgtccggtgttaatgggcgctgcggcaaagcgcggctatctgctgacgctagccgaagaggaacgcgcgctggaagcacgggatgtactgatgagtgaactggcggcaaacgactgctga

SEQ ID NO: 192688 - DNA, 702 bp, Klebsiella oxytoca
atgaagcgtattgccctttttttctgtttcatttttagttttgcggcccatgccaataatattattgttaacggtacccgctttatttatccaggaaatgaaaaagaaataacggtgcagctctctaacaccgccgaccgtccggcgctggcgcaagcctggctggataacggtaatgccgacgcgacgccggataccattactaccccctttattatcacgccgcctatttcccgcgttgatgcgaaaagcggtcaaaccctgcgtattaagctcggcagtaatgcagggctggctaaagataaagagacgctgtggtggctgaaccttctggaaataccgccggttgaggccagccagaaaaacgaagggcaaaatattctgcagctggcgattcgttcgcgctttaagtttatttatcgccctgccgggctaggcaatcgcgacgctgcggcagaaaaactggcgctctccgctaacggcagcagcctgtccgtcagtaacccaacgcccttttatatcaccgtaagccgtatctcccgtaacggcggcaaagcgctcaacagcaaaacggtcatgtttgccccgcagtccagccagaccatcgccctctcttcagcggtgagcaaaggcgagaccctgaccgttaacaacattaatgattatggtgcagatgtcgcagtgaaagttaccgtcaaataa

SEQ ID NO: 192689 - DNA, 705 bp, Klebsiella oxytoca; identical to SEQ ID NO: 8686

SEQ ID NO: 192690 - DNA, 303 bp, Klebsiella oxytoca
atgttcaggcgcatcgtccaggatgcgctgtttcgagccgttcagttcggtgagataatgaatagcggacagcgtatgttctccggctggcgccgcctggaaatgcaggtcgcgcaataccgccggaagaaaacgctttacccgcccgtactgctccaccatttcgtcatggaaattgttgttctgaggccgggccagctcatttaccttactgacggattctgccagcctgcttttcggtatgctgttgaatattgtctccctcagttcagcatcgtcagcctgctcatccagcaacaatga

SEQ ID NO: 192691 - DNA, 240 bp, Klebsiella oxytoca
atgtttaccgtcatagcaaatatgaacctccgcatttccttcaaagcgggatgcgacggctttccaggtttcatccagctggaccgccagctgttgcacgcctttatgtccatcagtgggatgtcccagcgcccggcaaacggggacccgctgagcctgccattcttccccctgcaacagcttctcgcggggatttccccagcgatcgctgttttcgagccagatgtcccgtcgacgtag

SEQ ID NO: 192692 - DNA, 429 bp, Klebsiella oxytoca; identical to SEQ ID NO: 168645

SEQ ID NO: 192693 - DNA, 573 bp, Klebsiella oxytoca
gtggagttaaccaggattgaaaaccactgggatgaaatgatgcgggcatccggttccctgaaactgggcaccatccacgcatcggagcttatccgttctctgctcagaagtacccgcccgtcagggctggcgcaggcaatcatggaggtcgggcgggtcaacaagacattgtacctgcttaattatatcgatgatgaggattatcgccgccgtattctgacgcaactgaaccggggagaaggccgtcatgctgtggccagagccatctgttacggtcagcgcggtgagatcaggaagcgttaccgcgaggggcaggaagaccagctgggcgcgctgggtctggtcactaacgccgtggtgctgtggaactcactctatatgcaggaagcactttcgcatataaggacaaccacgggcgaaacaccggatgatgaacatattgcccggctgtcaccgctgatgcacgggcatatcaatatgctggggcattacacattcacgctgccggaggatattctgaagggagagcttcgccctttaaatattaatataaacaatgaagtatcttcttaa

SEQ ID NO: 192694 - DNA, 168 bp, Klebsiella oxytoca
atgaatatctttagcatgttctggatgagaagggagcaaatctttatatgctgggcttttgatcgctttgagatattcttcttcaaatatacgagcatattcacccggttcacgaagcccttcttcgttattctggcgatagaaatcaaccttatcaatgaaaaatag

SEQ ID NO: 192695 - DNA, 471 bp, Klebsiella oxytoca
ttgctgaggattaaggcgaagctctttatccagatgttcacggattgtacgtctaatcatatgccgctggataagcattgggtcaatatcacctacgacatcacctactttcatataatatgtattagaaggcgtttccagtgtcagatagccttctttgcccgtgcggatctcacttatcctgtatccctgataaatatcacgccccgtttcgtcatcaagtgtcataccgtcatgcacggtaatttcagaacgatttacgcccccttttttatcggctatatcaacaataacagtcgcgctaatgctattcttcttattgttaatactgaccagttttacataggggctattacttgcattttggacttcaagcccggcaacctcgatctgtttgaccagtttttggttgtaagcatcaatggcatcaaggcggtacaccatatgatgtttatgaatatgtgttgctga

SEQ ID NO: 192696 - DNA, 180 bp, Klebsiella oxytoca; identical to SEQ ID NO: 152664

SEQ ID NO: 192697 - DNA, 906 bp, Klebsiella oxytoca
atgggaaaagaaggatcattactttactgtgatgctgataagccgataagtatattttcggcaacttcaaaaaaaaatattaatattaaaggcttaagtgttgatggaggagtcacagaaaaaacaggtaagaattatacacggttagttaggtttatcaaatgtgttgatattaccattaattcattcaaggcttgtaatagcgctgactggtgcatatcatttgaagcatgtaaaatgattaggcttgaaaatattattgtctcaggcggtgggcaccttaagcctggagggagagatggtattcattttcttgattgttcatatttctatattgatagagctgatataacctctggagatgattgcataggcataactacgcaatacggtaatagttattatggctcaatcaataatgttattggtagttctgaaattggctcaattgttgcctgcaatgaggaacaaaaaaaagacaaaacatactacgctagtaagattggctttataaacataactaatgtttctgttaaaaataatggtacagcaagaaatatagttcgattttttgcttataatgctctctctaatattagtaatattaaattatctcgtgttaatggtatgtctaatagttatggtgtttatataggtggtgtaacaaatttaactcttaatggaattaatgtatcatcattaaataagcatgcgatatatttagtgaaatcaaaaaatattcaagcacaaaatgtagcatatggattgagtagagttgttggatattatggtgtaagtatttttaattgtgaaaatgtttctggtttgttcaagtcacacaattttaatggtgataagaaaatattgattactaaaagcaaggttgtgaaattaactgataactga

SEQ ID NO: 192698 - DNA, 1005 bp, Klebsiella oxytoca; identical to SEQ ID NO: 31749

SEQ ID NO: 192699 - DNA, 1104 bp, Klebsiella oxytoca
atgtatatcacaagaaaaaatttcactcctgccgcgatatttataattactaatggtgtgtctatattatcttggctgttcccggactttggtttcctccgcaaaggttttacaactcagtttccaatattagatgaagatgcacttggttatatatctatcatgctacttttactgagtttcctatggttaggttataatttgtttccaaaaagtagagggcttgaaagatttgagacgataatcgtaaatgatagaatgtatttcttcagtatatgtatctcgatgttgggattgtgcgcaagttttttagcaataatgaaaactatgtctattggtgatattctttttgttgttcagggagggcaggccaatgcattaaaacaagcattatatgaagactattcatttggtattgttagtcttagatacggtgttatattatcaggaagttttgtcatatacaggcgattgataggggtcaaaaatttatggatggacttattggcagttctgtcattattgtttgtatcaatgatgtctagtagattaactcttatcgcggctatatttggaggcctgtatttatttatatattggaaaggaaaggtcaagtttaagttcctacctgtttcagttgcaataatggtaggtttccttttattatcagcgatgaattggagtagaaatgctaatttttacgagtctaaaggattaggttttttttctgctggtgtatctgaaattttggcttataccggaactcctgtccagggagcactctatgcagttagtaacccttcggtaggggatcaaagtactgctgtattttatagcagaactacgattgaaccatcactgacaacaaactcagccattttagatgtaataaggctatatggaatctgggggttactgttatcagctgtggttttgtttgcttcgggattgtatatttctttttttgaaagctataaatatggtaagtatatttatatgaatatcccaattttctattctatagttgagttttggaggatatttttatttttccaagggattataattacgctcattttcccacgtaaaacattaaatacttga

SEQ ID NO: 192700 - DNA, 396 bp, Klebsiella oxytoca
atgtctaacactaacgccaattttgagatgaccgggatcctgttagggcaagaagtccgtaaacgtaaaactcctcaggagaagatcgccattatccagcagacgatggagccgggcatgaatgtctcccatgtcgcccgcctgcatggtatccagcccagcctgctgtttaagtggaagaagcaatatcaggaaggcagcctcaccgccgttgcggccggagaggaagtcgttcctgcttctgagcttactgctgctctgaagcaggtccgggaacttcagcgccttctgggcaagaagacgatggaagttgagatcctgaaagaagccgtggagtacggtcagtcgcgaaaatggatagcgcacgcgcccttgttgccaaaggacggggaatag

SEQ ID NO: 192701 - DNA, 414 bp, Klebsiella oxytoca
atgcccgagattcagctggctcttgccgccatactccgtgctgaccttgatatgctctttcccgcgctcgtcatcgaggcggattttgttgttagccggggtgcgcagcacgttacgtttgtagttgcggatggtgacgtggtcgccatgcgccgagtcgtgcagcaccccggcgatgtacggccggtccgggttaccgtcctcaaaaccaatcgccacctcggtgcccgcgagcagcggcagatgcagaccataagtatccccggcatacggccgggactgacgaacccacaggctctcgaatccggtctcccagctgtcccggtcgaacagcatgttgacgcggtagcgaccgtctttatcgatatgcccgtaggtgtcattttcggtggtactggtgacgcgggccggtaa

SEQ ID NO: 192702 - DNA, 222 bp, Klebsiella oxytoca
gtgcaggtcgttctcaccgtactgcatcacctgttcacggcgtgggtactctctggtgagcgaaaacagaaaatcctggccgcgcatgccgtggcgctcgcgcaggattttctccacaatctgcgggacggacatatcctggtaaatggcgttctggtgcgaacggtcaagcagcgccaggcgcggctcaagcgtcagggcgtagcgggtttcatcctttga

SEQ ID NO: 192703 - DNA, 231 bp, Klebsiella oxytoca
atgagtaatgcagaacacctggcgagcgtgatggttcaggcctttattgatgcagtcgacagcggtgtcgatctggtgccggtggtggctgactccacgtcaacggccaaaatcgcgccgtttattaaacagttccccgggcgtctggtgaacgtgggcatcgctgagcagagcatggtcgggacggcggcgggcctggccctggggggggaaagtggcggtcacctgtaa

SEQ ID NO: 192704 - DNA, 753 bp, Klebsiella oxytoca
ttgcagtttgactacattattattggtgccggttccgccggcaacgtactggctacacgactgacggaagatcctgacaccaccgtcctgctgctggaagcgggcggcccggattaccgtttcgacttccgcacccagatgcccgccgcgctggcgtttcctctacaggggcgtcgctataactgggcctacgagaccgagcctgaaccgcatatgaaccatcgccgcatggagtgcggacgcggtaagggactcggcggatcctcgttaatcaacggcatgtgctatatccgcggcaacgctatggatcttgataactgggcctcggcgccggggcttgagcactggagctacctggactgcctgccctattaccgcaaagcagaatcccgcgatatcggcgccaacgattaccacggcggcgacggcccggtcagcgtcaccacgccaaagcagggcaataatccgctgttccacgcgatgattgaagccggcgtacaggctggctatccgcgcaccgacgatcttaacggctaccagcaggaggggtttggcccgatggatcgtaccgtgacgccgcagggacgccgcgccagcaccgcgcgcggctatctcgaccaggcgcgcgcgtcccaatctgactattcgcacccatgcgctgaccgatcatattatttttgccggcaagcgcgccgtcggcgtcgagtggctggagggcgacagcaccgcgccgtcgaaagcgaccgccaataa

SEQ ID NO: 192705 - DNA, 147 bp, Klebsiella oxytoca
atggtttactgtcaaggctacaaggtggaaaccagaatcaccgatgagctgaaagcaggtgaggttagaaaggctttctttaaagaactcttaaaagatactcagagacaagaagatgaaaaaaagaatctgttaagaggtttttag

SEQ ID NO: 192706 - DNA, 522 bp, Klebsiella oxytoca
atgttcttcctgccttcgcaagtcgcctcgctaatgggttccacgctcggctttaaagagtcgctggtcgccgccattccgtgggcctgctccgccgtcggcgtctattacattccgcgtctggcggacaaaatgccggctcgccgggtactgatttcggtcatctgtatgctggctgcggcgctggggctgtttgtttctgcctggtccggcccggtgctcgccattgccgcgctctcgctgtcggccatcggctttctctccgtgcaacccattttctggactttcccggcgcagattgtgtcaggctcggcgctggccgccagtatcggcttttgcaccaccatgggcgcgttttgtagcttcctggcgccgctcattcgcgttgaggtcgataccttcttcggcaatgattcggcgggcctggtcgcactgtcgctgattaccgtctgctgtgcgctgctgattgccgctcttgccggcagaaaagcgacaaacggcgttgcggttacccatcactaa

SEQ ID NO: 192707 - DNA, 351 bp, Klebsiella oxytoca
atggaaagtaatggactagccagggtatttaaaaacgaatggttagaatcatcttctggtaactcataccacggagaatataaggttggacgatttcatctaacagatacgtttatcgtaaagtatatgatgctggtacatggagtcgatataccagattcgtgggttagtaatagtttcactaacataccagatatcaatacccgcaaggttatgtatatggaatgcagtgatatgttatcgaatgacactatgaatgagatccgtaacgcggttaaatctccaccagacagtatgaaattatatcgtaatagagatcaaataactcatatagaaatcatggaagaatga

SEQ ID NO: 192708 - DNA, 519 bp, Klebsiella oxytoca
atgaacttcacccaatatttcttttataacggaaaacataatcggacagcaactaaatattcaaaagatgtacaaagtaagttattgtctccaatatcttatgttgcagattccatagatgaactgaaaaaatccttaaaacgttcgggaatttatgacacaaaagttagacaatcttttcctaaatttataaaggagatagaatttcatcttaagggcaaaccttatcgttttttttatactcagaatgctaagatgaaattaccagcactgggagtatgttatcgatatcatgaaacgagctactgggggagtgtactacttctatcagtggatcttatagtcgaacagaaacattcctgcacaaataacagacgcgattattactttggtttttggaaaaaagttaatggtgaaactggatacgagtttatgattcattttgaagatactagagctttcaaagcccgaggaaatgctatgcctagacagtcaagcactcggaaaattggcacataa

SEQ ID NO: 192709 - DNA, 1068 bp, Klebsiella oxytoca
atgcgtggcgtgtatcaggcgacgtatctcaatacatttgcacagcgtctgcataactctggtgaaggagtcttagatccaggaaaggcatttgatttaattgtgggaaccagtacgggaggcatagttgcctgtgcgctagccgcgggggtctcacttgaaaaggttcttgcactttatcaagtgcatggcggaaaaatattccctcggcaacgattacgtgcactacctcgagtgggtaagtatgtccgtggcctattttctggtcttgcatctggcgaccaggctctgcgagcagtcctttctgattcattcggtaccgaaactatggggcaggtctatattcgtcgtggaattggtttagccatcactacagtggatctgaataggcatgctgccacagtttttaaaacccctcatatgagtcgtcttaatggacgtgacaacgatcgactattagtcgatgcctgtatggcgactagcgccgcccctatcctgagatcaatagctcgtctaactgaacctggcggtggagccactgttgattatgttgatggcggtctctgggcaaataatccgggggctgtcggcatgatagaagctcatgaaatccttcagcagagaggagagattgaacgtccgattcatttatttatgctcggtacgcttccagtgcaaggaggtgaagaacttaagagcgcagataaattacatcgaggtgttttggggtggggagcagggattaaggccatcacagtaagtatgaattcacaggcagttgcgtacgactacttggctcgaaaaattgcagaattgcgaggatatggaagttttgcatatcgactcccagcacaatgcccatcaggagaactccagaaatatttggaaaatatggacgatgcacgtcctagggtgcttaatgcgcttgcccgacaagccgtctcagatgttgattacgcttgggctacggcagaatcagtaagtaaaatgggcgcgtttcgaactgcattggcaagttcgtccaattatagttgtcataaatccgaggaacaccatgaccattattga

SEQ ID NO: 192710 - DNA, 1065 bp, Klebsiella oxytoca
atgaccattattgattgtaataaagagatgagagggtatcactcagaagaggtaaacctctcgaatgcagagcaggcagaaatgcgcggccgccgcgacaatggtcgaacaaggctccgaaacggattgacaaaggctggtcatcctttgccgaaggagttcagttctcaaggctcttatgcgatgcgaacaatggtccaggatgatgcatgtgactacgatattgatgatggcgcgtatttcgataaagaagaccttaagaactctgaaggcgattatcttagtgcgctagatgttcgtaagcgggttcggaaagcattgaaagacgaccgattggcatatgatgcggttgtcaaaaccaattgtgtgcgtcaaatgtatcccgatggatatcacattgatatccccatttatcgtacgacctgttctaaagatatctgggataatgacatcatagagtatgaattagcaagtggcgacgaatggaccaaatcagatgcacgtaaggtaacgagttggtacaacgatgcggttggtaatgaactgaaagcgggggaatctgataccagtcagatacgcaggatcaccaaacttactaagaaaatggctaggagccgtaatacttggaaaaaaaagacaaccagtggcatttgtatttcgaagttagttgtagacaatttcgttgcgcgctcaaatcgtgatgatgatgctttgcgtgatacctggaaggcaatcaaattgcagttagaagtcagtcaacgtattacccacccggtgtttacggacaaaaatcttgctgaggaaggagacgaatgcgttatttttttccgggaatgtttgggtgaggtgctggaaacattaaaggtgctcgacgagcatgactgcacaagtaagaaggctggcgacgcttgggatgaggtgtttaatacaacttattttagtgcccagtgtaccacggataacactacatctaaatcgctgctacggcctgcagttgcggccactgctagcctgtctttccctagttatcccgtacaacctaacaaatcatcggggtttgcctga

SEQ ID NO: 192711 - DNA, 1767 bp, Klebsiella oxytoca
atgaagtgggctatagacgatcccgtgcgtttcctgagggagaaggatgaactcacacatcttgaaaccgagacgggttggctaagcacggcttggcgtatatctgaagagggctcgatcaccgttgatatcgacatgtttatccatgggcgattgtttgctggggaaatgacatatccggacgcgtttccggattctccgccctacatacgtccgcgagataaatcagagcgatggactaaccatcaatatggcgtgggtggttcactgtgcttgcagtggcgggcagataactggcatagcaatgtgactggtgcagatatggtacgcagtgcgcacgagttgctgagtacagaacagcatcctgaattacctcattctgttccctctgcgcatcgtttgacggaggggcaaaaccttaatttcgtatttcgacgttatgtccctacctccgaagtcgaaaacatatttactatgctcccacttcagtctagaacccgaatatcatcttcaactgtgtataacgaagggtcggcggtaatgttcacagccagagtcgctgacgcacaggatgagctacgaaatgttaccgatatccctcaagggctcatcgattttgttagtattttgtcgttgtcctatgagggctgggtctttagaagcgactactttagccagaggcaatccttagaatctgtagaagcattaatccaaatattgatgatggccggttttaacaccgatgacattctggttaaggaaggggataagttcaaggctaggacgatcatattattaggcaaggaatggtcatcactgcgagtattcctgttagattctggggagcaaccagtgctgcgggaacatcgagttgttagatctccgaactcaaccttaagactttcggaagaatcacagaagttgagtaagatccgcgtaggaattgttggactgggatccgtaggtagcaaaattgcaatttcacttgctcgttcgggtgtcagacaattcttattagtcgatgacgactatctcacgcctggcaacttggtgcgtcatgagttggggtgggcccatgtgggagctcataaggcacgggccgtaagcaatactttagcgcttatagcggcaggtgtgaaagtggatgtaaagactatgcgtcttgcggggcaggaatcggcggtgacagcagcggctgcactaaaggatctgtctaattgcgacttgttgatcgacgctacagctaatccagaagtttttttgctgttagctgcgactgcccagcgaaatggaataccgatgtgctggggggagatattcgcaggtggttacggaggcatgatcgctcgagcacgtcctaaacacgacccaaatccattagctgtgcgtgacgcttaccattcttatctctcaaccctccctgaagcacctttcaagaatatggctagctatgatgggagtgatgaacaaccacttatagcatacgacagcgatgtgggctttattactactgcactgacacggttggctgtggatactgctctatgcagagagccaagcgaatttccgtactctttgtacttgctgggtatgcgacgtgaatggattttcgaggagccatttgacacacggccagtcgaaataagtggagaaggctgggaacgcgacgaaaatgctgtgagagatgaagatagggtcgcagttgcaaaggcattggtaaatatgtttgaaggaaaacaaagtgctaacactgatcctacctcctaa

SEQ ID NO: 192712 - DNA, 228 bp, Klebsiella oxytoca
atgccactcaccgatataattgaagcgaacataatcgtatccagttcctttaaaaaaagcacggagcccaccaatagcatcctcaatacgtcgtacaaaggaagcaaacgtaccacggcgatgtatagttatctcccggacgatgaaagtatttgtcccgacatgttcacccataagaatcccgccgacttcgcgttgaccagcattttggagtgcagtcatcattaa

SEQ ID NO: 192713 - DNA, 993 bp, Klebsiella oxytoca
atgcttaatctgcttgccaactctgatgcaaagcgttggatcaatgatgctgtcaaacggcattcatcagaaatttatggggatataaaatctgctgtgatttggaccaacgctctggatgagaacggagggttgattgttccaattgatccttacgagctatctcgacgaatcaatcaggagccattcatgatacttcataaccatgacccaggtaacccaaaggggcaggtcttagaaagtgctgtttttgataatggctctggtgttgtctttgttgcagctatcatggggttctatgctggaggtaataccatagaattcagatcaatggatttgaatctacatgatatttaccaatctcctcgagagttgcctgacatgccggaagaatcctcaattgaattggtttttgatccaagagatgtcaatccgcagtggattgaacacatcagcaaaaatgcaccgctaagaattcaggtcaacgaatcatcgtacaatgatgcccaaacgactcaagaactgattagtattgggatcggctacttagctattgtctggaatccttttgtgactgctgttgcatcggaagctggtaaaaaaatgtatacagcttttcacaactggatttcaaaattattcaatgagttatctgaaagaaaaaatcccatcatcaatcttgtttcccatcaaaacggatgccaagtatttttcatattccgtggtaaagacgtgaagcaacactatgctgctcatcaaatgttatcgagtgctggagtacaagctgcagagctgataagaaaattaaaaatgcaggacaaggttccaacacagctaacatatgaatgggataaagaagcacagttatggtatccatcgtacgcagtgcttactgacaaaagcatcattgttgatagagggacacttatcgctatagaacagttgcctaagggcttaagtctcggatttagtaaaggaaaagcaaaagtatga

SEQ ID NO: 192714 - DNA, 1404 bp, Klebsiella oxytoca
atggaaccaacattgtcattaaccgtgatgttctgtgctgcagtgggtgcttcagtatcagaatcgctgtcagaatccgagtcactgtcggaatccgagtcactgtcagaatccgaatcgctgtccgaatccgagtcactgtcagagtccgaatcgctgtcagagtcggaatcgctgtctgaatccgagtcgctgtcggagtccgagtcgctgtcagagtccgaatcgctgtctgagtccgaatcgctgtccgaatccgagtcgctgtctgaatcggagtcgctgtccgaatccgagtcgctgtcggaatccgaatcgctgtcagagtccgagtcactgtcggaatccgaatcgctgtctgaatcagaatcgctgtctgaatcagaatcgctgtcgctatccgagtcactgtcagaatccgagtcactgtcagaatctgagtcgctgtccgaatcggaatcgctgtctgaatctgaatcgctgtccgaatccgaatcgctgtcagagtcagaatcgctgtcgctatccgagtcactgtccgaatcggaatcgctgtcggaatccgagtcgctgtcagagtcagagtcgctgtccgaatccgagtcactatcagaatcggaatcgctgtcagagtcagaatcgctgtcggagtccgaatcgctgtcagagtcagaatcactgtcggaatccgagtcgctgtcggaatcggaatcgctgtccgaatccgagtcactgtcagaatcggaatcgctgtcggaatccgagtcactgtcggagtcggaatcgctgtcagagtcggaatcgctgtccgaatccgagtcgctgtcagagtcagaatcgctgtcggaatcagaatcgctgtcagaatccgagtcgctgtcagagtcggaatcgctgtcggagtccgaatcgctgtcggaatcggagtcgctgtccgaatccgaatcgctgtcggagtcagagtcactgtcggaatcggaatcgctgtcggaatccgagtcgctgtcagagtccgagtcgctgtccgaatccgaatcactatcagaatcggaatcgctgtcagagtcagaatcactgtcagaatccgaatcgctgtcgctatccgaatcggtgtcagaatccgagtcactgtctgaatccgaatcgctgtcagagtcagaatcgctgtcggaatccgagtcgctgtccgaatccgagtcactgtcagaatccgagtcactatcagaatctgagtcactatcagaatcggaatcgctgtcagagtccgagtcactgtctgaatcggaatcgctgtcggaatcagaatcgctgtcgctatccgagtcgctgtcagcatccgagtcactatcggagtccgaatcactgtccgcatctgagtcagtttctgaaatcgaagagtggtga

SEQ ID NO: 192715 - DNA, 216 bp, Klebsiella oxytoca
gtggaaggcaggatcctgcacgcggcggcgcatgcgctggcggtgagctggcgcttccccgacgggacgctctccgtggcgctgaatatcggcgcggaccccgtgacgatgccggagataccgggagaggtcatttttagctggccggagcggcaggaagcgttaacgccaaacagcattgttgtccgttttgcacatggagaagcttcatcatga

SEQ ID NO: 192716 - DNA, 486 bp, Klebsiella oxytoca
atgcagaatccgtccaccccgctggtgaaaacccggcaggggatactatccggcacctctgaagagaacattcatatctggcgcggtattccctatgccgcgccgcccgtcggcgatcttcgctggcgctcgccgcagcctgctgcccgctggcagggcgtgcgccgggcagagaccttctcggcctccagctggcaggatattgaatactgccgcgagctcggcggcggcgatcccggtagcttttccgaagattgcctctaccttaatgtctggtcgcccgccgcccgatcgcagccgctgccggtcatggtctggctgcacggcgggggctataccatcggcgcgggaagtttgccgccctatgacggcaaagccttagcttctcgcggcgtggtagtggtgacggtcaactaccggctcgggcatctgggcttttttgcccatccggcgctggaagggggaagacggcgagcgtatctataa

SEQ ID NO: 192717 - DNA, 435 bp, Klebsiella oxytoca
atgctcttagcgacggctctgttaattattggtttattgctagttgtctacagcgccgatcgtctggtctacgccgcttcaatactctgccgtatgctggggatccctcccctgattattggcatgacggtggttagcatcggaaccagcttaccggaaacgatcgtttccgccgccgcttctctgcatgggcaaaccgatttggcgatcggaacggctctcggatcgaatatcaccaacatcctgctgatcctcggcctcacagctctgtttcaaccttttaccgtgcattctgatatcctgcgccgcgaattgccgttaatgttgctggtcagtttactggcgggattcgtgctgtacgacgggcagctcacgcggatagacggccttttttttgctggcgctggccatattatggctgctgtttaccattaa

SEQ ID NO: 192718 - DNA, 267 bp, Klebsiella oxytoca
atgcaaatagaaggggaggatgtggtcgatgattacagtctggttgcccgccgtagagaatccgataacgtgccagacgtaggtattcaaatggctaacataactgtgagtaataatttaatccctttccataacgggttaatcacattagactcatcaggaattggtcattcacggatgcaagcctatcctgttaacctgatcggtggacagttgcaacccggcccatttaaaggtacggctacgattaccgttgtcgtaagatga

SEQ ID NO: 192719 - DNA, 693 bp, Klebsiella oxytoca; identical to SEQ ID NO: 172737

SEQ ID NO: 192720 - DNA, 1644 bp, Klebsiella oxytoca
atgattcagaatcctgtttttaaaggttttaatccggaccccagtatctgtcggcgcggcgatgattattatgtagctgtctcttcctttgaatggtttcccggcttgccgatttaccattcgagagatctcaaacattggcaattactcacccacgttctcaccgatgatacgaatccggatttaaaaaagctgccctccgccaaaggtatttgggcgccaagcctgacctggtgtgaagaggaaaagctgttctacgttatttatggcgtaatgaattccatgaattcgcgttattttgatgtagataactatcttattaccgccagtgaaatcagcggcccgtggagtgagccggtttatcttcactcggccgggttcgatgcttctatcctgcacgacagcgacggtaaaaaatggatcgtttcactggagtgggaaacccgcgaaggttacgaaaaaccgggcgccatttgcctggtggagtattcaccgcaaaggcaaagcgttgtcggctatccgcagcggatctggcgcggcgggaccgatcgcggttgtatagaagcaccgcatttgacgcgccgcggcgactattactatctgatggtcgctgaaggcggcaccggttacggccatgcggtcactatggcgcgcgcaacgcaggtcgctggcccctatgaaggcgatccgcaaaatcctatcgtcaccgcctggccggagaattttaacgagcgccacgatgcaggtcatctcaaaccacactacttcaatccgcaaacctatctgcaaaaggccgggcacggcagctacgtcgagaccccgacgggggaagtctggttaacccacctttgcagcagacccttccgccaggagttgcgctgcccgctaggccgcgagacggcgatacaaaagatggtatggagcgacgatggctggctgcgcatggcggccggggggaacctcgctcagcaccaggtggaagagtctaatctgccttctcagccgtttccggctaaaccagacagggatgattttgatgggcagacgctggataacgccttctatgcgccgcggatccgctttcagcgctttaccagccttgagcgtaaagcgggttaccttgccttacgcggtcaggagtcgctgagctcgctgaataaagtcagcctgctggcgaaaaagctcacctcggtatacgccaccatcaccacgaaaatggatttcagcccggagatttatcagcatagcgcgggcctggcgctttactacgacaatatgaactatctgtttttgcataaaaccagggatgaagcctccggcgcagcgcagctggccatcatttatatggacaacggtgagcgtcacgacgacccgcagaaaatctgccttacggagggggaaatctatctggcgatggcgattaatggccgggagatacagtgctcgtggtccgtggatggcgaaaaatacctcaacatcggcgcggtctacgacacctcgcgtttttccgatgaatacagccgctatggcgagtttaccggcgcgtttgtcggcatggcctgcgtggatagcatgctgcatcgtaaagaggcgctgtttgacttctttagctaccgggcggtcgaagacgcgataatcgagtaa

SEQ ID NO: 192721 - DNA, 315 bp, Klebsiella oxytoca
atgaatatcgaagactttgtgagtgaagataaccatatgtgcaatttaggcgatgatcttttttacaagatcttcgaacccggagcgatttatgatttacctgataataaatttaacagaaagattgtttactggttaagccagtatttagttgggaatctgagggaaccgctagatgcgatctctgagcttaatatgttcaatcagttttatgtttatgagacatggttctcgttaattaaatgtcccgttgaaatgaaaaatatttcaaagcgaataattcaataccacattgggctgagaactcttttgtaa

SEQ ID NO: 192722 - DNA, 207 bp, Klebsiella oxytoca
atgaatcagctcaatacacgccttattcgccttcccgaagttctaaatcgtacaggttatggaaaagcctggatctatcatctaatcagcaaaggtcggtttccggcacccgttaagatcggagttcgtgccgttgcttttatcgagagtgaagttgacgagtggattcagtctgttatcgaaacaagcagaaataatgttgcttaa

SEQ ID NO: 192723 - DNA, 255 bp, Klebsiella oxytoca
atgaatacattattaattactggcgcgaccggatttctcggtggagcagtgttagaaagcattctgaataaaaagaatgcgcctaatctattactgttagttcgtgcagataatagtgtagctgccgtagagcgggtaaaggaaaatctgcgaaaattcaatattagcgaagagagactaacggccctgacgccaggcaacattctgctggggatctggccaatccgcagccctttctcgacgacccgcgcctga

SEQ ID NO: 192724 - DNA, 432 bp, Klebsiella oxytoca
atggtgctgatcgtcgcggcgctgaacgcttccggcctctgctcgccggagatcaaagccggggccaaacgcctgtctgacttcttctctaagcagctgctgtgggtactgatggtcggcgtcggcgtgtgctacaccgacctgcaggaaattatcgacgcgattaccttcgcgaacgtcatcatcgctgcggtaatcgttgtaggtgctgtcgtcggggcggccgtcggcggctggatgattggcttcttcccgatcgaatccgccatcaccgcaggcctgtgcatggctaaccgcggcggctcaggcgacctggaagtgctctctgcctgtaaccgtatgaatcttatctcttatgcgcaaatctcctcccgtctgggcggcggtattgtgctggtcatcgccagcattgtgttcggcatgatgatgtaa

SEQ ID NO: 192725 - DNA, 540 bp, Klebsiella oxytoca
atgagggagatcagcgaactccacgaactgttgcaggggctggtttcggtctgctctggcctggacagatggagaatcattctcgctgaccagggcagagcaccaccagcaggaggcacgttgtacgcaacgtataacccgatccccgttcgggcctacggtcaaccttcacaacgccttgagtatatcgacgcactggaagagcacgatgaagccctgggtgatgactggcaggatctggaggaaataaccgcgtcatcaatggaaatgatgctgtccgtgaatttcttcaacgagggagcagctcaggcggcgatgatgctgcataacgccaacttccgcaccccaatcagtgactacctgtttatccatcagctgggcttccgctacgtcagcaacccccgaaatctcagcacgcactttcagtcaggcatccagccgcgctggcaagccgacattcatctttttgtggatcacgtagtcagcagcaaggttttacgcgctgcaggattctccatcgaacattacacagaggagtaa

SEQ ID NO: 192726 - DNA, 1251 bp, Klebsiella oxytoca
atggcgtactcagtagacaatattattccggtcaacgtaattatcggagcggcgggcctggggtacgccgatttcacaacggcttttgtttttgcagatgcgtcagacctcctgaaagacgagccagccattctgacggaaggcggcgataagctggagaccgaaaagcgggaagctatcctgccggaaatggtgcccgttacagcgcggggagaagattttccagtagatactttccgcgactattcaggcgcagcggatatcggaaaagatttcggcacggagtcagaaatttatctgatcgccacccgttattttgcgcaagtaccccgaccttcatcgctcaccgtctggatgaaaaatccggaagatgaaagtctgatcggcacggtgaataaagcgaacgaagccgcctggcgttacaactactttttcaaaattgaagatttcagtgatgaaaatttgctggtgcttagcgactggagcgacacgaccgatcaccctgtctggtacaccaacacgcaagatgaagtgatcgaccagaacgagactgacgatatcgtttctcgcctggcgaaaaagggtaaccgccatatgctggtgggctggcgtgctcctgaagcggttgaggttgacccgtcacaggctcactcaatggttcaggtcgccgccacgttcgctaaattccgtcctaacggcctcaacacggcgattacggcggagtatcaggttttaccaggtatcgacggcgacgagcttactacgagccattacaacgcgctgaaggctaaaaaggcggtgttcttcactccggttgagctggctggccagaaagatagctgtcgcgtgatcaacagcctttcaatgtcctcttacggggaattcattgatgacgtgattaatatcgacgtgctgaaaaatcaccttcaggttgatggctacaaccacatcgccaacgtcggcactaagcggcccttaacgccacgcggttatgaaagtctgcttagtgtcctgacggacactctcaagcgcttctataacaacggcgtgctgggagagggaatctataccgatgaacagacgggtgaagagaaaaccgcaaaattcggttacgtcattctgtcgaaggctgaagacgttctttccctgaccaaagcgcagcgcaaaaagcgcgaattcccgccaactaaaatactcgtcattctgtcacgtgcagggcatgtggcagagctgaacgtaacagtggagtaa

SEQ ID NO: 192727 - DNA, 405 bp, Klebsiella oxytoca
atggcaatgaagaactacggcgccagccacgctgacctcgttatcaatgggcttccgattgacgagtttggggatacggacccgccgatcaccattgaagatatcgaccctcgcgccaccctgaaacgcggtatcggtaaaacctccgttcgcctggacgggccgacacgacctaagcgtttatcggtgagtttgatccctggctgcgatcaggtccgtcagctgttggcgcttgagaagtcgggcgtggattttttctttaccttccggcagcgcggcaccgatgaaaccgttgaagcgtttgatggggtaatgactcagcgtggagggctggggcgcggtggtaaacagagcgccagcgacgaaacgtttacctttgagtttgccgatagtgaggaaacctag

SEQ ID NO: 192728 - DNA, 723 bp, Klebsiella oxytoca
atgctggccaacaatccatttaatttgaaattacttaaagctattaatgaatggcaaattgattcatctgatagcaggggtaataagttaaaaagcctatcagcaaatttgcctagtaatttcgtaacttgtaatgaagtttgttatagaaagatagagctgggaaagagcggcgttttttctattatagggaagagtaggctcaaagaaaaaatatcatcttggtcacagtctgttgaagtggtgaaaaaatttaaatttggagtttccacaaaggttggagagcaatctctgatactccgatattatccaactgcaagagaggttatactgaatcttaaagaggtatattcgagtccactttttcatcaggctgtggcgtgttatgagtctcaaattaaaaatatcaatagagggattaagaaatatggtgattctcagagggagattatacttgaggtagacgaggtttctttaagtcacattcatatgcttggtgggcattcgtcgtatatagatattgctcattctgggcaggtatataagcgatttaaggagggttgcactattgttttaactgaggataatttaaaattccgcgtgttcaaatggatcgatccatttaaaactcaaaaggttttaaagagaacattaaataaatctggtggaagcattccttacaatgtatatgcaaaacactatggtataaattatggcacgtaa

SEQ ID NO: 192729 - DNA, 303 bp, Klebsiella oxytoca
atgttgagcattgcaacacaaaacggtttactcccctatcttacaaaaaacgtcaaagatatgacgatcgtttccggtatcgctgggttaaataccatgaccttcgagcggcttaaagaattggttattcgtaaaggtgaattcaaacgcgcttcggataatgtgccgttgagtgaaaatctttttcaggatcaggttcattttttcctactacttttggggcgtgcgcttgctgagaatgttggccctttctggaatctcagcagcgacgaaaacaccgacgaaccgacagaagcgcagtaa

SEQ ID NO: 192730 - DNA, 411 bp, Klebsiella oxytoca
atgtcttttaaagcgtcgcttaaaaatatcgtatctactttatttcttattgctgttcttcttttttgtttatttttagtggctctactgctcaaagatttatacacggataaaataaacggcaatattgaagttatccttgttattctgtttttattggcggtctatctattgccttccattaatgcgtttaatagatggcataaagataaaaaagcggtgctagcacttaatttatttttgggctggacggccattggatggatcggatctttgatttggtcatttactggaccgaacttaaaaaaagagaggttaaaagaaagttatacttctaaaacctgtccgcactgtgcagagttagtaaagatagatgctaggatatgtagattctgccaacgagagctttaa

SEQ ID NO: 192731 - DNA, 1638 bp, Klebsiella oxytoca
atgtcacaggcaaacgcatctgatgtcattgatagtatattcgtatctctcggaatagatttagatgacaagagttttaaagccgcgaccaatacggtaaatggcctaaaatctggtttggttcagttaggagctgcggcgggcgctggtatagggtttagttcggcaacatttggattggcgaataaaattcaagagctggaaaggctgggcaagattaccaactttactacaaagcaaatcgaagggttacaatttgctttgaaaaaggttggtgtttctgatgacagtgcagcttactcaatagtccaaaaaatcccttcattgcagcaagcggcacgtgaagggcgtttaaatgatcaggcttattggaacggggcttttaacccacaacagttttctaatcttactggtcaggacgcaattgaatatctgatagagtcatactccaaaatgaatgccgatcagcaacgcactttaagaggcgggattggtatcggagataatgatccgctcactcgtttacttgaaactggagttaaaggtttcaaagaaattaatgagcaattcgaaaggatgcataaagctattgatccggctctttctgaaaatgctagaaaacttaatgacgaattgtcggttttatcgttaaattttgaaaatctgaaaaaagccattggtggcgaccttattggtccattgtccagcctaacggcaatcgttaatgatttaatgcagaagtatccagatgaagctaagtatgccagctatgcggctggtataggcggcactgcgattgtctggaagacaataggcgctctatttggaaagcaagcggctacctcattcggtgctggtttattggcccatccagtgatagcaacaatccttggggttattgcccctggcaacccttttgttgattcagaagatgctaaagctatgagcgaccccattaaaaactggcaaaaaagaaacccaggacaacctttgccgactggtaccgtggattggaaagaacaatatcttcagcaattagaacggggcggtgtttcgaaaaatgagcaagacttcctcgatgtaatttctcaggctgagggaacgtctaactatggcaataatggctataacacgctgtttggcggttctcagttttcagactacagcgatcatcctcgtcaatattttgatcacaatggaactcgaacatcagcggctggccgttatcaaataacagctcagtcatgggatgacgcagtaaaagcgttaggccttactgatttctcccctgccaaccaggataaagcggctctttggctggcgcagcgtgcgggccagggtgaaaacattcgcaatgggaacatcaccggagcagctaacgggcttcggcaggtctggacaggcctgaattcttcggctggacacaatgtgctggcaggatattacgcaagcgcaaacagcattccccaaccaaccaatttttcaggtggtgctggcgcccgttccatgactatggaaaacaacattgttatccatgcaagtggtgcgaatgctgatgaagtagctgatcttgtcttcgggcaaatctcggataaaaccagtcaggcgacagcgcacctctctacggataaattctga

SEQ ID NO: 192732 - DNA, 666 bp, Klebsiella oxytoca
atggcaataacaggactgtttactcgaaacaggccgcagatcggaaacctctattttgatgctcttcttaaagaaagtaccgaactgcgtactgaagtaagcgatttccctctggagaccgctgaaactgcacaggacaacgctgtaacccgcgcgctggatatcacaatggaaattggtgtttcggacaactggttccgcggcctcattgcacaacaggaagagctggcgcagcccctatttgatatcggaggtggttttactgctggtgttgctgcatcgctaatgtcagggcgcacagctgcgctatcagggattgcggcaagcgtagggctggccgtataccaacacagccagggaacgacacgttcccaaagcttgcttgaacagttacgcaccattcaacgcaatcacgaaacgtttgatctcgtagccagtaaaggcgcgtcctatcgaaactgcctgataacgaatacccgaaccgaaatcgataaggaaacagagggtgggctgatcatcgttgtggatatgaaacagttaacgattatccatgacacggttgaagagacaaacgccaatttaccctggggcgatagcgtgaccacacaaggccaggctgagtttgctgggggggaagttatcactcaggctgtggaggtcgtatga

SEQ ID NO: 192733 - DNA, 288 bp, Klebsiella oxytoca
atgatcatcattcctctctccagtggctacgcttttcagcgcttccgcgttcagcttggatctcactatctggttttcaggctgcgctggctcactcgcttcgaatatttctgcgtggatattcttgaaaatggcgagccggtagttctcggacgtgcgctacatcctgacgttaatttgttggctggcctgaataccgatattggcgcgttgtacttgcgaggtgaaagcccaacagtcagcaatttaggcataaccaataaactggagtggatagccaatgagtag

SEQ ID NO: 192734 - DNA, 894 bp, Klebsiella oxytoca
atgagtaggtttttcggacgaaactatctccttgagataaccaccaccagcggggaagtgctgagatatgaaccaccaatcgaaactcggttccttgtcgataattttccgcaacatgccaacgcgacagccggcattaccgtttttggtatttcttccagggcacgcgagctgatacagctgcgcgatgatgcaaaaaacaattatggaacggtcatcctcaaagctggttatggcgatgatataggagtgatttttactgggcgcatcaacaatgtgcaggttgcgaaggatggcgttaatacctgcataaaactgtattgttccgcgtcgtcaacagaatgggatgcctcttcataccagacatggggtgataacactccgtatcaggaagtgatccgagatattgccgaagggctgggcgctcctgttgagttcgtgggtgatttctcggatctgcctgttttattacgtggccgtaatgcagggggaaaactttgccgtgttctgctggacgaactaaagcagtttttcgggttctggtggctccatactcccacgcgcacaatcattatccgcgatggtgctgcgcgggaatgggtggagcatgacatttcagcgctgaacggtatggagggcgcaccgcgctggtatgcgagttcacttgaggttgacgtaaagctgaactatcagcttcagccagcggacgtgatgaacgttacctctcgtttctggaccctgaatttcagccttgcctatttctctgacctccagaacctggctgaaacgcagcgcaagacaggcaagtttacgattcttcgaacaacccacgaaggttcgctctggggcaatacctggaaaactacagccatttgtttatggcgggggagctga

SEQ ID NO: 192735 - DNA, 621 bp, Klebsiella oxytoca
atggcgggggagctgattttgaaagatacaaacccttttctcaccatgcttatgcaaatcaggccgcagctcctttgggatctcatgttctgcttgcctggtaaagtgactgactatgatccagacctccagcgtgccgttgtggaaataggtattcagcgccatgagggagggggagtgtttaacactctccctgagattaagcacgtacccgttcagtttgctggctctcctgaatggtcagtgtttcatgagctgccggaaggcactgaaggactcattcatttttcgcagcgttccgttgactactggatcgaacagggcgggcccgttcgtcctctcgatgctcgcatgttcgatgcgaccgatgccttttttgctcctggctaccgctcccgcgcaacatgcatttctagactgcccactgaaggtatcggaatgagcaacgccagtggctctgtgcggcttcatctttctgatggtgggattaacctcaaagtggggagtcaaacgctctctctgtcgtctgacgggcttacgcacaacgggaagaatatcggctcaacgcataaacacggaggtgttgaaaagggcgggaacataacaaaagagccggaataa

SEQ ID NO: 192736 - DNA, 348 bp, Klebsiella oxytoca
gtgatacgcaatttctcagacggcgatatcgtgacaagtggcgatcacttcgttaccggcaaagaagaaaccagactggcctgtttttgcaggcttcgtctttttttgggggagtattttcttgatgccactgatggtacgccgtggtttcagagcatcctcggtaaatcctcgcgcgatatcgctgaagccaacataaaacagcgcattctttccacaaagggagtgctggcgatcaacaccttcgatatggacagcgataccagaaaacgcacgttcacgattagggccacgctgaccgacatcaacaacgaacagtttgaattcctgtacgacaaggatctctga

SEQ ID NO: 192737 - DNA, 1206 bp, Klebsiella oxytoca
atggctgaaatcacgaaagacggagtgacgggaacgaccctccaggaatacaaagacgagatcacagagaagtatctcgcaatagacagcggctggaacctctcgccagaaacgcctgacggcatggcgattgctatctgggccgaacttttcgccaaccttgatgaagaggttattaatgcttatcacgcggcagatcctaacgcggcgatgcgccagcaacttgaccgtatcgccgcgtttgcaggtttgcagcgccagccagaaagcttttcaacggacgttgtggaattcgaaggcgatgggctgatcgaggtaccggccggaataaaggtccgtcaccgtatatcgggtacgctctggacaactgatgcgaaggttattaccaataccagcgggaaagcatccgtcagtgttacctgtacgaccccaggagctgaaagcgctaacccaggcactttaaccatcattgcttcgccagtggcccgtatacgctctgtgacgaacactcagggcgcaagcctgggtaaaactgaagaaagcgataacgcatttcgggtgcggcgaaattactctgtggcgctgcctggtaacaatcagatcgataacatcaaagccgcgctggataacgtgacgggcgttaagcaaacactcgttcatgagaacgtggaaaacgagactgatgaacacggcgtttacggtcactcgatggcaatctttatcgacggtggcgagactgacgatatcgtgctggcgatggccacccataaaaaccccgggtgtggcctgaaccgttacaacgttttcccgaacaaaattagcgtggacacgtttacgccgaaaggccagcccgtaaatatcacctttttccgccctgaatatgttgctgtttatgtgcaggtggatatcaaaaccagcacgctgggtgaggacgaaaagcagaaaatcaaagaggcaatagtggattacacgcttgttggctttgatgaaacaacgggcttcgctaagcaaggttttcgcattggcgaagcggtcgcagctggtcggctctataccccaacaaactactttgtcggtgccgatgattacgtgagtaacatcaccataggtacggctgcaggagaggtaaacaagggcgtcattccggttaagttcaaccagctaggcgttttcagtacggagaacatcacgatcaattatgtctga

SEQ ID NO: 192738 - DNA, 861 bp, Klebsiella oxytoca
atgtctgaattcagcgataaggcgaaaagccgaatttactgggagtacaaaaacgccccgaagcttatcgagtggattttgtctctccctgacgtggcccagagcagaattgtcgaacagatagagaaggtccgtaacatcctcgatattgataaagcggaaggtgagcagctcaatatctgcggccgaattgcagggtaccgaaaacggcctgtaggacgcttttaccctggctgtaaggtggaggaggtggacgatgttctttatcgaaaaatgataaaggccaaaatctgcaagaacaacgggatcgccacgatagacgatgtaaaagccgctgccgattacatccttgacgttaaggtcacggttctggatgcgcaggacatgacaatgcggctggtgtggcatgaggacaccgtaagcgttgctgtgcaacagctggtggaagactacgatttgatcccccgtcctcagggggtgggaatgcgaaagcaccgcgtcattaaacgtaaacctttcggctttggtcgtcacttcaacaatttcggaaacgctgcattctggtacggcgacggcagaccaccaatctattactacggctcaatcaaaattagctgggctgatgggatgctgtcagggcaaatcatcgttaacgaactcgacgtttcagaccaggacgtgacggtagtcattattggttctgacggcgtgcagcgcgtacagcgtgccgttactgattctaagggcaaattctccctatcatccatcaccccaccagcaacggtagttgctcgcgcacttctggtcactctggactgtgaagcgctggaactcgaatctgagcctcttaaaataaattaa

SEQ ID NO: 192739 - DNA, 1344 bp, Klebsiella oxytoca
atggcaaataaaaaattacctggcggacgcaaatccgcggggcgggtttctacgtctgcacaaaaactggttgcattaaaagcaggggcaactggcatagcgatttctgagttgccagctgcggaaaaattatcgggagtggaacgctttcctgtcgttcaggataaagaaactcgcggcgcatctgtagagcagattaaagagctgattccagcggggaaaacaggcgactccgcttatgagttgtgggtggctgcccaaccagaaggcacagacaccagcgaaggtgccttctttgaatcaatgacgggtaagccaggcaaagacggagaggatggggctgtcggtctgtctgcataccagatatgggcgcaagcgcaggaagagggggccgatacctcactggacgcgtatatctcattccaggcgggaaaagagggcgctcccggaaaagatgggacagaggttcttattggctctgaagacaataacgctcttgttaataacaacgatagcgccgatggctcgcttggtttgaaagtgcttgtgtctaaagatattcagaatgaattgttcattcttgaagatgaaactaatccgggtttatatgcccgtccgattagtgcgatgttatttgcagaagatgattcaattaaaaaaacttctgcatatgaaggtaacccgaaaaacgcagcaattagcgttagagtgagcgcgaaagctggaaactcgctacagcttgttaaaagtgccacagaaggcggtctatacgtccctgaaaaaagcgtctccgttgatgaagattctattagcggaacggggagttcagataatccgttatcagtgaacatttcaaaagaaacaggtaatgcgttatcagtgtctgataaaggtttatgggcaaaagacaccatttcttcacttgttcgtagtgcgactagcttcaatttctcagttagtcatcctgatgttaaaaccgcagaatatgcatgtggaccgcttggaaaaggagtgtattttaaaaccaccctgcttatcccttctggggcagactataatatggttaaccagatatttcttgataggctcccatgtctggcagatggtactttagtaccttataacgtatggtgtgctggcgtaaacgggaatagtcgggtcccaacatggctgatttgtcaagagagaccaacacacacattgatactctcaactggtgttattgcaccaattacaagagagacaggtaaggactctggccttcctgattatcctgagactgatgctcagtcagtcaattatatactcttctcatgtttacaattctactccaagcaatcatag

SEQ ID NO: 192740 - DNA, 237 bp, Klebsiella oxytoca
atgccacgtcgccatgatattgaaacagcgttttgcagtgcgatagaagttgatccgcgcgggcggcgtactgtaacaacaaagcggtttgttgaggaactcgcgaaagttaactgggtatggtcaggtaatcaggccaataattggattgagcattatgtgacaatttttcatgatatttcacgtgaagaaggcgagaacagaacattcgaactgaacagctacgggagattttga

SEQ ID NO: 192741 - DNA, 180 bp, Klebsiella oxytoca
atgcggataaaccaccgcaatggtcgcggcggcggcgaccatggcttcgatggcgcttccgccttcgcgcagtaccgccagcgcgctttggctggccagatgatggggggcgaccgccatcccgtgggcagcaacatgactttgcatgaattttcctcaattaagcgactcgtccgctga

SEQ ID NO: 192742 - DNA, 903 bp, Klebsiella oxytoca
atgcactggcaaactcataccgtatttaatcaacccgcgccgctgtgtaacagcaacttattcctgtccgataccgccctgcgtgaagccgttgtccgcgaaggcgcgggctgggatggcgatctgctggcgagtattggccaacagctggggacggcagaatcgctggagctggggcgtctggctaacggtaatccgccggaactattgcgctatgatgcgacgggatcgcggcttgacgatgttcgtttccatcccgcctggcatctgctgatgcaaggattatgcgctaaccgggtgcataaccttgcctggcaggatgacgctcgcgaaggcgccttcgttgcccgcgctgcccgctttatgctgcatgcgcaggtcgaggcgggaaccctgtgccccgtcacgatgacctttgccgctattccaatgctgcagcgctccttacccggggcttttagcgactggctatcgccgctcctaagcgatcgctacgatccgcatctggcgccgggtaaccagaagcgagggctgcttatcggaatggggatgacggaaaagcaggggggatccgatgtcctgagcaacacgacgcgtgcggaaaaaaccgccgaagacttttatcatcttatcggtcataaatggtttttctcggtaccgcagagcgatgctcatctggtgctggcgcaggcgccggcgggactctcctgcttttttgtcccgcgcctgctgccggacggtcagcgtaacggcgtacgcctggaaaggctgaaagataaattaggtaaccgcgcgaacgccagtggcgaggttgagttttacaatgcttgcggctggctgatcggggaagagggcgatggcatccgccagattcttaagatgggggggcctgacccgatttga

SEQ ID NO: 192743 - DNA, 2124 bp, Klebsiella oxytoca
ttgttcgtaaatattgacttcgacgataaactggaagcagccagtatttcgttggaaggttgggctcggccgcttgtcgaattcctcgcacggtattttaccatccagaaagacatgcttcgtctggactactcccacctatcaactgagaacctcaggtttacggatacgagttggccatataattcgcaaactgagcgtgagcactttagggccgaattcgtggctgcggcacagcaagggcagatagcgctgaccttaaaaattctcggacacggatccacggggatcgagaagtcgtcctctatcttggacccaaattcttaccagcgcgctcaggatatcttctggaatggcatacttaatggcgatcccccgagcttacgtgaaatcattgtggcggaaatcgagccacgtgcgatttgggttaaatggttactcgctaaccgttcatattctcggaataaatatttggacgatcaacagatcatgaatgcgttggtggtcaatacgcccgaggaagattgcatctatgttcttcaactagtcgaccctcatcagggggcgaatgcttgggctttcgaacaactggtccagcagtattggcatcgtgtacgcgaatacttggaaaaaaatatcgacatgacgtcggactattcaaaccgcgaaatgcttgagttcgtctcctctctatttgcgcattcgccgactgtgcacacatcccggtgggcttgcgaacaggtttttgaacgagcagacccgtcagtctttcctaggctaatccaacattgccgggcgatattgccggaggatgtacgtaatctgttcctgcgctggaacatctgtctgaagaaagagaagaatgacaatatcaaggattgcgttgccaaggccttctctagacttactacattgttcgtggacactataccctcggacctcgcacttgcggcggcttggcacgggtttggagacccagcgcggtctagtcagcaaagcgtcgttgccagcctcagagaattgccagcctcggcttgggatcaagaaacgctgtggacccaactgggcccggccgcccgcgaggcctggcggcaggatctgttcgatcaggtgaatgaggaacctgagttagcccaggggctcctcaattttgcctgcctttggctcgagcagacggcattcgccgaagtcgagccagtgcttttgcgattaatggatgacgaggagcatctagcgtttgcgaatcgacttgttggcactcatgtacggcaactacaactaaggggcaagggactagtacggtccaagcaaggagcactggatctggaggggccagttggcaggggcgagggtgctaccacgttgcctagcataggagcccaaacttggctgagcgacccttccgtggagcgtgtcatccatagggcgcttagccagattgaggaagcattttgtcgccaatatccgaagacctggggagaggacgaggaggtccatacggcgcgcctcctggctctgacacaggaggcgattggcaacgcgagcagccagttgcgccaactctcggttacgacgcgggcgacgtatccgagcctgacagtgaaggtgcgtcaacccagcaagcgagaggaaggggcgaacacacccgctggggctccgctgggggcagacgtgctgttcctgagccgtatcgtggacaaggggaaaacagtggtccagcgtgcgactcttatgcaggtgaaaaagcgcaaaggcactaattcgggaccggccttcagttcgacggtaggcatcaacctgaagcagtgcgaggacatactcaagcagtcagaacacgcctactacctattcacgactccggcctcgcctcgcccggttctctgggttgccccagcacggctcgtcagaaatttgacccaattgcacacgagcaaatctacggttttggcgatgcaggtgcgcgacgccagctgctcctacgcggatttttttctgcacgagcttgttggcctgtgggctggcgacgagcatgaggacatcatcgccgtcgccaacggcaatcctcagcttgggcgaacacctcgccacattgttgaaatcgaggttcgccgccaatctaattaa

SEQ ID NO: 192744 - DNA, 375 bp, Klebsiella oxytoca
gtgctggtgaagctggaggtgacggctaagcgtaacgtcccggacgcgctggtagtggatttactcccggcggggctggagctggaaaaccagaatctggccaacagcagcgccagtctgcaggagaacggcgaggtggtgcaaaatctgcttaaccagatgcagcaggccgatatccagcatattgagtttcgcgacgatcgctttgtggccgcggtagctatcaatgaaggccagccggtgacgctggtttatctggcgcgcgcggtgacgccgggcacctatcaggtaccgcagccgcaggttgagtcgatgtacgtgccgcagtggcgggcaactggcgcagccagcggaccgctaaccgttgcgccataa

SEQ ID NO: 192745 - DNA, 201 bp, Klebsiella oxytoca
atggaccaaattactaataggcgtaaggtatcaaaaaagaaatatatgtactacaggtttagagacagggatattgaattaccggagtggttgttttttttgattcactgtaacttattgatactaaattgtttttattttgccttaatagtttgtggagtaattggctacaataaaatcagatttaattactatatgtaa

SEQ ID NO: 192746 - DNA, 339 bp, Klebsiella oxytoca
atgtctgataaaccccataacccgaaatcccatcaatcaccggtgcatgatgaccgggcggcaaaacctggccttggcgcattagcgccagaagatcaggattggcagcccacgccgcacccgaccgcgccgggcgaagagccgacggcgccgggtagcatgaaggcccggatacgaccagcgaaaagctcgatgccctcgagaaacagcgtaaaggcggtgagaatgctgcgcttacaaccaatcagggtctacgcatcgctgacgaccagaactcgctgcgcgcgggtcaacgcggccccacgctgctggaagattttatcctgcgtgaaaaaataa

SEQ ID NO: 192747 - DNA, 2169 bp, Klebsiella oxytoca
atgtcatcagttaaaaataaaccagccgtgaaagatgcagatgaaattgatttaagtagattatttggtgagttaatcgatcatcggaagttaatcatttcagttacagcttttttcacattgctcgcgttgatttactcattatttgcaacaccaatttatcaagctgattcactgattcaagtcgagcaaaaacaggctaatgcaatactgagtaatttaagtcagatgttgccagatagtcaacctcaatcagcgccagagattactcttttacagtcacgaatgatcttaggaaaaacagttgatgatctcaatttacaagctagggtaaaacaagactattttccgttgttcggtcgaggcttagcaagaatactaggggataagcctggtaagatttcaatttctcgcctttatttaccaaaatcggttgatgatgctgacactcctgaaattaaattaacagtcttaggggacagtaaatttactgtttctggtgatggctttgaaggtgaaggaacagttggcaatttatttgaaaataaaaacgttgttttaaatgtcgcgaaccttgatgcagaaccaggtacagtttttataatttcttatattacccgattgaaagccataaatgatttgcgggatgcaatgacagttagtgatcaaggcaaagatacaggtatgttaactttatctttaactggcgataatccgagtctgatcaaggaaatactcgatagcattagcaacaattatttgatgcaaaatattgatcgtcaagctgcccaagatgcaaaaagcctggaattcttaaacaaacaattgccagaagttcgtcatgacttggatgtagcagaagaaaagcttaataaatatcgtcagcaaaaagattctgtagatttatcactagaagctaaatctgttttagatcaaatagtcaatgtcgataatcaactcaatgaacttactataagagaatcagaggtatctcagcattttactaaagagcatcctacatataaagccttgatggagaaaagagtaaccctccaggaggaaaaggcaaaattaaataaaaaagtatctgccatgcctgaaacacagcaagaggtgttaaggttgagtcgcgacgtagactcaggaagagcagtgtttatgcggttgttaaatcgtcagcaagagctaaatatagcgaaatcgagtgctataggtaatgttcgagttattgatgaagctgtgacgcagccgaagcctgtacaacctaaaaaaatactcatagtattattgggtattatatttggaggtattgtagccattggtttagtgtttatacgtatattcttacgcagaggtatcgagtcccccgagcaactagaggatttgggtatcaacgtctatgcaagtattcctgtatcagaagtatatgcaaaaaatatagtccaaggtattagaggaagtaaaaggaaagcaaaagaatatgatgagtttttggctataactaatccggcggacttagctatcgaatctatccgtggcctacggactagcttacattttgcaatgatggaagccagaaacaatatcctcatgatttccggtgcaagtcctaatgcaggaaagacttttgtaagttctaaccttgctgcgattatagcgcagaccggtaaaaaagttctatttattgatgcggatttaaggaaaggatatactcataagctatttaaaacaaataacgatcatggactgtcagattttttagcggggaaatatgaaattgattattgtgtcaagaaattggtagacactggattcgattatatctccaggggtatggttccacctaatccagcggaacttttgatgcattcgcgctttagtgatttagttcagtgggcaagtcaacattacgacttagttataatggatacacctccaatacttgcagtaacagatgctgctataattggtaattatgccggaacaacattacttgtcgcgagatttgaacaaaacactgtcaaggaaatagaagtaagtattaaacgttttgaacaaagtggtgttgtcgtcaaaggtagtattctaaatggagtagttaaaaaagctagtagctattacggttatggttacagccattatggatattcctattccgacaaggaatag

SEQ ID NO: 192748 - DNA, 285 bp, Klebsiella oxytoca
atgcgtgtactactggcgccgatggaaggcgtgctcgattcgctggtgcgcgagctgctgaccgaagtcaatgattacgatctctgcatcaccgagttcttgcgcgtggtggatcagctcctgccggtaaaatcgttctacaaactgtgcccggaactgcataacaacagcctgacgccctccggcacccgcgtgcgcgtgcagctgctcgggcagtatccgcagtggctggcggaaaacgccgctcgcgcggtcgaactcggttcctggggggggttgacctga

SEQ ID NO: 192749 - DNA, 1194 bp, Klebsiella oxytoca
atggcaaaagtgatgcgagcaatcattgtcggcggcggtattggcggggcagccacggcgctttcgctggcgcgccagggtatcaaggtgatgctgctggaaaaggcgcatgaaatcggcgaaattggcgccgggatccagcttggcccaaacgcgttctcggcgctggacagcctcggcgtcggcgaagtcgcccgtcagcgggcggtctttaccgaccatatcaccatgatggatgcgataaacggcgaagaggtcgtgcacattgagacaggacaggcgttccgcgaccattttggcgggccgtatgcggtgatccaccgggtggatatccatgccaccgtctgggaggcggcgctgacccatccggccgtcgagtatcgtacttcgacgcaggtagtggatatccgccagaccgccgatgacgtgacggtgtttgatgataaaggcaatagctggacggcggatattctgatcggctgcgacggcggtaaatcggtggtgcgccaaagcctgctgggcgattcgccgcgggtaaccggccacgtggtctatcgcgcggtcgtcgatgccgccgatatgccggacgatttacgcatcaatgcgccggtactgtgggcgggtccgcactgccacctggtgcattatccgctgcgcggcggtaagcagtacaacctggtggtgaccttccatagtcggcagcaggaagagtggggcgtgcgcgacggcagtaaagaagaggtgctctcctactttaaaggtatccacccgcgtccccggcagatgctcgataaaccgacctcctggcgccgctggtccaccgccgatcgcgagccggtagaaaaatggggcaacgatcgtattacgctggtcggtgatgccgcgcatccggtggcgcagtatatggcgcagggggcctgtatggcgctggaagatgcggtgaccctgggtaaagcgctggcccagtgcgacggcgacgccgcccgcgctttcgcgctgtatgaatcggtgcgtattccgcgtaccgcgcggatcgtctggtcgacgcgtgaaatggggcgggtctgtcacgctgccggggttgagcgccaggtgcgcaatctgctgtggaaaggcaaaacccagagcgagttttatcgcggcattgagtggctgtacggctggaaagaggataactgcctgcaaccacgttaa

SEQ ID NO: 192750 - DNA, 393 bp, Klebsiella oxytoca
atgagtaaatcactgattattgtctggcagtatgtgcgcgctttcgtgctgatctacgcctgcttgtatgcgggcatttttctctcttcactcctgccgatcgccattcccggcagtattattggcatgctgattttgttctttctcctggcgctgcagatcctgccgccgcagtgggttaaccccggctgcaatatcctgattcgctatatggcgctgctatttgtgcctatcggcgtgggcgttatgcagtattgggatttactccgcgcgcagtttggcccggtagtggtttcctgcgcgataagcacgctggtgggtttttttagtagtcagctggagctcacacttggttcacggcgagcgcaaagtggttggtcaaaaaggaagtga

SEQ ID NO: 192751 - DNA, 2169 bp, Klebsiella oxytoca
atgagcttgaaattgcaggctgaaaaatcgcaacggtatgtcaaagctgattatgaaccactggctctccattatcagcaaaagacgcttcagatccatgtgatgaatgaatacgccaggcttggtcttgaaaaacctaactatgcccaacggctcgtacaggattactttgctatggatgccgagtcatttgttccactttattttaaagggcggcgaaaaattctcgatctggcaaccagcgaaagctcatggaaacgcattgttgaaaatttgcataatcccgatcaggagcaaattgtgcaggcgagccttgaacaaaatacgttagttcttgccggaccaggctcagggaaaagtaaagttattatccatcgatgcgcctatcttttacgcgtgaagcaggtcgacccgcgtaaaatcctgttgctctgctataaccgtaacgcagcgatttccttaagacgcagattgaagtcgttgcttggtaaagatggcgccagcataatggtacaaaccttccacggattagcattgagccttacgggataccagattgagcggaaagataatgacgaaatcgattttgataacctgctctggaaagcaatagctttactcaaaggcgatgaaacgcagctcgggttagaagttgaagaacaacgtgaatacctcctcggcgggcttgagtatttactagtggatgaatatcaggatattgatgagccacagtatcagctgattgccgcgctggcaggtaaaaatgaaagtgaagatgatgctcgtcttaatctcatggcggtgggtgatgacgatcaatctatttatggtttccgtgatgccagcgtgcgatttattcgtttgtttgaaagcgattactccgcccgtactcattttttaacgtggaattaccactctacggccaatattattgcatgttcaaattatcttatcagtcataatcaggggagaatgaaatgcgagcatccgatcgtaatcgatcgcgctcgccagatgcttccgccaggcggagagtggagcgcacttgaaccttcggaaggcaaagttgttatccagcattgtaccggcgcggctcagcaggcggcagaagtcgtgcgccaaattcagtatattcaacggctgcagccggaatgccctcttgagaaaattgcggttattgcacgcaatgggctcgacaaaaaggagcttatttgggtccgttcagcccttgcggatgcaggtattccttgccgctttgcgctggagaaagattatggtttccccattcgccactgtcgggagatcgccaattatctgctatggctacgagaaagagcgctcgagtcgctgacgccagcagagctgtgtcagcaactaccggggcgagaccaggcgaaccgttggcacgatattatttatgaattaattgagcaatgggagctaagccagggaggcgagccattacctgccgcttattttgaacatttcatactggaatatttacatgcccagcacagccaggttcgctttggcctgggggttttgctgagcaccgtacatggcgtaaaaggtgaagagtttgagcatgtcattatattagatggaggttggcgtagttcgcactctctgcaacctgaaaataacgaagaagaacgaaggctcttttatgttggcatgacgcgagcgatatcccgacttgttattatgcatgatgatcgtgcgccaaatccctatatcgaacagttagatccagcggtcatcagccatactgctgcacaagccgttgcgcctgggatcttacgtcgtttctcgatcatcggattgcgccagctctatatcagttttgcaggtggacatccggctggtcatcccattcattcgttacttaccgatatgcaggttggggatagcgtccaactggtctctgtcgggaataccatcaaggtgaatgctaatcaatcggcaattgcgcagctttcaagtgccggaaagagccagtggcaattttctctttccgggatccgcaaaattgaagtgcttgccatgctacagcgcagcaaaacactaacagcagaggattatcaagttgcggtgaaagtggacaattggtatgtaccgatattattggttgaaacccgtgaagaagccgcttatgacaatattacttga

SEQ ID NO: 192752 - DNA, 576 bp, Klebsiella oxytoca
atgatttttggttatgctcgcgtttcaacaaaggatcagaaccttgagcgtcagttggcagtactggaacctgtttgtgacaaaattgttacggaaaaggaatcaggaaaatccaccagcgaaagaccagaattattaaacctgctttctcacctccgcgagggcgacacactcgttactcattcaattgatcgcctcgcacgtaatacccgcgatttgttagagatgattgacaacctcgttgatcgtgggatcactgttcaattcctcgcaaactcgatgagcttcgacaactccccacaatcccgcctgatcctaactatgatgggggctgttgctgagtttgaaagaggtatgatcgcatcacgccgcaacgaggggattgcccttgctaaagaggctaagaagtacaagggtaagcaaaagaacaaggaattacacagcaaaatcattgatatgcttcaagccgggaagaacacgccggatgagatcgcaaagttgtgtgattgcggcagggctacagtatttcgcgtgaagaaagaaatgcttgccagtactggcagtattgagaactga

SEQ ID NO: 192753 - DNA, 678 bp, Klebsiella oxytoca
atgaaaaaaatgtttttttggtttttatctttaaatccggtagaaagggaaattcaagatcctaaaataaaattacttaacagtatgcgtgtgacatcaagatgtcgcttcaatagggctgagtcgttaaaaaatattagtttctattctttttttacaactacaatcctatcccttgggttgatttttattcctttattccaaataacaggcagggagatgcattatagctccaatgctttaactgtaattcaaatattcttagctgtttcagttcttgtttattctgtggttattgcaacttcaaaatatgaactaagggcagcattacttgatgaatgtggtgttaaaataaaagagcttatcaggaggcttagagcagaaatttttgaacctgaatcggaggtggctgtggttgatttaaacaagtaccacaagatgtataataaggttacttgtagctgtgaaaatcacaagcgggtcgactatctctttgcaactttagaatcccgtaatgattttaatataactggaattgttaggctttggaaatttgttaaaggttatgctattagatttttcccatatatcattccaacgtttttgattgtatgcgaagtacttttcatttcagatattatgggaatgacaagtatttttacatcatattttaattag

SEQ ID NO: 192754 - DNA, 876 bp, Klebsiella oxytoca
atgtttgataatttatcattgaatcagaaagagatacttttcctgcttataaaattttatacgctccctcaagataattaccttaagtcaaagtatggtaatgctgattttaatatttcgaaaaattatttcaatgaaaatgttgagcgtttcttgaacaaaaaaataggcattgatagagtttacaattcattgtttaatattggaagttcatatctgagctttagatatatgataggtaattatccaaatgctttccagaatgctgatgatgaaaaaaaagcctttattgctttcaatgagccttttgtaaatagtgtcatactgaattttaatatcttttatgaactcattaagtttaatatgaaagatatatctatgtcaccagaatttaaatctgactttggttatattaatagtctatgtaatcggataaaggattctgggattatttctattagagatcgttgggtcgcacatccttttaaagataaaagtagagggatactttttaatccacaagaaatacataaggaggtttttaaagcatttaatattctatgcgttgatgaagatagaaaagaatataacaattgcactaacgatagattggcgtggttttgtcaaaagtatatagttcatggtattgaacattatcctagcatacctgaagcagtacatagtgttttaaaaggggaaaaaccacctatacatcgaatttctactaaacccagtgaatttcttatagaaatgaataaattttcatctttacttagagaaaaaaaactgtttgggattgaaccattctttcatccatccgaagaagatattgagaatgttaaggctaatggattatcaaaagagcttaatatttga

SEQ ID NO: 192755 - DNA, 357 bp, Klebsiella oxytoca
atgaaaaaaacttctatcgcagctatgctattttttgtttctgtctcttcaatagcggcagtaccagacggaaaaatagaaaaaccctttattgttggcaatgaagttatttgtttgaaagaaatccagaagcaaattaccccttatctcaagtcatttgaagaagaaaacggggttaagtacaaatacaatgttaaatctggtttatcgtacaaggatactgtagggctacggctacagatcaaccgtgttgattcaggtctgaatgttcgagttgccgatttggattactactggttacaggagcgtggcagcatgtgccaacccacatatatggtactggatcgttctcaatga

SEQ ID NO: 192756 - DNA, 777 bp, Klebsiella oxytoca
gtgagagttgtacaactgataatctatggactttggggagtctttctttgtctggcggcactggaaaagtttggtgatttcttcgccgctggtactggcttctggtcggtcgtaatgctttccgtcgctggattgtgccagctactggcaagtgctgccgcgatcagctgggctgttttgggttccagtacgcttaaagcgaagtacttaccttataaactcgttaataattatacggttcctgtactgatcattgtgcttgctgttgtggcgagtattgccagatcctcaagcgatgaagcgagagcacaaaaacttggatttaaagacggtagagatttttctcacgcccgtgaaaataacattaccaatgctactgattacgcaaagtatttggcagagcagaaatctaaagctgaagccaaagccgctcaggatgcagctcttgcagcagagaaagaccaaaaggcaaaagaacaagagattgaatgcatgcgtagtgataatcctgaatgctatatatcgaaacatgaacgaggagattatgtatgtgaaaaagctgtcgaggattctgctaagtacgaatttaagtggactgatggaattacagaaccaaaattttcctctctaagttggtacgataaaaacaggagattagttactctttacgggcatcgagcacaggctcaaaacggtttcggtgcgtttaaaaatatacaatactcctgcacatacaatgctgatactggtgaagtattaagtactgaccttcaataa

SEQ ID NO: 192757 - DNA, 477 bp, Klebsiella oxytoca
atgtcaggaaagcaacaaaaaacggacaattcacaatttttgaaaattgcgggaaactttagaaagtatagtgatcttacacaagatgggaaaaacattgtacaggaagtaataagtaaatgtgcgggtgcaaagaaataccctgcaaagaaagtatattatgtactatataactgtactgaaatcagtagggacagaattatgttttggctacaacgttactatgccgaacataaggacgaagcattaccgaatgataataccgcccgtaaatttttgacaatggctaaacaattatcaaaggaactggtagacgcacataacaaaggcgtgaaaatatacaaggcggcacaggatggtatgtactaccttacaccagtacagaagtatgaaatcgataagatgtacaacaatgggttatcagcacaggaaataatcattgcattacagaaaatcattgatgattccgcgaactaa

SEQ ID NO: 192758 - DNA, 1800 bp, Klebsiella oxytoca
atgagtaaaataataccatatgcctaccttcgcgtatccagcgtcgagcaagtgcgtagtggtaaaggcctcgaaactcaagatgaggaagtacgccgctacattaccgaacgcagtgacaaatttgatattgatagaatggtaacgatgagtgatgcaggtatgtcggcatattctgggattcatcttaaagaaggagagttaggccggtttcttgccgatgttgaaatgggtaatgtaccttctggtagtgcattagtttgttttagtattgaccgcctatctcgccaaaatccgtggattggtactaaattgatatctaccctcattggtgcaggtatcgagattcatagcgttgcagaaaatcaggtactcaagagtgatgatcctgtaggggcaatcatgagtactatctatctgatgcgggctaacaatgagtctgtaattaaatctgaacgtgcaaagcatggttatacaaaacgcctcaatgaatcgattgcaaataagaaggtattaacccgccagatgccacgttggttgtatgataacgatggcaagtatgcaatcgatcccaacatgcaaaaggtaatcgattttacttttgatagttatattgcaggtcagagtactggatatattgcaaaaaaactaaatgatatgggattgaagtatggttatacaagttggcgaggttcatacgttgcaaaactgatccgcgatgagcgtttgataggtaaacacattcgttacagtaagcagattaaaggtgtgaagcgtgaaataatagagacgatacccgatttctatccagttacgattgacacggataagtttcatattgcaaacaatatgcttacgagtgtagctaaaaatatcagaggccgcacacgtataacatatggtgatacatccattctaaggaatctattcaatggtgttatcaaatgtggcgtttgtagcggcgagacgtcagtagttcaaaacaccaggaagaaaataatcaatggagtagttacatacgttccatataaaacgtttttacgttgtagaaataggtatgagttaaaaacatgtacgcaaggtgacatacgatatgaagtgattgagcgtgcgatactaaatcatttgatgggattagatattgctactttattagctgctccagttgataacaagattgaacgctatcgcactgaattagaattatgcaaggcagaagaagcagaattacaagctataatcaaagaacgtgaaaatgaaggtaaacgtccacgtcctcaaacgttaaaatcatatgaggatgtttctgatcgcatagatgaattgactcaactgattgaatcacatgtggaggataattttattccacattttaatgtggatttggatcatattacagatgtgagtaatgtttctgagcgtagtttgattaaaaaaagcattgctactattgcagataatatttgttataaacgcattagtgatttcatacttgttgagattaaatatcgtaacttaaatgacaagcatgtattagtgatagacaataaaaattcagaaatggttgttaatttttctatagaatacaatgaagaaaacaaggtgtacatatgtaattctttcgtcatggagtatgataatttatcatgtgaatttacagtatcaaaaacaacgatggaagattatgcacatatgatgaattttgttgattatgtatcagatgacgaatcatataacgctaaagagtttcttgtgaataattttactaatattaaattcattgccaaaagcaatgagtga

SEQ ID NO: 192759 - DNA, 2550 bp, Klebsiella oxytoca
atgaaaaataatcataaaaaatggcggcttaaccggatagccggagctctggccgttgcgctgttaccgctgtgtgacgaggtcctggcgcgggatgttttcaacccggccctgttggaaatggatggacctcagatgggcatcagggatttatcagcctatgagcaggtcggaggccagcagccgggcagctatcgggtggatatttaccttaataacgtttttatggatacccgcgatgtgacttttcagcagggggaaggcgccgggaaaacggaactgcagccgtgcctgaaggttgaagagcttgcggaatggggcgtgcgcgtctcccggtttccagacctggggcgtaagtcagcaaactgtgcggatatgagcgtcataccgcaggcgaaagccgagtttcgtttcagccaacagcggctgttattaagcttccctcaggcggcagtgtccagcgcagcccggggctgggtcgatcctaaacagtgggatgacggggtgacggcgctgctgctgaattacgcttttagcggagccaacaactggtcgcgcaagaacgacacgccggatagcgataatcaatacgttaacctccgtcccggtattaacatcggaccgtggcgtttgcgtaactacacgacctggacccgcagcagcggcggcggcgagtcgagtaacagctgggatacggtttacacctatgcgcagcgcaatattaatgctctgcaaggggtgatgacgctgggcgacagtagcaccgacgccgacgtttttgaaggcattccctttcgcggagcgatgctggcttccgatgacgatatgctgccggaaagcctgcgcggctatgcgccggttgtgcgcgggatcgcgcggactaacgcccaggtcattattcgccagaacggctatgagatttatcagacctatgtctcccccggggcatttgaaatcaccgatatgtatccgaccgggggttctggcgatctgtcggtgactatcaaagaggccgatggcagcgagcagaacctgatcgtgccctatgcttcactccccgttctgcagcgtgaagggcgtctgaaatatagcgtaactactggggtgtatcgcgcctacgacaacagtattgacgagacgcctctctctcaggcaacggccatctacggtctgccatggggatggacgttgtacggcggcggtcagtttagtagcaaatatcagtcgctggcgttgggtatgggcaaaaacctcggcgaactgggagccgtgtcgaccgacgttacccaggcctggtcgaatcgccaggataaagataaagagagcggtcagtcggttcgtcttcgttacagcaaagatcttccgggattagggaccaacgtcagcctggcaggatatcgctatgccaccagcggttactgggatatgcaggaggtgctggatacctatcgcgatgacgcctatacgccttcagtggaacggcggcgcaaccggggagaggtgacgatcagccagagtcttggcgatgagatggggtcgctatcgctaagctatattcgcgaggactactggaacaccggtcgtaccatggagtccgtgggcgtcggttacaacaatagctggcgcggcatcagctatagcatgaactatagctacaatcgcaataccaccgatcagaacaccggtaaacgtaatgatgaagaccatctgttcgccttaagcatcagcataccgctgggcgactggctacctaatccggtctatgccaactactcccttaacagcagcaaaaatggctccacgaccaacaacctgggcctctccggtaccttgctggagcgtaacaacctgagctggagcgtacaggaaggttacaccagccagggaagaggggagagcggtagcgttaacgccgactggcgtgcgacctacgcggaactgaccggcggctacagtcatgataaatatagccaccgccttaactacgccctgcgcggcggagttctggcgcatgagaatgggctgacgctcgggcagccatttggtgaaaccctcgctttagttaaagcaccaggcgccgctggcgttggcatcaacaaccagaccggcgtcagaaccgactggcggggctatgccctggtgccttacacctcgccgtatcgtaaaaacaccttaacgcttgataccagcacgatgccggatgatgtcgaccttgagctaacgacgcaaacggtggtgccaacccgcggggcggtagtgcgcgctaattacgctaccagcgtcggtagccgggtgctgatgacggtgcgtcaggataacgggcggccggtgccttttggcgccatggtcagcattcctggagccgcgtcatctgagcaagcttttatcgttggcgatagcggccaggtctatctgaccgggctggaatctagcggcgtacttaacgtgaagtggggggccagcgcgcaagatcgctgccgggtccagtatgcgctgccgtcagggaaaagcctcaccggcattatcgtagcccaggggctatgccgttaa

SEQ ID NO: 192760 - DNA, 375 bp, Klebsiella oxytoca
atgaaacgattttcatggggattactgaccggtctggcggcgctggcgatatcgccgcagattatggcggaaacgggctggtgtcagaatacgggtaatggcggagctcctttccaggacagcttttcatttattgaaacttttactaacccttcgcaaaaccaggccggaatggcgttccctcgtctgtaccattggactaccgggggaacctatcaagcgaaatgtgattgcggtagcgatgttactggtactacgtattttcgagccactgttccgggattagtcgcgacgcaaacccgaagcggcttgaattattatcagctgaataaatatctggaaatcgccagcgagctatttattgccggcgggtga

SEQ ID NO: 192761 - DNA, 462 bp, Klebsiella oxytoca
gtgggaattggcgctaatctgccgttggcgaaggttggcaataaagttgaggtggtacgacgggccatcgccgttaaccgccccgatccgcatgatggtctggacgtgctggcaaaagtgggcggttttgatttattggggatgacgggtgtgatgctgggcgcggcctcctgcggtctgccggtggtgctcgatggcttcctctcctacgcagcggcgctggcggcgtgccgaattgcgccgcaggtgaaaccctatcttatcccgtcgcactattcggcggagaagggggcgcgtacggcgctgatgcatctcgagctggagccctatctgaatatgggaatgcgtttgggagaaggcagcggcgcggcgctggcgatgccgatcgttgaagcggcctgcgcgatgtatcacgaaatggggatgctggcggcgagcaatattgtgttgccgaagggctga

SEQ ID NO: 192762 - DNA, 222 bp, Klebsiella oxytoca
atgagcggcaaactatatgccttaagtaccggccctggcgccgccgacctgatcaccgtgcgcgcggcgcgggtgctgggcacgctggacattctctacgcgcccgccggacgtaaaggcggcgacagcctcgcgctctccatcgtgcgcgagtatatcggcgaacggaccgaagtacgctgctgccatttcccgatgagcgccgacagcgcggaaaaatag

SEQ ID NO: 192763 - DNA, 471 bp, Klebsiella oxytoca
atgaacgtgggccgccagtggggaatgggcttcctgctgcaaagcaacgataagcagccggctttcctctggcagcgcttccaggccttcttccccacggcggaagccaaactgcgggcgatgaagccggaagagtttgcgcagattcagcagacggtcatcagtcagatgctggaggcgccgcaaacgctgggcgatgaagcatcgaagctgagcaaagatttcgatcgcggtaatatgcgtttcgattcacgtgataaagtagtggctcagattaaactgctgacgccgcaaaagcttgccgacttcttccatcagacggtggtggatccgcagggcatggcaattctctcccaggtttccggtagccagaatggcaaggcggaatacgcgcatccgcaggatggcaaagtctgggagaacgtcagcgcgttgcagaaatccttacccctgatgcgagagaatgaatga

SEQ ID NO: 192764 - DNA, 1134 bp, Klebsiella oxytoca
atgaaagttgctattttgacccagcctttacatactaattatggtggtacgcttcaggcatttgctcttcaatacattctacgcgagttcgggcatgaacctgtaacaattaactatcgtaaaataaaaccggttgttaaccctgttcgactcgctctgtccaggataaagcaaaaattaatcagaggtaagattatatattctttttctgatgaggatgttacacaaatatcaaagtaccataatgaattcataagtaagaacataaaatatacaggtgctatatatagcgtagatgagttaaacaacattattctttcagagaacttcaatgctatcattgttggaagtgaccaaacatggagacctcgatactcaccacgtatcgatagtttttttctcgattttttaagtgcaaataaaaagattaagaaaatagcttatgcttcttcgtttggcacagatgactgggaattttcagaagaacagacagccaagttttccaagttattaaaagagtttcattctgtttctgtgcgtgaaaactctgctgtacaaatgtgtgtggaacattttggtgtttcaccgcaacacgttttagaccctacacttttgctcgatagaagtatctatattgagcttattaagaatgtttcctcaaaaggcagtgggaatgttttcaactatgttcttgataaaagcaaggagaaaatagagatcattcaaagcacttgcaaattacttgataaggatttatttgcaacttatcctgaatattcagaaaaagaagttcgcaagattaaagattatactgaatatacttatccgccaattgaagaatggattcgttcattctacgatgcggattttgttatcactgattctttccatggtacagtcttttctataatttttaacaagccatttatttcaataggtaatgaaagtcgcgggaaagcccggtttacttctttactcagtatgtttaaccttgaaaatagacttgtaagtcatgcaagcgaaattaatccagaattggttaatgcccctatagatttcgatatggttaattcgaaactggatgagatgagaaaacacgcaattacctttttaaaggactctttatctaagtga

SEQ ID NO: 192765 - DNA, 1329 bp, Klebsiella oxytoca
atgacgctaaaaaaaattgtagaaaacaatctttgtacaggttgtggagtatgtgtttctgaagataaaaataaagccactaagatgatttggaatgaccaagggttctatataccggatataaatgaggacactgatgctagcaatatggaaagagtttgtcctttcagtcttcaaaaagataaccatctcgatgaggatcaattagctaaagagtttttaattaacccggcgtattctgatccgcaaattggattatatactgcgctctacgctggttattcgagagagcatagagaaacctcgtcttcgggtggtttggcgacctatatttttgaacaattattaagacaaaaatatgtcgactatctttttattgtacgggaatttgaggggcgttacgcttatcaacttttcagtgacgctgataaaattaaagaaatgtcaaaaacacgttactatcctgtaactttggcttctttattcgattgccttgataatcttcatggaaaggtagctgtttccggggtggcttgctttattaaggctatacgtttaaaacaacactttactccagggttgaaagaaaaaatcccctttcttataggaataatatgtggtgggttaaaaagcaagtattatacagattttttagcccgatcttcagggtgtatggattcttataaagatgttgagtacagagttaaaaactccaaaagtgttgcattagattataagttctcatgttatggcgaacgtgatgatagaattcatgtagttgacatgcaaagtctaggagacatgtggggtactggactcttcaaatctaatgcatgcgatttttgcgatgacgttacaactgaactagctgatgtttcacttggtgatgcttggataccaccttataacaaagatggattaggtaatagcgttgtaattgctagaagtgcactggctgaaagtataattagaaaaggtattgaatcaggtgatttaaaattagatgttttggaactgtcaagattaaagtcctcgcagcagggcagttttaaccatcggcataaaggtttgctttataggattaatcgagctcaaaaaaaaggaattcctgttcccaggaagcgaaaacgatttcttcgcagacaacacttgctgcttaatataattcaatatctcagaatgaaagttagggcccaaagtcttgaaatatggacaaaggtacgtaatgtggatgattttaatgccaaaatgaaacctcatttattaattttaaaacgtgccacaagacttaatcataaattgggaagtataaaaaatattttaaaataa

SEQ ID NO: 192766 - DNA, 1539 bp, Klebsiella oxytoca
ttgagaaaagagataaccataaaaatgtctaaaaataaacttatcgttaaaaatactctttttttggcaaccaggacgattttttcgttggccatatcgttttatactaccaggattgtattacatcaacttggcgtatcagactatggcttatttagcgtaatctatggcgtcgttgcattttttgtgttcattgtgtcggctatgaatgattctgttcaacgatttatatcaataaatcttgggcttcgagatgttgatagtgtccgagatactgtgaagaatagcatcgtagtctattttttagctggtatatgtttagttagtctccttttatcggttagatcatatatcatttatgactttttaaacatagatacagcatctttagatgtagccaaaaaactctatattgtcgcattattttctatttttatatcagtgcttcagacaccttttaatgctttagtattagcaaatgaaagaatgtcgttctatgcttatatgactatctttgatgcatgttcaaaattggcagtttcttttttgattgttgttattccctatcaaaaggtggttatatattcattattgttgctgacgtcaacgtttttagttttttgtatttatcttgcttattgttacactaaatttaaagcctcttttttgggcggaaaaattaacgttgcaataattaaggaaattacagtgttttccttctggaatgtgtttggtaattttgcgtatgtatgcagaacgcaaggaatcaatgttgttataaatgttttctttgcaacagcagcaaatgcagcatatgcactatcaactactgttttaaatgcaattaattcattgactcaatctttcatcactgcgattagacctcaaatctttaaagcatacgctgaaaaaaatattgatcgatataatcttttgattaatagcggctctaagtataccttttcactcctgttcattctaagctgcccagtattgctttgtactaaacagttattatctctttggctcgttaatattcctgtttatactgttggattcgtcaggtttattattcttgttgcactaattgatagtttttcttcaagtgtaataactggtattcaggctaccgggaaaataaagaagtatcagatggttgttggtttttttgtttttattagtttgcctgtgacatatttactttatcgttcaggcgctcctatttattcagcgtttattccactaatcgcaacctcattgctgaatatgtttcttcggatttattttgtttcttctctttcaagttttaaatcagcctgcttttacaaaagcgttttgataccttgtgtcttctctgctttaatttctttgggctcagggtactatattaacatgcatgttccatatgaaggagtaattgagttgctatgctttagcgctttatattccttaatatcatttgtagctgtttttatcttcgttgttagtaaagaagagaagaaattgatagttaaatatattgggagtaagcgtaaatga

SEQ ID NO: 192767 - DNA, 840 bp, Klebsiella oxytoca
atgaaaagtatcaatattacaacaactcatagccgcctcgatttatgctctgcaaccatatggtcattaatgcatcagagtgttttacctgatacaattaatctgtgggtctctcaagagtcttatatggcagatcaaggaattcgtaacattccgaactggtattatgagttaaataacattaatgacattttgcgaattcattttgtaaaaaatattgggccgtatcgtaaaataattcctgcactgagaatagcctctgatgatgatattctaacatatgctgatgacgatgtgatctatggtcgtgagtggtatgagtctctgcttgtgtcttttaatgaacataaggctaaatatattgttgcttctagggttcgattgaaaaagataaatgtattcggtcgtttgcagagttataatatgttcaatgtttgcaatagagatataacgcttgataaccgttacatagtcactggtgttggtggctgtatgttaacgaaagcacacattagagacgatctgatattacttgatgatttcattagtgtagtgccgcgcacagatgatatttggttaagcaagattttcgaaatttctggtgcttctgtatattgctgtgcttcatctttaaagtatatccaagaaattactcactcaaataatgccctaaatcaatcaaataatgttattcctggaggagggttattaaggaaagttttatctaaaataagaaataaaatctttggttatttaggtttttcattgtcaaataatgataaagctattcgtaacacggatgctttttttgagaaaagagataaccataaaaatgtctaa

SEQ ID NO: 192768 - DNA, 930 bp, Klebsiella oxytoca
atgaaattgtcaatagttataccatgtttcaattgcagtaataatattataaatattattgatttacttgaacaacaagtaaactcttctgttgaagttctatttattaatgatggttccactgataacacagctaaaataatctcagacagtattgaaaaaagaaatttagctttttttcatctttatagctttgagaattctggtgcagccaaagctagatcaagaggtcttgaactatcaaacggagaatatgtattttttctcgattcagatgacattataagtaaagatttcataaataatatttttagttgtatacaaaaaaatccagatatgatttattttagctcaatcattgtttcttcagatgaccctgaaataaaaatatctgataaaataacttttgttaaagatgagctctactgtaattctgatgaatttatttgcatgatgttcgaaaataaaaattggacttcagctgtttggtcatatgtttttcgtcgtgaattagcagttaattctaatgcttatttcacggacagggttgctcatgaagatcatatatttactctgagactggttggacactctgagaaaattcaagtcttaaaagatatcctttacttgcagaaacgaactgctggctctttaacaacttcaaagaaaagccgtcaatatatattagaacgttttcgagcttttgaagagtcgagagatgatatgaaaaggttatattctaaaaaatcaatctccttatatgagagatggtcaatcttctctttcattcatttatgctttgaaaatataaaaattgtagtgatatggctgttacaacctaaattttactataatttatggaaatatcattcagttattttggaaatattcgcatcatcaattaacaaaaaaatcaagaggctcatatga

SEQ ID NO: 192769 - DNA, 1152 bp, Klebsiella oxytoca
atgcggaatatagatgttggaattgtagctgattggttagttacatatgctggctctgaaaaagtaattaaggaatttattgagatctatcctgaatctgaactatattctgttgtggattttttatcagataaagatcgccagttcttcaaagggaaaaaggctactacaacatatattcagcgttttcctaaagcaaaatccaaatatcaaaaatatctgcctttcatgccaatggcaattgagcaacttgatgtatctcagcatgatattattatctcaagtagccatgctgtttcgaaaggtgtcatcacaggtcctgaccaattacatatatgttatgtacattcgccaattcgctatgcttgggatttacagcaccagtatttacgggaagcgggcttagataaaggcgtgaaaggtattattgctaaatggctactgcatagaatacgactttgggattaccgtaccgcaaatggtgtggatcatttcattgctaactcacattttatcgcacgtcgaatacataaagtatatggacgtaaagctgttgtaatttatcctccggttgatgtagaacgattctccttatgtgaacaaaagcaagattattattttactgcatcaagaatggtaccttacaaaaagatggatcttattgtagaagctttcagcagcatgcctgaaaagaaattagttgtggttggtgatggatctgaaatgtcgaaaattaaagcaaaagctacgagcaatattgagattttaggctatcagcctaattctgtgatggaagaacacatgagaaatgctaaagctttcgtttttgctgcagaagaagattttgggattacccccgttgaggctcaggcgtgtggaactcctgttatcgcctttggaaagggaggggcattggaaacaatccgcccctatggcgtagaaaagcctacagggatattctttgataaacaagatgtgacttccttaaaggacgcagtatccctttttgatgcaaaaagtgaagagtttttgcctacaaattgtcgagaaaatgcccttcgtttctctattcagcgctttcaaagcgaaattaaaaattttgtagaaatcaaatgggaacaatttcaagacacaaaaaagattacatattaa

SEQ ID NO: 192770 - DNA, 456 bp, Klebsiella oxytoca
atgtctaaaacaggacatgccttcatcaaagaaagaatgaggctcgaagacgctatctatggtggtgaaatgagtgcgcatcattatttccgtgatttttactattgcgatagcggcatgatcccatggctgttagttgctgaattgctatgtgtcaaaaaattgaatctcaatgatttagtagaagaacgaatgatggcgtaccctgcttctggagaaattaacagttcattatctgatcctcagaaagctattagtaaggtacttgagaatttcgaatctgcagctctcaatattgatcatactgatggtattagtcttgagtttgatgactggcgtttcaacttaagaagttcgaatacagagcctgttgtaagacttaacgttgagtcaaaaaatgatgtgcggctaatgaaaactaaaacggatgaaatactgaatattctccgttcatag

SEQ ID NO: 192771 - DNA, 639 bp, Klebsiella oxytoca
atgtttatcgggcactcattcactcgcggagttaacacagggatgcgattaacgacgaaattctcagcctttgtcacgttactcaccagcctgactatctttgtcacgctgattggcgcttcgctgagtttttataacggtattcagataaaaatgaccaaccgcgttcaggcggtggcgacgatgctggataaccgcctggtctctatatcttttgaccagttagaaccgcagatggatgagctgatgacgccggtcgaagtcgtgcacgttgattttcagcttaatggcaaatcggtctatagccattcccgcaacgataactatcgtccgttaggcagcagcaatcagttccgtagtatcaccgtgccgtcgctcaagcacccgggcatggttatccatctggtttatctggatccgatggccaattatttccgctcgctgcacgttaccgcgccgctttccatcgccattggtttcatggtgctgattatctttttttcgtgcgctggatccgtcgtcagctggcgggccaggagctactggagcttcgctctgtgcgtattcttaacggcgaacgcggcccgcaggtgcgcgggtcggtacatgaatggccagtcaacaccagcagtgcgttag

SEQ ID NO: 192772 - DNA, 612 bp, Klebsiella oxytoca
gtgactccgactccgacagcgattcggatagcgacagcgatgccgactccgacagtgactcggattccgacagcgattctgactctgacagtgactcggactccgacagcgactctgactccgacagcgattccgactccgacagtgactcggattcggacagcgactcggactcggacagtgactcggatagcgacagcgattcggattctgacagcgactcggatagcgacagcgattctgactctgacagcgattccgattctgacagtgactcggactctgacagcgactcggactccgacagcgactcggattccgacagtgactccgactctgacagcgactcggattctgacagtgactcggactctgacagcgactcggattctgacagcgattcggactctgacagcgattctgactctgacagcgactccgactccgacagcgactcggactccgacagtgactcggattcggactctgacagcgattccgactccgacagtgactcggactccgacagcgattcggattcggacagcgatgccgattcggatagcgactcggatatcccgcaagccaacgcggataccaataccgctctga

SEQ ID NO: 192773 - DNA, 828 bp, Klebsiella oxytoca
atggcaaactcattcaaacaaatgtttaaagaaggcgtaatcaaacgtccagatggaagaatgctcattcgcctagatgatattcacatcatcgatggatttaacccacgcgattacaattcagcagaatgcaaagaagccgacgagggccttttccagcatttgatggctggcggttctgtgccagctctggaggtaaaagcactagatcccagtggggtctggattgttgaaggtcatcgccgatatcgctgctaccagcgcttgcgcgactcgggccagcccgtcgagtggatcagtatcgtccagttcaaaggtagcgacattgaagcccaggcacatgtcatgaaatcgaataaccagttggcacttagcccgctggagaaagcgacaaaccttaagcgcctggctgcatttaacttatccctgggcgaaattgcaaatctggttgggttatcagttccgaccgtcgaaaagctccttgcgcttagcgaggccgaccatgctgtacagcaaaaagtaaaaaataacgaagtatcagttgatgtcgccctaagccgtatcgaagagtttggaggccgcgccgccgaagtgcttgagcaggataaagccgtagccgctgcggcaggaaggaagaaagtcacacgtagcgttatagctccagaaataagtgtaaagaaagcccgccgcttggttgagcttatcactcttgcaggaatcgacgagagcggcactatttcgctttcaggcgagctattaaacgaagtgcaggaaatcatcactgaacagcgcgatatagaagcacagcgcagcagggccgcagcatga

SEQ ID NO: 192774 - DNA, 699 bp, Klebsiella oxytoca
atggaaagaaaattcatggtttatcagcgccgcgacggttttcaaattgcagaagaagctaccggtactcgcctcgaaaatggtatggaatttctggctcgcccgcacaaatcagctttatggtgtacagcagaatttaacattgtcatcgatgacgattacgagctggtaggcgaagaattcgttaattgttcccgcctgcctacacgggttctctgttttgttgatggcgtgatgaagattttcgaccagtcgcgcattgccatagagaacatgattgaagagttcaatgacgcaatcagcgaccgagatctgattgtggcccgccagttgaaggctgacattaatgcagcaatcgaacagtgccacgctgatgcgctggaaacaaatacattcatcgactacgcgacaaaaaatcgtgcattccgcgcctactggttgaaatcaaaatcaggtaactcagctacggatgtggaagcatgggatgctatgtacgcggaagctatggcaataaatgctgagatgaattccaatcagcaacaccagaagctggtagccagcgacatctggcaaaccagaggacgtggaaacaacgaccaggaatatcagatataccgttcatgcgccgacgatgggaaaggcaacgagtttatgactggcaaacccctcaaaacatatgagcaatggctcaggagttaa

SEQ ID NO: 192775 - DNA, 234 bp, Klebsiella oxytoca
atgcttacaaaggatgcattgggttacttcggtagtaaaagcaaattagccagcgctgctggagtaaaaatccaatcaatttataactggggagaactagttccagaggctcgggcgtcaagattacagattgcttcaggcggtgagcttgtctatgactccgctgtatacgacgcacatgctaaagcaaagcacgcaaagggactgaatcatgaaaatcaccccaacgattga

SEQ ID NO: 192776 - DNA, 597 bp, Klebsiella oxytoca
atggcgcagattatacaactctttaaatcttcacccaccaccctgaccacggctacgcccgaggccagcgattttttgcaacgtatcaaaatcggcgtgtggcttaactgcgacgttaagcaagccagaaactacctcttccataagcgcttcttcgctctgctcaatcttgggttcgaatactggacaccaaccggaggggcgatctcagctgtagaaaaagaatatcttcatggttacgtccgattcctcatttccctggttggtaatgaagacacactgatggacagtgagcagtattatcacgaacgtcagggtagatggcgtaccaaagaagttgctatcaccaaatccttcgaggctttcaggaaatgggcaatcgtagaagctggcttttacgacgagtacattctccccggcaatatccgccgccgagaggcgaaatcaatttccttcgccaacatgagcgaggccgaattcttccaggtttacaaggctgtttttaacgtcttgtggaacaacattctttttgaaaaattccgtaattatcaggaagccgacagcgtggcgatgcagtttctggagttcgccgcatga

SEQ ID NO: 192777 - DNA, 300 bp, Klebsiella oxytoca
atgaagagaaaaccagacctccgcaaagctgcacgcgggcgcgaatgcacagttcgcatccctggcatctgcaaccacgatccagaaacctcatgcctggcacattaccggctcgcgggtacgtgtggtaccggatgcaaacctgacgatgaacaaggtgctatttcttgcaacgcctgtcatgacgtgatcgacggtcgcgtaaaaaccaaagaatacacctacgaggaacttcggcttatgcacgctgaaggaattcttctcacacaaaaaatctggcgggatgaggggttacgatga

SEQ ID NO: 192778 - DNA, 690 bp, Klebsiella oxytoca
atgaacgcgcagcaactggaatatgtccgcatacaactacgcgctgcactggttgatgactcaggtggcactaaagggcaactggaggcgttcgcagagcatccaccagcagaaaagaatctgaacccacgcaaaatgattcacgttgttgaactcgataatgggcgtggcggtgttcgtagagtaaaagctgaaaatagcgcgctctacgtcctcgaaacgcgcagccgccgccgcccaatgcctccaatgaaagatggggctttctcatcgtgtgaatggcgtagagccgttctgttactacctaaacagcaacaggcgtggattcgatactgttacggatttgatttgaaatattcccttcaggtaactatctgcgaatatgtctggaatagctttcaggattaccatgtcaaaagacctctccagtcacgcatcataaaagacatgatcaggctggtctggatctctgtgcaagatgtagcggccaagagaaaaaacgagacttacaaagaatacgcgggtagtgcgctggcaaatatgattaatgtttcaagacaaacgtggagcaagtccagggctaaaaaatgggaaaatttaaaactggtttcagaacgacttgatgaagcggcaataaaagctgtctgggaaaattacaggtcgctcatgcttgatgacacccaagactga

SEQ ID NO: 192779 - DNA, 1182 bp, Klebsiella oxytoca
atggaagcaaatgttttgatttgtcccgcctgcgggagagaaaaccgtaaagaagatggtgtctgtgagtgcggttatgatgaggagctggagcagggagtagttacatttgctcctcagaacgccctgacagcaactctaactgtagtgcctggagaagcgggaccagtctttgaggctgtgacaggtaatccttggacgcttgatgttgatgatgtaaaggctttcattacacagattgaacgaaagttcaaacttaagcgtaaaaaccacagttacattgctgaaaatagacttccttttagtactgcctctcttttaaatagatacaataaaggagaaattgagtttcctcaattggtagagtcctttatgggtaaccttaaaaatgaggctactttaaataaaagaagaccggcaggtggttctgttatttttattcattaccataaagataatgaacatgatagcttgggcagaatgtttgttatcatggttgataacaacagcgtcttcaacttcgataaagatttagtgcctcaaaaattaccttcaatagatatagatgcattaaggcaggctgctcttattgatctgactctttttgatacactttatcctgaaagaaatggtgaaccttatgtccagtttataactggcaaatcaagcagtaatttcttcaagattgctttaggatgcactgacgaattagataataataaaagcatcgaagaggtgagggttgcacttactgatttttccaaacatttaaagcttccgaccagtgcaagggttaaactcttggagtctttctctcagttaatgaccgataagaataaaagcgtcaccaataaaacaatcactctaaaggagttagagcaggttgtagataaaatcttgccagaagactcaaagggtaaaggtaaatttgagcagtttgctttgctgggtgattataaaattaacgaatttttcgagcctagcagagtttcttcaggtcaatttgagaaggttacactgaaagataccgaaaatgattacacatgtaatatctcggtcggaattattagtgatgatgtgaattcaggctcgaaagttatttatgataagcaggaagaacgtcttattattcgtttgtctgaagctgataaagcaaaaatgaacggtgtgtttggttcatga

SEQ ID NO: 192780 - DNA, 1149 bp, Klebsiella oxytoca
atgtctaagaaaagtgatttttcattttttgttgatatgttcttttcaggttcatatgaattgcaggatggcgtggtgtcttatgacatcactgatttgccaattccagtttctgatcttgttgatatgcttaaggaaaatggccttaagtctcaaattcatactaatgtgaatgaaatagctttctcagtctcaagcggttcactatcttcaacatctacgatttttcctcgcctcgatgatctttggagaatagtcacttcaggaaataagattccggaagaatttttaataataaatgaaaaaatagcttctacaaaacaatctgatgtaatagaaaaaataaaattatatcttaagtggagggctgtaatattatctttgtcagtacatgatattcccaaaaaagctatttggtatcttcctgatgaaaatggtggaaaagagatagttattacaattcctgagtctcttagcagagttaaggagtatgaagttgatctgaaatctcttgaaagtgcagtaaagctagagaatgttcttttacttgatgatgcacagtcaagtgaaagagtgtccattcttaagaaagctatcagtgattttattggtgttggctcttcatttgaaaatataatatttgcgggtgagcgagtcttaaatagatataacgatcttttggatttatatactaaaaggttttctgttgataaaattttaaatgaaatagagtcgaagaatctagagtacactacaaaaataaatgattatatctctacgagtcaatcaaaggcatttacaatacctggtgcattaattgcagttggggcgttggtaaaagttggcgggtttcttgagggtctcctaattttgattggtttgtatatgattttctttattgcgaaaacagcgaatgatgctcaaagagagtcatatgaaaatttagagagaggcttaactgaatcatttgaaagatatcatcaattcgacgaaggcacagaagtaagaaaggctgcaaagaatacactccgagcacttcatgacaagattagtaaggcgactgaaaggcttgatgatatagacagcctgggtagatggatggtttggctggctttgatttacatgcttcttcaatggttgttcagctag

SEQ ID NO: 192781 - DNA, 246 bp, Klebsiella oxytoca
atgctgccgctgcaaatgaaagccttacccgaatttgaagtgggggattttatctttattccgggcataaaatccgccttagacagcgagctgggtcatattaccgcgtttgtcattagccgcgagcgccccataaaagagatcgcgctttacatggagggcctgacctcatcagagcgggagattattaaggcaggaagcctgattaattataataaatcacgcttaacttcccaccatcagtaa

SEQ ID NO: 192782 - DNA, 753 bp, Klebsiella oxytoca
atggatgtatcttcggctcaaataggtacaaccggaggatatacacgctatgcaggattttttaaaagttctttgcaagcatcatcaaacgtattcatagtattactatatatagtggcatctacaaaaaataagctactaatactaatatgttttcttttgagtctcttagtatcactggtaactatatcaaaaacaacctttgcattacatttaattcttttattatacgtatttgttaaagctttaccggtgaagttgctttggcgaggtaccctcattgtgggtatacttatttcagtttttactattctatcaactaattattcgtttgagatgagtgatgatccaattagtatcatgttgttaggttcattaaatgcccgtctcacaactacttggcctgatggtgtcaacgcaataatgaatagtggaaatctaatattcggtggtggtttaggtaccattggtgtaggttcgaagttaggtatgggtgaatacaatcccggtgacagtatgtatttatacattattggtactggtggatatatcttggcattgctattattattttgggcaaattatcaagcgattgtactggataactcacctatatcgagatttatatctatgactctgatagttctatgcctttttggtatttctatgactactcctgaatatccattgatgggctttgcattaggaatggtattcaacgctagagtctattataaacttaaagagaattaa

SEQ ID NO: 192783 - DNA, 990 bp, Klebsiella oxytoca
atgtcaagaacaaataaaattatctttgattcacgatggataggtgaacatggtataggacgcttcgctaatgaaatctatgataggctaccgggtttaaccaaaataattttaaaatctaagcccagcaatccttttgatgttttacaaataacatggtatctcttcaggcataaggggctatatttttctcctggatataatgctcctttattatttctaaatcgttgcattatcactattcatgatctaaatcatatagacactgagcataatactaacattttaaaaaaaatctattatgaaattgtacttaaaagggcatgtagaagagctcttaagatctttactgtatctgaattttcaaaaggccgaatctgtgattgggcaaaagtagattcttcaaaagttattgttgtgggtaatggtgtatcaaaagagtttagttataatgcaagccgttattcaggtaaatatttcttagtcgtaggaaatagaaaaaaacataaaaatgaaatacttgctctggaagccttctttcatgcaaatttaccggatgatgtgaatatattattcacaggtaacgaatcggaagatctagtaaaagcagtcaacagattgggacttacaaaaaaagttaaatttttaggcaagcttgataataatagccttgcttctctttacaaaggagcaatagctttattatttccctctctatatgagggttttggtttgcctgtaatagaatctatggcttgcggtactcctgtcatcacatctaattcaacatctttaccagaagtttctggtgatgctgcattattagtagatccgttagatgtcaatgatattagtgctgcaattaaaagtatttattatgatgtagaattaagggaaagactcattcaaaaaggatataaacaagtttctaactattcatgggaaagaactgtaatgattatagataatgagttaaagaaactcctttaa

SEQ ID NO: 192784 - DNA, 1035 bp, Klebsiella oxytoca
atgagtgatactgtatataaatttatttattactgtgcgcttctctgcattagcagtttctcaatagcagtttctgcattagagctaggagttggaactcattttcaatcatacaaggaagctccaactgtatatattgaattgcttaagaactatgggtttacttcttttagagatgactatccttggagcaaggttgagttacaacccaacaattatcaagcatcaaaatatgtaaaaaatgtagattatgcttttttaaatgcaaaaaagaatgggttaagtccaatattgatattggattatggtaataagtttcataatgatggtggttatccgagtacagataaagaaatattagccttttcaaaatatgcatcctggactgcccaaagatttaaagggagtgttaaatattacgaaatatggaatgaatggacaatcggtaccggaatggtgaagtttagaaaagctatcccatcagcacaagtctattataagttagttaagagtgtaagtgaggcaatccataaagttgacccaaatgcaataattatcgctgggtcattaaatccattagatcggcgcgcgagatttatcgataaaaatgactggcaatggttcgatgaattagtgcagcttggaattatgaattatattgatggtgtctcattacatacttacgccttcatgaacggaaataaagctcttagaacctccgaaggtaatttagaatttattgactactttcatcattatttttcgaaaaaagccgggaaagatatcaatatatatataacagagaccggggttactaattataatggtcctggtgggatgagtttaacagattcagcaaattatattaaaaattacacaaaaggtgtaaaaatgagaccttatataaaagggttatggtggtatgaccttgtcaatgatggatctgatattaacaataaagaacataactttggcttttttatgcaagatttaacacccaagcaagcagcatatgaaataaagagtttgagatag

SEQ ID NO: 192785 - DNA, 1422 bp, Klebsiella oxytoca
atgattattcctgtaattatggctggggggacaggaagtcgtttatggcctatgtcgagagaacagtatccgaaacagttcctacgtttaacaggcgaaaattcgatgctgcaggaaacaatcttacgattacaggggctagacattgcaccgcctttgctcatctgtaatgagcagcatagatttcttgcagcagaacaattgcggcaacttgcactgttctcaaagaatattatccttgagccctttgggcgaaatacagctcctgcagtagctctggcggcgttgagtgctataaatactggcgatgaagatcccatacttctcgtattggctgctgatcatgttattgaagatattgattccttccataaggccgtaaaaaatgctgtatcacatgcagaggacggcagactagttacatttggcattgtagctaagtttccagagacagggtatggatacattcaacgtggagaatatactgaaaatgacagtttagcctttaaagttaaaaggtttgtagaaaagcctgattctattacagctcaaaaatatattgaaagcggtgaatattactggaatagtgggatgtttttattcaaagcgaagaaatacctaagggaattggaaaaatataggccagatatattcagctcctgtcagagcgctatttctggctttaaacatgattcaatacaagattttatcagggtcgacactgacactttttcatgttgtcccgatgaatctatcgattatgctgtaatggaaaatacagaagatgctatcgttattccgttagatgcaggctggaatgatgtcggctcttggtcagcattatgggatgttaaccaacgtgataataatggtaatgccctgaatggtgatgttttcgtacatgacagctctaattgttatataaatacagatgatactctcgttgcggcaattggggttgataatttagttattgttaatactaaagatgctgtcttggttattaaaaagtctaaagtacaagatgtgaagaaagttgtagaacacttaaaaatgcagtctcgcactgaatataggaaacatcgcgagtcttatcgtccctggggacgccacgataaaatcgttgaaaagccaagatatcatgtaaatcgagttacagttaagcctggaggcaaattttctttacaaaaacatcttcatagggctgagcattgggttgtactttctggcacagcagaagtcacattggaagataaagttttcctgcttactgaaaatcaatcgacattcatacctgttggtgcaacccatatgctggttaatcctggaaaaatccctcttgaattgctagaaattgagtcaggctcatatcttgctgaagatgacataattcgaattaaagatcattacggccatttttaa

SEQ ID NO: 192786 - DNA, 873 bp, Klebsiella oxytoca
atggcacaaaatttgaaatgttttaaagcttatgatattcgtgggaaacttggtgacgagttagatgaagatattgcctatcgtataggtcgcgcctatggagagtttctaaaacctaaaacaatggttgttggcggggatgtacgcctgaccagtgaatctttaaaaaatgcacttgcaagtggtttaagagattctggtactaatgttattgacattggcctggctggtactgaagaaatttattttgcgacctcttttctaaacgtagatggtggtgtggaggtcacagctagccataatccaatggattataacggaatgaagctggttcgtgagaattccaaaccaattagtggtgatactggcttacatgaaattaaggctttagctgaaagtaatcattttagaaaagtagatgaatctttgagaggaacttatgagaaggtctccattttaaatgattacgttgataagcttttgagttttattgatttcaataattttaacagacctctgcgtttagtagttaattcgggtaatggggcagccggtcatgttattgatgctattgagaagcggtttaaagcggctaatctcgatatcgaatttgtaaaagtgcatcatactcctgatggcaattttcctaatggaataccgaaccccttactaccggaatgtcggcaggatacgaccgatgcagtattatctgcaaatgccgacatgggtattgcatttgatggtgatttcgatagatgctttctttttgataataaaggaaattttatagaaggctactatatagttgggctgttggctgctgcttttcttgaaaaaaatcatggtgctaaaataatccatgaccctaaatag

SEQ ID NO: 192787 - DNA, 396 bp, Klebsiella oxytoca
atggcaaagcatctaacaaaaaaagatataagtagaattataatcactatccagaaatggaatggcaagttaacatgggatttattatgtgaatcagtaaaatcccatattggaaagaaacccacacgacagtcattgagtatgcaccaagagatagttaatgcatatttgttgaaaaaggaaaggctaaaaattgataataaacctcttaaaaaacctgctaacctgaggatcgccgcgcaaaggataaaaaatctggaagcggaaaacgaagttctgaagaagcaaaataccagatataaagagcagtttacattgtggcaatacaattcatataaatatggacttaaaccataccagttaaatgagccattacgtctaaaaaacgacaattaa

SEQ ID NO: 192788 - DNA, 1881 bp, Klebsiella oxytoca
atgagtaatattattatttttaaagcaagctctgaattagatgcaagccaaaatgctcaagattttatagcattctgtcgcaataaattaactgtttatgatggtgttatagactggaactccagtgtatggaaaggcattgcagtttttagaaaattgaaaacaggatgcgacttagtgggcagtgagaatagtttagatagtggttttattgattttgctaaaagctatataagatacaatcaggcgttgaatccagtaaaaaatcatgggtgcaaaatgatggctttaagatgccttgagaaagctcttttgcagacatgtaataatgctaatatctataatacttctgttatagctctggatgaggctttacagatagccaggaagtattatgagaatgacgttcttcataggtgtggttatgagcttgaaaagttggctcattttttatctgaaaacaattttgtaaagtgtggatttattagctggagcaatccggttaaactccataccaaaaaaaattatcttcctgagaaagaagatgaagacagaaaaagtaaattaccggatgagagagctttgctcgctattgctgaaattttttcccgaccggatgaggaactcagtgagagagacttgtttacaacgtctacttttgcgctactgatgtgctcaccaagtcgtatctctgaaattttggctttacctgctgactgtgaaataacaagaaaagacagtcatggtgttgaatgctacgggcttcgtttttacgctgtaaaaggtggtggagcgactatcaaatggataccagatgtgatggttccagtagcaaaaaaagcagttagcagacttcgcagattgtcagaaaatgcccgctctcttgctcgatggtatgaatgctcacctaataaattttacagacacccactttgtcctaaagtgaatgaggatgaaccactcgatgctattcaggtatgccaggctcttggttatctacttagtgataagaagcaatgcattgaaaaactgaagcgcacgagtctcgatgggggcatttcatttcttaacccgacagacgggaattatacgctgagaacattatggaaaatgatcgttagcttattccctgcggatttcccctggttcgatgaagagaaattagtgaaatacagtaatgcgttgtgtctgttgaatcttcatcaatgcaatgagcagaaaatgacggttcattacgttttatacagaccaacctatgacttctttacgcaggatatagagatggtgagaaaaagcgggctggcaatgaaaaatatctttgcccgttacgactatctggatgattcaggcaaagcccaatatctgcgttctcatcagccaaggcatttgctaaacacacttgctcatctcggtgaattatctgagttagatatcgcaaaatggtcgggtagagtcagcgtgatacaaaaccgagactacaaccatgtttctcaggaagatatgttgaagaaagttcgtcgtttgaagtttgaaaataatcgttattgctctccaatatcaattaactcaactttaccagcgagtatggatgagtttattaaccttaaacatggtgcgcttcaattaacgtcaaagggatattgtgtccatgactatgtaatcccgccctgccgaaggttagtagaaaataaacaacatggatgggaagtatattttgaaatgagtacgcagaagaaaaaaataattatcgaaaaaattacagttctacatcagatggcacaaaaagcagtgaatgatggtttctatggagcagataagtgggtttcctatcatgaggaagtgttatcagccttagatagaaaattagaaaattcaaagtaa

SEQ ID NO: 192789 - DNA, 945 bp, Klebsiella oxytoca
atgaataagaaagaatttaattctgaaagattaagcatacaggcaaaacaacgcggatactatgttaacatctatgatgataagtggaagttagataacaataataatattaatgttggtacagtgtctcgaattattaacccagaacttattgatggttatctgaatacactttctttttatgccaaaaattatagttcagcttatgtacgtaaaattaatggtattatgaaggactttctcaaaaaaacggcatctacttttatttctgaatcggatattttgaattacaggtcgctacttacagaggttaatatacaaaggttaattctgttaaggtgtttctttaagaagtggcattcattagggtattacggcattgatgataatgctataactctgatggaagcaatgagattaaaggcaaagtcagcaggaactattgttaaacaagaagatccagagaaagggccattaactaataatgaacataaagcattaaacgagtccatgtttaacgcttataaaaataaaaagataactttacaggaattatcatcagcgctattagtgagttttacaggacgtagagcattacagattgtagcattaaagtttaaagatatagttagagaaaaaaattctgatgggaatgatttattctttataaatgtccccaggattaagcaaggaaaagaattcagaaaggagttcagaatgctgagtattgatggttttatttataagctattgatgcagcaggtaaatttttctatatctcttattgaaggacatattggcagaactcttttttctgaagaaaaaaatgaggtggctgtttttcttgataagaaaaattataagatgctaaatgaaattaatggcttctatgacgttttggtttctgacagacttcatgcatcaaaaaataccgttagcttatga

SEQ ID NO: 192790 - DNA, 1212 bp, Klebsiella oxytoca
atgaaaaaatacagcgttaattcttttgtttttgaaagtggagaaaggttttgccatgtaatagataaattatcaggagagccagtttactatccaaatctttatatattaactcaggttagaaatcgttcaaactctattaacaccatgctctctattgcaggcattctggttctcttgcatagatggttttctgctaatgatattgatatagaagaaagagttcttaaactcagatttttgaactgtaatgaaatagattccttgtgtgattatatgtcgatgaactttaaaattaagaagataaaccctgctcacaaaatgatttgcactgagaatccaacaaagtattttagattaagtgtcgtctgcgattacttggaatggttttgtcagattcatttatctcaatcaaatgggaaaggaactcgaagcaaaatagataaattcatcagagaattgaaaagtaaaaaaccattgaaaaaagatagatataaaaaagagatatctgataaggccctaagccgaaaacagctcgatctactattctccattattaaacctggttcagaacttaatccctttactgatttagttcaggctcgaaatcgattgatgatattgatgcttttttcatttggtgtcagggcaggagagcttttaaatctcagggtaagcgatatcgatttttttggatctacgatttcaataaaacgaagagctaatgataagtccgatccaagaagaaaccagcctctggtgaaaacgggtgaaagaataattccagttggagaagctttgatgggggaaatctataattatataacgatggatagaaatagaataaataagtcccaaaaaaatgactttgtatttattacgtataaagccggtgatactaatggaatgccactatcaatttcggcttaccacaagattattgatctcataagcaagtctcatcctgagttatctgagttatgtggacatcaactgagacatacatggaattatgagttctccatgaatatggatgaaattaatgaaggcgtctctcaggaaagggaggaacaaattagatcttacctgatgggatggagtattgggtcggggacagcaagaatatataacagaagacatattataaaagaagctcataagacttctcttataatgcagcaagggttgatgagaggttgtttttatgaataa

SEQ ID NO: 192791 - DNA, 378 bp, Klebsiella oxytoca
atgggttttttagtcaatcagcccggcgccgtggccgccgcgcgccgccttggcctgacgaccaccggcggtggattgacctggttactggacacgcattatggcggaaagggcgtggcttccggagtaggaatacggatttacgatcagggcggtgcgccgcttaaccttttgccggacaaagtgagtaccgggacgggcaacgcccgtggctggtatggatataaagagctcaccgtactaacgagcaaaaaagaccgcggttcggtagaggtctggcatggtgattttaccgcctcccttgaggcgctcggtggacaaccggtaacggtagggagcgtgaatgcgcagttacaggcagtggttagttttcagtaa

SEQ ID NO: 192792 - DNA, 327 bp, Klebsiella oxytoca
atgaataaaccgggggcgatgctgacctgggcgtcaacgacggcgggaagccgtctgtatgcaaaccacagcggcccgtggggcgtcatccggatgctggagccgatggcgcggcagaaagcgggggacgggctgtaccggctgaccgtcaccgcgccggacaggcggcagctgcagtggctgctgcgcacggagctgggcgacggtccgctggcgctgctgaagctgcgcaacttcaggctgccggcgcagatattcagcgccggtgtcccggcagccggccgcacggatgaagaggaatatgacgcggggaaggtgagtgaataa

SEQ ID NO: 192793 - DNA, 735 bp, Klebsiella oxytoca
atgttagagaagagaactggtgaaccatgccctaaatccatcatccaggaagcactggaagaactgcttgtcggtaaaccatccaccacagagtttgtgcagcaacttacagcacaaaacatcatggcagtcccgaatatcgcttctactggacgtatgaacggtttctcattcgaatacgcagggattgctttcaaagcttctcaattgggaaaagggtattcatgggctgaattacaaaacaagatcgattaccgggctgaacgcgacaatgcttttctgtttgatttgaaagcatatgtcagtgaagagcctgaaacagtcatcccttcagaaaccataataaaagaggtaaccccccctatagaagcgcttatccaggataaccgtgctgttcaggacgaatacactaatgaccagcttcacttagctgctggtgctggtgctggtgctggtgctggtgctggtgctggtgctcaagaagcgtttgcaaccgaagcggtaaaacaagcctccaagagaagctatatggtttcaacgtttagatggttagagaccatcccctatctcaacaccattattgccatcttcaaaaacctcaaaatcccaatcctcaaactccctcgaaaacacaaaaccatcactggcgtgagagtagtagagattatgcctctgccccaaaaaaatctcatcgaatcagcacctcaatccagaagagcttcgctttcgaggtaa

SEQ ID NO: 192794 - DNA, 660 bp, Klebsiella oxytoca
  misc_feature (538)..(547): n is a, c, g, or t
atgagtatctccactacgaaacaccataacattggtctgtctgagcgacagcaacaagaaatcattactaataaattcgaactgtttggtgaaactttcgagtttgcggaaattttctctgcgactgtcatcagttccaacccaacaaatgctcagatcttggtaaaaacaaatgatggcgatgaaaagcagatttcagcctatggtatcgcggtcaggaactcacacaggattcgtctatacgagcttcgaaagtatagcaacgataactcctgtgtcgtatatgccgatgcgctcattattaattcaaacacgggtgaatataaagtaaacttaaacaggaaaaccgtcattattccagcttttctgacaatgctatttcataattcttcgacggcatctttcttcagagtaatgccagttccgaagtggttttatattctcttcactttgctttgtttggcttctttcattgcattttgctcattgcttgtgggattcaaagatggatatgtgtgggatgagcacaagtatatgnnnnnnnnnngtatatgtggctcacatacttcttttcaaggttcggaagcttcgtttgtattaattggattaaaagaagaagcgagagatttgatcatgaactcagatatcttatcgatttag

SEQ ID NO: 192795 - DNA, 504 bp, Klebsiella oxytoca
atgaagggaatgcaaaaaatccgcaggggtaagagcttcgctggtgtagtgctttacgcattaaaaccagcttctcatcataaaaaagatccgatagtgattggcgggaacatggatggaagcgatgtcggagagttgattgcagaattcaatgcgactaaagcgcttcgtccagaagtcattaaagcggtatggcacaattcgcttcgtttgccgaagaacgaagcgttaacaaattcagaatgggcaatcatagctgatgactacatgaagcgtatgggcttctctgaaacgcatctaagatgctatgtccttcatgacgatgaggccggtcagcatatccatatcatcgccagtcgcatcgaactcatttcggggaagctctaccctggaaaaaatgaaaatctcatcagcacccgcatcatccagcagcttgaactcgactattcactgacatatgctttcaaatcaaacagaaaagcattgtcgcgttcagcccggtaa

SEQ ID NO: 192796 - DNA, 684 bp, Klebsiella oxytoca
atgtccccaaatgactggagcgtgaaagtatggtcattaataaagaaatataaaagcaaaaaagtagatcattatgtgggtattagtgaatatatagcaggcctgcatacaacttctggttactttaaaaaagctgaaagaaaagtagtgtataactcagtcgacagaaaaccatcagttagtgatgttggttttttcaagcgtattggcttcattgggagactttccatagaaaaaggatttgatgtattttgccaactagcatcaaattataaaaacgtagaaggcatttcatttttagctgcaggtaatttccagaataataatgaaggcgaaactttaagattaatggctcaagaaagcttgattaaattacttgggtacataagcttagattccttccttgaacaagtggatgttattatcttaccactaaaatggaatgaaccatttggacgcactgtcgttgagtgtgctatggccgggaaaatagtaataacttctcctatgggttcaatgccagaactgcgtgatcttttgcccaatgtgattgtcacaacctcaatggaagatgactttaaaaaagttattgaaggcaaaattgcgttgacaacaacgctacaatatacaaacatgtttagtccaaataaaattgcgaaccaatatttagatatatataaatga

SEQ ID NO: 192797 - DNA, 477 bp, Klebsiella oxytoca; identical to SEQ ID NO: 112866

SEQ ID NO: 192798 - DNA, 270 bp, Klebsiella oxytoca
atgccgggccagtttgatgagtgggatggctcagcctgggtgaaaaatacagaggccgagcgggtttatcttgccgctcaggctgacagtcagaaggctaagctgttgtctgcggcatctgagcaaatttcactgctcagctacgccgtcagcagcggtcaggctactgacgatgaaacggcgcagctggcacgctgggaggcatatcgccttgccgtcagccgcgtagataccactgcagccgatattgtctggcccgagaaaccgtaa

SEQ ID NO: 192799 - DNA, 1872 bp, Klebsiella oxytoca
atgtaccatctcgacaacaccagcggagtcccggagatgccggagccaaaggaaacccagtcgatttcccctcgctggtttggggaaagccaggagcaaggggggatcagctggcccggtgctgactggtttaatatcgttcaggctgagttacttgcaatacttgaacttgtagaagacacgccggataaaacgaaatacaaccagattgcgacggcaattaaaaacttttccggcggaaatatcgactcggtctggaatacgcttaaaactgagggggcacgtcgttcaggcctgacatggggaggtacgactgaagatggtatcaagtccataacgcccttcatgtttggcggacaaggcaatagcccggatgttgataatactgatgctgttcttgatgctgtcgctgtagccaaagagctgagttacggtattgatttgcgtggcgggccctggcgaatatctaaaaccatcgattttacaggtgttcggcatatcatcactgacttttcgggacggtttctcgttgaccccgcaaacttcagttatctgcacaatgctaagtttgccatcactttcgggaatccagataccggctgggcttctgatcgcgcaggaaatgcttgtatcaatggtcttctgcagattcagtgcgataacagggcgactcctgcaaatggaatttttattaaaggtgcattgctttatattgaggcgatgcgggccactggatttaatggcaacggcatatttatggggagtgtatgggactcggcatttaaatctatttcagtagaacaatgcggtaatgtttcttcctacgcctttcagatctctgcttttggtgatacatcaaactgcctgtgggttggccgcttgcaggtagagcgtgcgtatcataagcagatggccatcaatgttattcgttctgaaattcatactattcatgctgaaaggctgatgattctgaccactgatgacggaacaacccaaagcccgtccagtctgacatatctgaactcgactttgttactgagtaacagcatcctcggtcaggttgtactggatgcgatgacctcagatgaggcaggcactgtaacaaccacaccggcggttgctttaaacctgtatggcgcgtttgccagtgcgctggcaatgggttcatgtattgtttctagtacatatggcgattacgccgcgattgtaggttcatctttccgggggtattacaatcaagggcagcccataacgatcagtaacacccgcatctcgtacactgatggaagcggtgtttgccagatgacaaaaggcatgttgatcaactgtacaatcgataagctaaatccccactatgcaacggatgggcttacggttctttcatctaagattgtcagtgattttgatatttctgccagtgatgtgaaaaatattactttctacagttgctcgttcttaggagcggtaaaaagaacacagtctcctgccggacgaccagtaacgtttatcgactgcaatgtggctgtgctgaattcatatttccagcataaagcagatttccggggtggctacatcacagaggtcaatctggtctcccgctcattcgtcaatttttctggtgtaaggggggccagtttttcctacgtagaaggtggcgatcggggctttacgacaaatgattgccggtttgactctgtgacacgctggggagtcccaacgcacggctcattccctgtctgcgctcgcactcagcgattgggtgctatgaatatggttgataacacagtaacggctactgtagttgaatacatcaacaccactaataatggtgtctcgtttgcgccattgctcacttatacaccagtcagttag

SEQ ID NO: 192800 - DNA, 225 bp, Klebsiella oxytoca
atgcaaattacagaaacagatggtgaattctatatcaaagatggctttatcccagtgggaggtcgctttatctctgcagatgcggccaatcttgctctcagtaatcttaatcaggaacagctggatgttatgtggatgcagtacgttcagaaatttcctgatgcacctgttgatttaggttttgtggagtcctatatcgaaatggtcaaagaaagtacagtttaa

SEQ ID NO: 192801 - DNA, 189 bp, Klebsiella oxytoca
atgctgaagctaatggatgtggaaagcctccagcccatcagggtggtccgtaacctgcgcggcagtcgtctctcgcaggggcgggccctgccgccggaagagaaccgcgcgctgttcggtgcctgcgaggtcgatgactccagtgtcggcatccgcgatgctgtgatgctgtgtaaatatcccgtataa

SEQ ID NO: 192802 - DNA, 345 bp, Klebsiella oxytoca
atggcactgatgcccgataatgcttcggatctgatcatgtcgccagtggtcattcctctcgatgagaatttcctgccagcgtttgctaggagtgacaaaactgtcagtcccgcccgagcctacctgcaatcccttaattctcccagcagtcggcagaccatggcttcgttcctgaatatcgttgccggcatgctcagcgccgattccctagagtcctgcaactggggtagcctcagtcgccataatgttatggccttgaccgagttgctgcgcgacaccgaccgagccaccgccaccgtcgacacctatctttcggcgtcgaaaggcgtggcgaaggaagcgtga

SEQ ID NO: 192803 - DNA, 2493 bp, Klebsiella oxytoca
atgaataatcatatccgaacagccattttgaatggacgatttgtgttactgcttggcgctggcgcctcttttggctgttcaaatcgactcaaatcaaatcctccaatcggtaatgctttatcaaaaataattgcggaagaagcaggatttgaattggaagagggtgacgacttagctgatgtatatgcttccggcttaaatcatttaggcgaaataggaatgcaaaagttacttgaaaaatactataagcattgtcagccctctcaagaatatctggatatgatgaaatatccattcccaagagtttatacattcaatattgatgatgccatcgaaaaagcagctggtgtaactacaaacaaagtgttcaatgtaagaagaagaaatagtagaattgaggatttcgatcctttttttagtcaaatggatcttgttaaactaaatggagatattaattaccctgaggaaggttttattttttctccagcacaatatggggaaggctctgctgaagaaccagtatggtatatggaattagctagagattatcatcgatttacatttgtatttattggtacaaaaatcaaagagcctatttttaggcatcaaattgaaaagtacaaaaaaagaacaggtgatcaaagtcttaaaagctatcttatagtaccagagctaagctccgtacagcagaatagtttatctgggagcaatattgaatatataaatggaactttatcagatttcatgaattggatgaaagatacatttccttctggattaactcccaaagatatattaatgaatactcggcctgagatggcttatttaagcaacggagaagaaccaactttttcaaaatcaatagcaaaagcgttagataaggtggtgcaagttaacagatcagagttattgaagcatactaaaagtatgcaacccacagtaaaggagttctacaaaggattcaaacctacctggtcagatataattaataacattcccgcacttcttgataatactaaaaaaatcattgaagcttgcgtcggaaacaaattaaacaaaaaattgttcttaatactagggccagcaggttcaggtaaaacaacggctttgaagcagttagctttagaaatagcagacagaacggcgaaaaattgttactatgtcgaagggatacccgaagatttaactaatcttctaaaggtattaaataaaagaaatacgtcctctttttacgtcttcttcgagaaacttgctgacattgcatccgatttatcacaattgatcgcaaatggttttgatgaacatgccatatttgttggttcagagaatgtcagaatatgggagtatcgggttagagaacatcttgagcagttctctccatatatccaaagttatgattctataagtgaaaaagatgttgatccaatattaaacaagatagagctatatggtaattgggccagattgaaaaaaatgtcttatagaaatagacgccttgaaattttgaaaaaatccaaacgtcagttgttaattgggcttattgaggctacttctggagagggttttgatcaaataattaagcgtgagttcgcagacattaatgataagagtgaacgagctcttttattactttcagggttggcgacactgcacagaagtgaggcatctgagtccaccttaactcgcgctttatcttacttaggagcgacttcaaatgtaagtgaactttgctcaagattatctggattagtgaattataataacgggtatgtaagtactcgacatagaatatatgttgagcggttaacatctctttttgttgatgaagctgaaatgagtaaacttattacggcttacatatattcattttccgtatatcaatttcctatagttgttaatatttctaagaaagatgctgcagtttataaagggctcgttaattataagtttttaaagaaagtacttcgagattcaaaagaatgcatacttaatatttattccttttttgaaaaacaactagaactagaaggcttgtttttattgcaatatggtttggctctccgtgcatatggagataatgaattagctcttcaaaaattgattaatgcccgagaggcttttccagaatcacctcatatcgagcatgcgtatgcccaacaattacttatcattgctgaaaatactagcgatgcaaatttatcgttagaatatttaggtaaggcgaaagacattctaaataggcttgataaaactaacaaacacgaaagtgatcgctatccgattattaccctctcgattagccatgtccgtattttagataagctaggtagggagggtgaggcgaaaataattgccaagcaatattttgatgaactcacatataaatttggaaaaaatgattccaagctgaatgagatggttattgctaccaaaaaattccttactgtatatttcactaaaggaattattgttgacatacatagttatgattaa

SEQ ID NO: 192804 - DNA, 2094 bp, Klebsiella oxytoca
atgttctatgttgctaaggaattagttggcataccaggcctgccaaaaacagcaaaaggtatcagagaggcgctttgccggttctccgctggctcagaagagcttgttcgtaaacgcactggaagcaaagcctttgaatatcacattgactgccttcccgaggcagctcagaaagcgctacgtgctcgccagatcaaagaactgatgaacggttcacctaaagaactgcctgtcgctcctgataccgcaccggctacaccacgtaccaaaggtgccgatgaaagcaaaatagcggtgtaccgcaagtgtccggccctgatggaacagaagctgaacggtctgacagcggcacagcgcaagactgccgatgcgcgtatggctctggtcgttgaagtgctgcgcctcggagaactgccgggatacagccgggcaaaagctatccgcgagattgtgcgtcaggctcagagtggcgaactgcctgagcgactggccgctgccgtctctctggctaacgccaaaaaaggcgcgtcacggtcgctgagtgaaatatcactcaagcgctgggtggctgatttcaataaaactcgctctgccgctgaacgtcttcttttgcttgctccgggtaaacgtcaggtcgttaagcctgaagaaatcagatggttgcccgagttcctgagtttttatcgtcgccctgacggtcgcggtattcaggaggcttacgatgattttgcagctgaatgggctgagcgttaccaggatgattcgatgatggccgcagccatcccttcttacgatcaggtgtgctatgccatgaataaattacccgttgttgttaagcagaaaggccgcatcacaggtagtgagttccgtcagtatgagggctttgtacgccgtgactgggagtcattaccggttaattacgtctggattggtgacggccacggcatgaagatgaaggtcgcccatcctgaccacagcaacccgttttcgccggaggtgacgtttatcctggatggtagctgccgctatattgtcggctggagtctggcgctgtctgaaagtgtgatagctgttgccgacgccctgcgccacggcattaaaaaccacggcaaaccgttcctgtactattccgataacggtggcggcgagaccaacaataccttcgatgctgagctgacaggtattcttccccgcctcggtattgatcaccgtctgggtatcccggaaaacccgcagggtcgcggtattatcgaacgccttaaccgttcgctggccatgcgtatttcacgccagttcgccacctattacggcaccggcgcagaccgcagcaccgttcgtcgcatgacaaaagcgctgcagtccgcgacgaatgcagcgaacaaagggaaagagctgactgcaaaacaacagcagaccctgcgcgatctgccctcatgggaatctctcattgaacacatcgaggccggtgttgagtggtacaacaaccgcccgcatgagtctctgccgcttcgtggtgatggtgagcacttcactccggcgcagttccgccgctataagctggagaaagaagcgacagaaattgagtggctgtcggagctggaactacgcgaaatgttcatgccgcagatagagcgtaccgtcaaccgctgtgaggtccgtttattcaataacctgtattactccgctgagctgaataacgagcacggtaataaagtgctcgttaattacgatattcacgacgcaacccgagtggttattcgtcgcccggatggttcatttatttgcgaagctgtctgggatggcaataaacagcaggcattcccggttactgccgaatatcaccagcgccagcaacgtatcaaagggatgcgtcagcgcggcgaggagaaagtccgcctggccgaggccgagaacgtccacaccctgccagctccgacagagcaggaatggctgcatggcaacgtctatcgccccactcgtggtgctgcgcctgtagcgctggcagaaatggaggaagaagaatacagcgaggatgagtatctgaataactcgctggatatgctggaatcaaataaacgtaaaaacgctatttaa

SEQ ID NO: 192805 - DNA, 429 bp, Klebsiella oxytoca
ttgaaaaataaaattttactggtgagtgcgctggtgttggcaatgggaatggacgccgcgcaggcggttgaaaaaagcccaaacgcgaaaacggttgaggttgtcgtcaatgctaacggttttccctttagctttgttgacgataacaacaatattaccggttacgatggcgacctgttaaaggtgctggaccagcggttaacggactatacgtttcattttaatgcggtctctcgcgatgcgatgatcgtcggcctatcgactggcgcctataccctcgcggcggatcacttttatctcaccaaagagcgggcggaaaaatacgaccactccggcgagccgaccgggatcagcgatttacgcctgattgtacgtaacgatgagaacgatattcataaccttggcgatctcgccagcggtatgttatga

SEQ ID NO: 192806 - DNA, 756 bp, Klebsiella oxytoca
atgagaacgaccagcatcgtgggaacattattagtgcttatgttggttgcgccattctattcagttgcagctagtaaacctcttagtgcatcccaggcaaaattagtgaatggttctaatgctgcaaatgagttgggctgtgaaaggtatgagtcttggtttccagaggatataaacaaacaatcgaaatttaaatcaataaaatcagttctaaaaactgagcaattgatccatggctcaagtgtttactgtatggttaatgcctcgcttgattcatctgatacttcaatttttattagcgagcgcggtgaagttgatggcgtatcaactgagataaaccatggtaatggaacggcgaccattggtgaggggcgggtttttgataacaaagggtgggatgttgcatgcaaacgggataatttcaatgacgagaaatcatgctacgtacgacaatatggccttaccatcagaaaagtgaatgatgtatatttcatttatgtaggaaatgatttagctcctggcggcaaggttgagttaaggctggataataatgaggcgattggtagcgttgatgggaatggaatgcttaagaaagaggatagtgatctattccttaaacaagtaaagaaaaactccacagtaatagttcgctacaacatatatcaaaagcaagcgcctgaggtaagaacgatagatacaaaaacgctaggtgctgccattaaagtaatgaacctgattaatagtttatatatttaa

SEQ ID NO: 192807 - DNA, 717 bp, Klebsiella oxytoca
atgggcagtgaaaatggcaagacccggaagtgcgcgaacacaaaccgggtctctatcgaaaataaccgcaaaggaaatatcgacatgactattgtacagaacaaagagctaagtttccacaatgtcgcattagtgccggcgcctgtgaatgatggcatttggctaacatcttcagatattgcgaaggcacttggatacgcttcaccaaagagcgttacaaacatttattcacgtaattccgacgagttcacaagcagcatgtcaatggtcatcaaaatgatgactaacggaataaacaataacttacgtgaaaaatcggtccgtgtgttctctcttcgtggttgccatctaatcgcgatgtttgccactaccgataaggcgaaagaattccgccgctgggtgctggatattctggatcgggaagtggcgcattcgccgattgcgaagcagtttaccgatgatgagttgcagtctttatgttggctctggaagaactcggtaaggatggtaagccatatcgctgacgttgagcctcttctacgtgtagctgaacatcgactggcccctgcttactattctatgccgcgggaatacacccaaaacataaacactgtaagaaagttgttagaaagggaaacgacgcacattcacgccgaccgacacacgatagacaattggcgggtgctaaaccaactaagaattccggagcttcattga

SEQ ID NO: 192808 - DNA, 417 bp, Klebsiella oxytoca
atgaaaatgactgaaaaagataaccctaactttgtagagcggttcaccgtcagaatgccggacggaatgcgagatgccatagccgaacgcgcaaagcgcaatggcagatctatgaacgccgaaatagtccaaatcttacaagatgctttaactaacagcctctttggtgagattgctacgaaagaaaatcttgaaaatatgcctgaacaaattaggcatgatcttattgtgagaagaacgatgatagcgcgcatcagaatggcagaggcactacgtgatatcgaagaaaaccttgaactattgaatataactggagacgacaagttaagtgctgatgcgcaagcttggtggaaaaatcatgactccaagacaatagaagcaattgttaacaagtggaaaaaaaacaagcaaacatga

SEQ ID NO: 192809 - DNA, 687 bp, Klebsiella oxytoca
atgaccgctttaactgacattggcgaactatctatcagcgacagtcgtgagggcgggaaagattacctgctccggccttcatttgaggctatggcgaggatcggtacaccggaagagattgtgcagacgtacgctaccatccacggcaatgacgtcgctcagcttattgaagcgtgcgcaggcacgctggggcgctttcctgaatggctatctccttcattcaaccgcgccgctgaaaagctgttatcaacgtgcttgctcgtgctgcagtcgtgctgcgaggaagacctgactccaatgatcggcgagtggaaagggtggcgtaattgtgtcgtctaccgccctgggcaggtgccgaagaacgacattatcgtgctggcgcagcacctcatgcagcacggcatcgtcggaaaagccagggttcgccagctgcagcgccatgaaacaggcgagcgcacaacagagtttaaagccttcgactacatcagcgcggcacgcagccactttggcatgaaccgcgccgaagcctctcagttaacgatgaccgaatttcagatgctgctggcggcgaaataccccgatcaaaaaggcttcactcgcgaagaatatgatgcaatcaccaatgagtatcttgccaaacaggctgccagaagaagtaaaccattccataagcgaggggaagcatga

SEQ ID NO: 192810 - DNA, 744 bp, Klebsiella oxytoca
atggctaattgccagaactcgaacgaacgcctgttcggcggcgcggtcgtgctggaagtcgccgatggctgcccggatgtcaaaccacttgagtctgagtggaagtctctggctgctggcacgtcgaaaggcttcgacttcaaccccaacacagttacctctgatgcagatgacggcggcggttatgtcgaaaccatcatcaccaacagtgatcttacctttagttttgaaggtgaagtgcgcaaaaaagataagctggatcagtacggcgtcggcaagttcattaagtacttttcggacgagcttgctgccaagcgtcaaaccggtatctgggtgcgaatggagtatggcccggtagaattcgtcggctacatgaacatcacggccctgagctctgacggcggcaccaatgacatcgtcacgttctccaccgagttcaaagtcggcgatgcaaccaccatcgaagtgaacgaactgactgcggttgcggtgactggtgtgacggtagccccggctactagcaccggtactgcgggcggcaccagcaccttcacggtgaatatcgcaccaaccggcgcaacgaacaaagacttcactgtagcgactaccgatgcgaccaaagcaacggccaccgcctccggcaacaccgttaccgtgacgcgcgtcgccaccggcagcgcgcagatcatcatcaacaccgaagacggcaactttgtggccgtgcatacggttaccattacctaa

SEQ ID NO: 192811 - DNA, 384 bp, Klebsiella oxytoca
atgacacccatgatgcacgagagggtgcgcaacatgttcggcgacgccgggctaacgaccggcttcacggtgcagcagttgatgtacgacgacccgggcgacctgtcgaaggcgatcatggtattcaggccaaacggcggctcaaatatccgtactgacctcggatctgagtatcacgttctggttgatgtcgtaggcgcgaaggacaagcgcaaagacgcgctaaacgccgtgcagcgtatcgttgattacgtccaggccaaccccatggctgacgagtgtgtcggctacatccagaacatgggcgcaattcccgcgccggtgctcacagaagaagggcgaatagtcttccgactccagttcgcctgcacttacggcgaatag

SEQ ID NO: 192812 - DNA, 465 bp, Klebsiella oxytoca
atgggcataaaagtgaagggcgtcagccaggcgaaaaagcacctgaacgatgtcatcaatgacgttaaggggcgcagggtaatccgcgcgttgcagtcagcgatgatgcttatcggtacccgggcggcctattacaccccgatcgacagctccacgctgattaacagccaatttcgtgaaatcgaggcaggcggcgtgctcatcaccgggcgagtcggttactcagccaactatgctgcgtacgtgcacgaagcgtcaggcaagctgaaaggccagccgcgcgcgcacttcggcgtgaccagtaaccggtctgagttcggcccgcagaaaccgaaagaatttggtggcgggacaggaaagggcaactactgggatccgcacggtgaaccgcaattcctgaccaaaggcgcgaatgatgagcgcgataacgttgatgcggtgatgcgtaaggagctctcgctatga

SEQ ID NO: 192813 - DNA, 357 bp, Klebsiella oxytoca
atgtcgtctactgcttcatggtcatacaacaagccgtgcacgatatggcgtaagggagcgggcggtaatgacgagtggggcgatccagtcgacccatatgaaccgccagaaaccatcatgtgcgactacatcggcggactgtcagcaaagctcggctccattggcaaagaggttgtcgttaagaacaccttctttactgcgtttgcgctggccgatgagggcgattacatcctgattggtgagagcgttgagccggatccggtcgtggctggtgccgatgaggtgcgccacgttacccgctggaacgacacgctcgacggccaggaagatgactgggcgataattacgggagtgtag

SEQ ID NO: 192814 - DNA, 174 bp, Klebsiella oxytoca
atggcgtgggtttcagttcagcaacggctgccgcggacgtttacccgggtatgggtgataaccgacaccgggcgggagaccaccggctacgttaaatcggacggtgagtggcatatcaactgcgagaaaatccgggcgactggcgcgaaagtgctgcgctggaaggagggctga

SEQ ID NO: 192815 - DNA, 258 bp, Klebsiella oxytoca
atgaaaacgttaaaggtcgagaaaaccggctgctggggcatgattgatggcgtcttccagcaacttcctgttggccacgaattcgtcgcggcggacattcctgcagcttttgccggtcgtgtctcggtggtgggcgaagtggaagataaaacgctggaagtggctacgcctggcaatgatgctgcagagcaggcagagcaggcagagcaggcagagcagcaggaagaatctgccagcaaatcgaagaaggcgaaataa

SEQ ID NO: 192816 - DNA, 1056 bp, Klebsiella oxytoca
atgagcatgatcgtatttaacaaaaagctggttactgaacataaccagatcaagaaggcatggaatcagctgctgatgcagcgcgaatccttcaacgttaaccagaacaacatttccgcccagtacggcggcgcgctggaagttaaccaggctgcgctgatctctaaagactactggcgtgaagtggacaacatcaccaccagagtcttccgtaatgacgaaggcaacggcctgctggatgacctgctcggtctcggtacgccaatctctatcggcaagactgcggcgctataccgcgtttccagtgacgccggtaaggttcaccgcaccctgaccggtcacgttccggaagagctggataaggtcatctacgacgaagctggtgacccggtaccgatcttcaacactggctatggccgtgagtggcgtgagtggaacggcatgcagtcggaaaacctcgacgcgatggctgacgaccaagaagcgcacgttgccgctatccgtgaggatatggctgactacatgctgtctggtgacgcgaaggtgaaggttaaaggctatgtcggcgccggtatcaccaatcacgccaacaccaaccaggtggatctgagtgcatccggtctgaatatcgacctgaccacctcgactcctgatgaatcagtagcgttcttcacaggtccgttcgccaaactgctggacgataactacgttcaggagaaggtaaaggtgtgggcatccccggatatcatgcgcaacctgaaccgaccgtattccgatgccgcgggcttcaaagaaggcaccgtgctggaatacatcctgcgctatggtcgcattgagtcgttcaaccagacctttaagctgaccggtaaccacttcattgcgtacgttcgcaactcgcagtacatcaagactcgcatcgccgcgccggtgggcaccttcatgatcccgcgccagaatccgttcgacaactacaactccctggtctggagtgctgttggtctgcagattaagcgtgacttcaacggtcgttctaaagtgttcaacgcacagggttaa

SEQ ID NO: 192817 - DNA, 462 bp, Klebsiella oxytoca
atggctctcgcacctcgtttccatactgtaatcgcgggcccggcccgcaagaatgacccgcaggtcattgaagcaatcatggcggcagcagtgaagccaggatctctggtaatgctggatagcacagggaaactggctgttcacaatgtggccggtggtgcaggggtagccctggcgctccagcacaattatatcggcggcggtgatatccgcgatgcagtgacggccggggatactggcgcggccatcatgtgcgaagacgatgtcgattaccacatgctggtaaaggctggcgaagtgttgctggaaaacgaaggtctggtttctgccggtgacggcacactggccaagtcgaccactccagccaccgaccaggtcctcttcttttcacgcgaaaaaatcaccgttggcgctgaagcccagctcgtgaaagttcgcaaatcagggaaagctaccgcatga

SEQ ID NO: 192818 - DNA, 1356 bp, Klebsiella oxytoca
gtgaagctatccagcatccacgttaaatccctcgccatcaacgcctccaacatctcaacgacaactatcaacggccaggagcactacgtcattcgtggtgcggttccgatcgtcgatgacattgttatgaatggcggcctgtacccggcggaggagattaacaacagctaccagacgatggaaggcaagctgatgcctctgccgcatccgatggtagatggcaagtacgtcagcgccaatgacccgcgcgcgattaatgcttatcacgtcggagcctgggcgcagaacgtcagtaagtcaggcgaccaggtcgtcatggacgtttatatcaataaggaggtcgccgagacaaagcctgacggtaagcgcctgattaatcgccttgatgagatgatcgccggcaccaacaccgacccgatccacctctcaactggactgctcaccaacaaagagaaaaagtcaggtgagtcgaaggggaaaaagcactcctggatcgcccgcaacatgcagttcgaccatatcgccatcctgctggatgagccgggcgccggaacgccggaagagggcgtcggaatgttcgtgaatgctgacgggcaggaaggagaagttgagaacgccagtctcatcgacgcggctaacagccttaaagacggactgctgaataaagtgaagttcttcttcacccataactcagatgcctcattcgatgaaatctaccagatgctgcgggaagccattcgcgcgccgtcaggcagcgatgtttatcgctatgtcgtgaccgtatggcccgacaaattcattttcgaagagggcaataagctcttccagcaaaaatacctcatcgacgacagcacagtcacgctggtcggcgatccagtagaggtcgtgcgcaaacccactgagtacgaagtcaaaaccaacggagaaataaacccgatgaaagagaagatgatcgccgcgctcaatgccgcaggcgttaaaaccgaggggctgaccgacgatcaggtctgggatgcctataaccagcaggttcagaagaaagcaggtgaccagccgggtactcagattaactctgacgcgattaccgcggcagtaaatctggcgattaagccgctgactgacgagatcggtacgctgaaaactcagctgctggccaacgctgaaaaagacatcaagaccaagcgtgaagcggtcaaagcgaaatttccgttcatgaccgaagcggcgatcaactcgctggccggcgacgcgctgaacgacatgtactcgcagtgccagaccagtactggtcttaacccggcattccagggtaatggcgcacagagcgaaattctttctatggaggcacctgaataa

SEQ ID NO: 192819 - DNA, 1452 bp, Klebsiella oxytoca
gtgaccgaaagcgaaatgaaacaacagcgcgccagtaattccagtgttgagagggagcgtaataaaaacctctcaatgctgtttaacggcaccagtaataccaaacgccagcgactttatcaggagttcggttacccgttacacctcacgtttgatgacttttaccgggcgtaccggcgtaatgcggttgctggcgctgccgtgacgcgcatgcttgatgggtgctgggaagactacccagatgtttacgaaggcgaccagacaaaggacgcatcgaagcaaacagcgtgggataagcgagtcaacaagctcctgaagcgctgctgggagcagattaaaggcgcagaccgccgtaacctggttgggcgttactctgcgatcctgcttcagattaaagatagtaagaagtggtctgaacctgttgacaccaccatagtgggaaggcttgaggaaaaggctctcgttaagctgattcctgcatgggaagcgcaaatcgacccgattaactgggacgataacccggacagtgaaacgttcggcgaagtgacgatgtactcgttcactgagttgccggttgacggaaactttgacgcccgcccgggccgaatcatcaacgtacacccggatcgcgtaatcatcctggcagagggctctgatgatggcgtgatgacgtcaggaaagtcgctgcttgaggctggctttaacaagttgctggatatagagaaggtgagcggcggtgcgtctgagggattcctgaagaacgccagtcgccagctcaactactcattcagtgagaagacgaacttctccgctctcgccaaggcccttggcgtggctgagggtcaacttgctgaagcgcttgatcagcaggtccgtcgccttaacgacagcaccgacagcgccagctttatgcaggctggtaccgctgaggtgttgagcgttgcggcagccgacccagaaccgacctggagaaccgcgctgagcgagttctgcgcgaccgttcctatccctgtgaaagagctcgttgggatgcagacgggtgagcgcgccagcactgaggatgccaaaggttgggggcgcaccaggatgagccgtcggaaaggatttctgactgacgtaatcaccgatgtggtttcacgcttctggacccttggaattattccgccggctcagaatgcagaaatcaccgtaggttggtctgatctgctggcgccgagtcaggcagagaagatttccaacatggacaagctcgcggacgtggctgtgaaatccacgaatgcctttggccgttctgctatcactgagaacgaaattcgcgctgcgggcgaactgcaaccgctgcctgagcttgatgatgaggatctgccagatggcaacaaaccaaaacctgatcctctggccgaccctcagtcagaaaccgaaaagcccggtgataccacggtcgaaagttga

SEQ ID NO: 192820 - DNA, 633 bp, Klebsiella oxytoca
atgcgtaaaccatcccgccgtaagtgcaaagtatgcggtgaatacttcgtgccgaaattccacgacatccggatccgctggtgctgtccggaacatggcgcaatcctcgcgatggaagagcgcgaaaaagagaaggtgaaagccgcggctaagcgcatcaaggaacgcaaagagaaagagcgggaggagcgccgggatctgaaagcgagaaaggtggcgctaaaaacgaaaccgcagtggagatcggaagcgcaggcggctttcaatcggtacgtccgtctgagggatgctggcaagccgtgcatcagctgcggcaggctgccggagctgaagtttggcggaaccatggactgcggccactaccgcacccgcggagcagcggcgcacctcgctttcaaccttcacaataccgcagcccagtgtgtctattgcaaccgggatcgggacggcgcgcaaaaggcatttgaacagggccttattgagcgcatcggtgccgaaaaagttgaggcgataaacaacgacaattccgtccgccggttcgacatcccatacctgcagcgcatcaaatccattttcacacgcaaagcccgcgcgctggaaaagcgtcgggcccgccgacaggaggccgcatga

SEQ ID NO: 192821 - DNA, 669 bp, Klebsiella oxytoca
atgagcatttatcaacgcattaacggcgctgactggcgcaacgtatgggtggttggcgatctgcatggatgctatacgctgctgatgaatgagctggacaagattaagttcgatccggccagcgacctgcttatttccgttggcgacattgttgaccgcggagctgagaatgttgagtgtctggacctgataaatcagccgtggttccgggctgtgcgtggcaaccatgagcagatgatgattgatgggctgtcggagtatggaaacgtcaatcactggctggtgaatggtggcggttggttcttcaatctcgactatgacaaagaagtgctggctaaggctctggttcacaaagcagctgagttaccactcatcatcgagttggttacctccgatcgaaaaatagtcatctgtcacgctgactacccgcacaacgaatatgaatttgataagccagtgccgaaagaaatggtcatctggaatcgtgagcgggttagcgacgctcaggacggcattgtctcgccgatatccggtgctgatctgtttattttcgggcacaccccagcgcgccagcccctgaagtatgccaaccagatgtacatcgataccggtgccgtgttctgcggaaacctcacgctggtacaggttcaaggtggtgcccatgcgtaa

SEQ ID NO: 192822 - DNA, 450 bp, Klebsiella oxytoca
atgaagcagcactactgcatcgttaacgacaccgttaaagacaacctcatagcattcattcgctccctgccggtaaaccctcgcgcgccgatggtggtcgaggcccgggaagagacgcgcaccgataagcagaaccgtttgatgtggccgctgctgaaagacctgtctgatcaggttgtctggcacggcgaaaagctgacccgagaagagtggaaggacctcatcaccgttctggtgaaccagacccaggaccaggaacagaaatccgcgccgggcatcaacggtggccgcgtttatttcggcgtccgcacatccaaatccagcaagcgctacatggtcgacgtcatcgaggcgatttactggttcggcactgagcgcggagtgaagttctccgaagcgtccagtaagcgcatcgtctgggcgcaagagtggagggcttcccgtgggtaa

SEQ ID NO: 192823 - DNA, 333 bp, Klebsiella oxytoca
atgacatatgcaatcggtgttggtgctttcattattttcagcgtggtatttcggttcatactaaacccattacgatatctcgtattaccaagagccactcctttagttattggggtaagagttttcttagctggcatgtcaacagtaatggtcatgcaacattatgatttgtcagcaaatccgatttacttaattattacacttttcattatcaactatattataaatgctaaggtgtactctgcgaaccccgtgtttaacaacgccattgaacaggttggtttgatgattggcgctgtggcatttttagtttattacttttacaaattctag

SEQ ID NO: 192824 - DNA, 267 bp, Klebsiella oxytoca
atgaccaaatcgaccataaccagagagcagttaatcgaaaagctaaagcacaggattgcagtcactgaaaaatatccacacctggaagaggcgcagattgactcgcaaattttcaaaatagcgctggccgcaatggacagcgagccggtagcacgtatggtcgtaatcccaaccatctggaagcattatactgccgccaaaactgcaactatttacgagaaagccatgactgatgccggtattgagtggagaagtattgatgattaa

SEQ ID NO: 192825 - DNA, 309 bp, Klebsiella oxytoca
atgatgaaacgtatatccggaactcaaatcgtcatcaattttatcggcagtcatcccggttgcactttttcagagattcgcaccggaacgggcctggattcctctgtcgttaactcagctatctgggccaccttcaacgacggacgggttttgcgagcgggggagcgcaaaggctatcgctacaccctggcagatcagacaaccgtaaccgaaagcacgtcggcagatcttcagttcagcaatcgccattgcggctccaacaagctgaccaacctttttaaccagtgcctggcgggagtaagaaaatga

SEQ ID NO: 192826 - DNA, 1020 bp, Klebsiella oxytoca
atggcaaacaccgccaaagtaatcaaattccctgcgcaacaaccggcgcagcaggagaatcgcatggccgatctggaaaatggctatctccgcctcgctaaccagattcaggatgccctgtgtttcgttgagctttcggggcgtgagttccgcgtgctgaatgcaattgttcgcctgacgtatggctggtccaagaaagaggaccggatcaccaacagcctcattgcagataaaaccagactggcagttaagcacgtttctgaagctgtgctcagcctggcttatcgcaacatcatcaagatgcgcagaatcgggcagacacgttacatcgggatcaacacgcttctggatggctgggcttacacaaagccaaaatgtgcaaagtgcccggtcagtttcccggtcgctgaagttgtaactcaggttattaccatccctgaaatcggggatagcaaagtcacaactaaaaccatccctaaaaacggggataaccacccccaaaatcagggagaggtatccctgaaaacagggaacaccaaagacattcttccaaagacaaatataaaaacagatctaacccctatagtccccacgggggacgagtgggaaaaacccgttgctgatgaagttattcaggatgaaccgcaagccgatcctgtcaggcaggttttctcgcactggcaaacagaacatcaccacttgtctgcaaagctggatgacaaacggcgcaagcgcatcaaggccagactggctgaaggtttcaccgcagatgaactctgccgggcaatatccggcgccaaaggtgattcatggctgatgggcaagaacccttccaaaaaacgttacgacggtatcgacacgctcctgcgagacgccgcacaggttgaaagactgcgcgacttggcaggagatgaacacgccatggcagtcgcacaaggccagtactcggcaaccactgcacgcaacctcgaaaccctcaagcgctgggctggcggcactgattcaggagaacttttctga

SEQ ID NO: 192827 - DNA, 219 bp, Klebsiella oxytoca
gtgctggctccccacaatgaagcagagaaggccgtcgtcgccttggtgagccattacttcaccaaccagctgataaccgtctgccagcccaaagcacttcgccacactctcgcagtggccgcgctcatgcccttgagactccgtcgctcatcgccgctcataaccggtgcgcgtctggcgttcgcgctgctttaccggcatacccttttcctcgattaa

SEQ ID NO: 192828 - DNA, 207 bp, Klebsiella oxytoca
atgacataccaagaagcgcgaaaaattgtgattgccgctcagagcgaggttttaagacttaatgatcgcctgtgcaacatgcatcgccactggattgacaacggcctttgcgattcagtggcttcattaattaagcagcatgaagctgctgttgaaaaatggaatgaagcgaagttcgttatgaactcactttctccgcagcaatag

SEQ ID NO: 192829 - DNA, 282 bp, Klebsiella oxytoca
atgaacgcatacctcacttacgaccgcattgaagatcggcgctgggttgaggagcagctcaccgacgagaaagagaagtggatcgacgaccgggcgaaagagttaatcgccatgttccccaaagacccactttcaatgcgctccctcttccttccaacagcagccactctggtgctaaccggtgatagagcactagagcattacaacgactatatcactcacctttgctatgaccgtgcagaagaagagtgggatcgccttcatccaacctgcccgttttaa

SEQ ID NO: 192830 - DNA, 657 bp, Klebsiella oxytoca
atgaaccggtactcacttatctatgcggatccgccatgggcttacggcaatacgatcagcaacggcgccgctgccgatcactactcgacgatgcgactcatcgacctgaaacgcctcccgatatgggaggttgcagcggaaaacgccgtgctggcgatgtggtacaccggcacccataaccaggaggcgatcgagctggcagaagcctggggcttcacggttcgcacgatgaagggctttacctgggtgaaattgaaccagttggccgagcttcgcattaacaaggctctggccgagggggaaattaccgacttttacgacttcctcaccctgctgaacgccgagacgcgcatgaacggtggcaatcatacccgcgccaatacagaagacgtgctgatcgccacctgtggcgccggtctggaacgcaagcatgccggcattaagcaggtggtctacagcccactcggcgcgcacagcgaaaagccgtgggaagttcgccatcgactggagctgctctacggcgacgtgccgcgaattgagcttttcagccgcagcgcagcgccaggctggagtcactggggtaaccagtgcgccaccgcttcagtagaactgatccccggctgcgccatcgacgttgtgaagacggaggcagcatga

SEQ ID NO: 192831 - DNA, 219 bp, Klebsiella oxytoca
atgactccagaaatcgaaaacgttatgcgcaatcaggggcgccaatgcgcggaggaaatacgccgggctctgaaagctaaaccaaaacctaaatggaatgacgtggtgccgccgatcctcaaaaaacatcacgaaaagataaagccaatgggcataagccttacggcattcgttagcagcattggccgcatgaatgggcggtatggagtggaatcatga

SEQ ID NO: 192832 - DNA, 201 bp, Klebsiella oxytoca
atgagcaaatacccaagagtcggcagtgttgccgccaaaagcaaaaatacctctgccagatgcaaatgcggtgcgattgcgaagtttaaaaccacggttgaagtaaatgttttccgtggtgatgacgaagtggtctggtcttgtaacgagcacaaaaaagactgctcatttttagtcggcgggcaaggcggtgctgcatga

SEQ ID NO: 192833 - DNA, 648 bp, Klebsiella oxytoca
atgaaagaacgtggaatgatttttaacgctgagatggtgcgggccattctcgacggtcggaagacgcaaacacgtcggatagtgaaactgcagccagatgaagacggtctggcaaaagtaactaatggaccctgggttgataccagcgaacggaattaccgcagcccattcggtgatgtaggcgaccgtatctgggtgcgtgaaacatttcaggggccgttaatcgattacgaacagatggaggcatacctcgaagatagctcgagattcgaaaagccagagttttgtcagtatgccgctgacggcggccatcgacctgaatatcaagacgctgacgacaacttgcgtcacggatggcgaccatctatacacatgccgcgctgggccagccgcattctgctggaaatcaccgacgtgcgcgttgagcgtcttaactcaatacacgatgtcgatgctatgcgagaaggaatacagaacctgacgacatgttcacacgctgatttcggcattcttggcgtcgtaaatgcgcaacatcctgtacgggcgtttcaactgctatgggaatcaatctatggcgctgacagctggaagtttaacccctgggtttgggttatcgagttcaagcgcgttgaaggtggtgcagcatga

SEQ ID NO: 192834 - DNA, 480 bp, Klebsiella oxytoca
gtgccagagccagccacatactcagcgattgcagctacttttgcagcattatcagccgcgataaatgcttacattggttttaaaaacaggcaagacgctttagataaacaaattttggatcgtcttctgaaaaaagccgatgagtgcaatcaactcatattgaaaaacggacatacaatcccttataaagatggtgaaatgggcgatgcttcacgcatttacactataatacatctttcaatgagggattacgatcaaattaaaaggggattctcatttctacaaaaaatcccttacattggtgagaaaaacttcgataaaaaagagaggtttaaagattttttctttgattcactacattccacaatatggaatgatttaaaaaacaatacaacgccaactacatataatgacccaactttaatatctcaatttaaggacgtgaaaaaattttatatgaatcaagttaacaaaaaatag

SEQ ID NO: 192835 - DNA, 1851 bp, Klebsiella oxytoca
atgggaggggctatacaagttcttgcatctgcagggtctggtaaaacaagagtgcttactgagagggttaggttcattcttaataactctgctagaggaagtgtggttgctttaacattcacaaataaagcagcagatgaaatgcttgaaaggttagatgatggctcagaaaatcgtgataggatttggattgctacaattcattctgttgcacaaagggtactcgaaagttatgggtatactattgggttaccaaaagaattacatatatttgaacgtgaccaagatcggatggaggttttcctacattccttaagagaacagggggttaatattgatgagtacttagatgttgaggacgttagagaaaagcgcaatcgtgaaaaaattataagtcaatatcttaatgtattctctattattaaaagagagcttttaactgaagatgaagtaaagataaaattcagctccaatccgcgtatttggaatatttatcaagattatcagtctgctttattggaaagtggtggtgtggattttgatgatatacttttatatgcacataaaatcctattaaatcaagaatcggtagcaagaatatatcaaaaaaaatacgttgctttatttgttgatgaagcacaagacttaaacagagctcagtacgaatttataaaggttctctgcggtgataaaataaaagatgtcatgatggttggtgatagtgaccagatgatctatggttttaatggttcatcatcagattattttattaaatcattcgtgaaagattttactcctaaaacttattgtttaaacgagaactatagatcttcgaaagcagtgattgaattagctaataaattaaaaccaaatagccaagttggtgttaatgctgctcttgatggctataaatcttttaatgctttaccagatgaagaatctgaagctatatgggtttgtgatagcattcaacatatactgaatttaaaaagacatccagaaattgagggcgatattgattgctctaaaattgttgttataggtagaaatagatttgtttttaaagctatggaaagtgagcttaaaaaaagaaatataccttatttcctaaagcgtagtgatagaaatgaatcgcctgtttctcttattgggaaaatagtcgatcttgctataagggttaaggttaatccaaaggattgggttgatgggaagagattgtataaattaatcggtttagaattaaatccagaatcagatgttacctacgatattagcaaagtctatgctgacataaaaaaatcatctaacctagataaagatttaattagcttggttttagcacatattgatcatatgtctgtagacacacctaatattttgaagttctgtttagatattaaatcagaactggtgagtttaggagcaaataccaaagattctgctaaagaagatgatattgccacagggattaaagatatagagcagcttcaatccatgtggacacgattcaaacgtaaaggcctcggtgataatctatcctcatttaggaatgcacttgctttgggtcagcttaatgatgataccttaaataatgggattatgttaagtactgttcatacaatgaaaggacttgaaaaagatatagttttccttatcggtatgtgtgagggggtttttccagattatcgagctaagagcaaagtcgagctagatgaagaaagaaataatgctttcgtagctataacaagatctcggcgttggatttttgttacttatccagaaaaaagaatgatgccttggggggattataaatatcatcctgcatcaagattctttctcgatatgcagtaa

SEQ ID NO: 192836 - DNA, 1776 bp, Klebsiella oxytoca
atgtcaattcttataaattctgttaggatttcaggttttagaggtataaaggaaattgaggttgagctaggacgtattgccgttttgttaggtacaaacaatgcggggaaaacatccttcctaaaatcgttgcaactagctttaggtgattaccaacgttactttagtgatgaagatcttcatatagatagttctgggttaaaagttaatgaagttatcgttgacttaaaaataatacctacggatgaacattataataaaacagaagagtttgacgaaaaatggattgatgttttcggtgataatattgcagtagatgcaaatggacatgagtttgtggctattcgtacaaaagttcagccagatgagataaaaggtgggtttaatacacaacgttattatttgaatgaatggggggagtttgagggatggaaagagattgttgtcaacgagagaagaaaggtaagaacaaaagttgatgcaatcccctatatttgtattgaggctcagagggatatacatcatgagcttaaagataaaagctcatatatagggaaggtcttatcatatattaaatatgaagatgaagatgttactgcacttgaagaaatgataagttcaataaatgaaaccgcagtgagtagaagtgagccgcttcaaagcttaaaaaattcacttcaagggttaaaccaatcatttctaggatcaagccacacagaaataactcctttccctaaaaaaatccgagatctatcaaagcaatttacagtacatttcggagatgaagaaaaccattcattttcaatggaatatcatggcactgggacgagaagttgggcttcaatgcttacagttcaatcgtttttaagctttatgcatgaacggcatgagctcgaaaataaggcgctacatccaattgttggagctgaagagccagaagcgcatctacatcccaatgcacaaagaaccttgtttaaacagttatcatcatctcagggacaaattatactgagtactcattcaccatacctgagcgcaatggctgagatagaagatataagatcattcataaagaaaggtgatggagtaacagtaaattgtttgaagaaaagaattgaacatgatgaaaaaaatgcattaaaaagggagataatgttaacccgtggtgagttgcttttctctcgagccttaattttatgtgagggtgttacagaagaacaattaataccatccatgtttgaattgtatttcggtaggacgatgtttagtgttggagttaactgtgtaagtgtcagtggcaaaaattacccaccattcattaaacttgcaagtaatttaggtatccctgtctgtattattagtgataatgatggtgatactcatggtgagataaaccgtcaggtagcacgtttagttcgtgaagatggcctcgtattgaatcctgattgtttctctttagagttcctcaaagaaacaaatgatattgaagctgagttatacaacgagttaaatattcgtgaagaaataattgaatcattagtgttaagtgaaaccaaagctagtcctaatgaacggtatcgagaagccaagaaaagagaaatagaggctttacaagatagtgctataattgaaaaaatgcgtgactcaaaagctagttatgcagggtatttaggagtgattctagcacagaatgcaaatggaaagagaattgaggagttacttccggaatctgttattattgcatttaataaagttaggggatggcttgagctatga

SEQ ID NO: 192837 - DNA, 567 bp, Klebsiella oxytoca
gtgaccactgtgaccatacagcaggcctttgaggcctgtcagacgaacaaaaatacctggctgaaacgtaaagccgaactggcagaccttgaacgggaataccgtgaacagctccttgccggtgacgaacaaatcccgcgcagaatgcaggatttgcgcgacaatatcgatgtgaaaaaatgggaaattaatcaggccgccggtcgctatatccgctcacatgaggaggtgcagcacatcagcatccgcaaccgtctccatgactttatgcagcagcacggcgcggagctggccgccacgctggcacctgagctgatggggtataacgaacaaattcccgcagtaaaacagagcgccatgcagcactcggttgattatctgcgtgaagccctgtcggtgtggctggccgtaggtgaaaaaattaattattccgcgcaggacagcgatattttaacggccatcggattcaggcctgatgcggcctcgcgggatgataatcgccagaaattcaccccggcacagaacctgatttacacccgccgacgtgcagaactggccgcacggtag

SEQ ID NO: 192838 - DNA, 240 bp, Klebsiella oxytoca
atgtttcactgtccgttctgcaaaaagaccgtgcacgtccgtaccagccggtatctatcggaaaacgtcaaacagcgttatcaccagtgtaccaatatcgaatgttcggccactttccgcaccatcgagtcggttgacggtgtgatacgtgccgcaccggagaaaaccgaccccgccccggtgacgccaccgccgccgcgtaaagtacagggctgctacagctcgccgttccggcattaa

SEQ ID NO: 192839 - DNA, 744 bp, Klebsiella oxytoca
atgaaacccgaactcattatcaaagccatgcagaccgttatcagtaaacaggatgaaggcgcggaacaacgcattgccggtgcgctggccgcacttaacgaagcaaaagatgcacacacggccagcatgggtaaactcagcgacattgaggcttccattcagcgttgtgagcaggaacgacagaccgccctcagtgaaagtgcacaggccgaacaggactggcgcagccgctttcgaactctgcgcggcaacctcactcctgaactgaaagctgaacacagtaaacgtatcgccagccgcgaactggctgatgagttcaccggtctgattaccgagctggagaaagacaaaagcctcgccatgcttggtgcatgctcttccggtacggcttatatcagcgcccatgaaaaagcgttcaccacttacgccaacagcgagtggaagaaggcgttagccggtatcagccccgcactgttacgtgcctttctgttgcgtattcggtcgctggaaatgagcggagaagcctcgccgcgtgcgaccgtgacccgtgagctgggtgatgccctgaatctgcggtcagccctgtatcattttgatatggagcaggagccggtcctgtccgtaacgggcatgaatcgcccggtcataaccggggttgatatggcgctgttaagaagcccggccagacggatgaagcttgccgctgaactggccgcaaaagaccacgaacagccagagggctga

SEQ ID NO: 192840 - DNA, 267 bp, Klebsiella oxytoca
atgcacactgctttttcttccccgtcttctgcccctgccgcgccgctgatgccggtttctgataccgttcacgagcgctttatccgtctgcccgaagtgatgcatctgtgcggcctgtcccgctcaaccatttacgacctcatcagccgggaagccttcccgaaacaaatctccctcggcggaaaaaatgtggcgtgggcgcagtctgaaatcaccgcatggatggcggatcgcattgccgaacgcaaccggggctatgacgcatga

SEQ ID NO: 192841 - DNA, 195 bp, Klebsiella oxytoca
atggctacgaccctcaccccgtcacacccgcagtttgtctttgtgtttgccgccgttcgtcgcgcagaccgtaccccccgtatttgtatgctccgcaccgttgccgatgatgagcactccgcacgcctttctctcgttcgcgattacgttctctcgttcgctggccgtctgccggttgcggaggtgcgcgcatga

SEQ ID NO: 192842 - DNA, 228 bp, Klebsiella oxytoca
atgagacacaccaccattaccgcccgtgacctcgaatgtcttgagcatatgcgcaatgtcggccagctcgtcggcgacctgatgcaggtgcaggactgcgcgaccgttaggcgtgacccggcgcagcagttacagctcacctccgtgatttacctcatgaccacccagctcgacggcgtggtcgaacgctgcaatcagcagtggctgaccggggagggtaacgtatga

SEQ ID NO: 192843 - DNA, 2343 bp, Klebsiella oxytoca
atgaaaatgaacgtaacggaaaccgtaaaacaggcgtgcggccactggccgcgcattctccctgcgctgggtgtgaaggtgattaaaaaccgccatcaggcctgcccgatttgtggcggtgatgcctgtagcgatcgctttcgctttgatgacctggaggggcgcggcacgtggtactgcaaccggtgtggttcgggtgacggactcaggcttgtcgaaaaggtgttcggtgtaaatccgtctgaggccgcccggaaggtgaatgccgtgaccggcaacctgccgccggttgccccggaagtgattgcggccgcagaggctgcaaccgatgccggccgcaaagcggcggctgcactggccgtcaggctcatggagaaaacccgaccggccaccggcaatgcctacctcacccgcaagggtttccccgttctggaatgtctgacgctcaccgtcatgcataaaaccggcggcgtgacgttccgcgccggggatgtggttgtcccgctgtatgaggataccggcgcactggttaaccttcagcttatcaatgctgacggtctcaaacgcaccctgaaaggcggtcaggtcaaaggggcatgtcatgtcatcgaagggaaaaaacaggccggaaaacgcctgtggattgcggagggttatgcgaccgcgctcaccgtgcatcatctgaccggggaaaccgtcatggtggcgctgtcctccgtgaacctcctttctctggcgagcctagcccgtcagaagtacccggcctgtcagattgtcctcgccgccgaccgtgaccttaacggcgacggccagagtaaagccgctgcggccgcagacgcctgtgagggcgttgttgccctgccgccggtgttcggtgactggaatgatgcgtttatacagtacggcgaggaagccacgcgcaaaaatatttatgacgccatccggccaccggcgcaaagcccgttcgacaccatgagcgaggcggaatttaccgccatgagcgccagcgacaaggccttgcgggtgcatgagcattacggcgaagcactggcggtggatgcgaacggccagctcctgtcccgctatgaaaacggcatctggaaaaatatccctgccgccactttttcacggaatgtggctgacttattccagcgcttacgcgccccgttctcatccgggaaaattgcctcggtggtggagaccctgaaactgattattccgcagcaggatacaccggcgcgtcgtctgattggctttcgcaacggggtactcgatacccaaagcggcctgttcagcccgcaccacaaatcgcactggctgcgcacgctgtgtgacgtggattttaccccgccggtggaaggcgaaatactggaaacccacgcgccgaacttctggcgctggctcgaccgggcggccggtaaaaatccacaaaagcgcgacgtgattctggccgcgctgtttatggtactggcgaaccgttacgactggcagctctttctcgaagtgaccggtcccggcgggagtggcaaaagtattctggctgaaatcgcgaccctgctcgccggagaggataacgccacgtcagccgatatcgacacactggaagacccgcgcaagcgtgcctccctgattggattctcgcttattcgtctgcctgaccaggaaaaatggagcggtgacggcgcagggcttaaggccatcaccggcggcgatgcggtctcggttgacccgaaatatcagaccccgtactcaacacatattccggcggtgattctggccgtgaacaataatcccatgcgcttcaccgaccgcagcggcggggtgtcacgtcgccgggtgattattcacttcccggagcagattgcgccggaagaacgcgacccgcagctcagggataaaattgcacgcgagctggccgtcattgtgcgccagcttatgcagaaattcagcgacccgatgaccgcccgcgcactgctccagtcgcagcagaactccgacgaggcactcagcatcaagcgcgatgctgacccgacgtttgatttttgcggctatctggaaatgctcccgcagaccaacgggatgtttatgggtaatgccagtattatcccacgtaattaccgtaaatatctttatcacgcgtatctggcgtatatggaggctaacgggtacagaaacgtgctcagcctgaaaatgttcgggctggggctacccatgatgctgaaagagtacggcctgaattatgaaaagcggcacacaaagcaggggatacaaaccaacctgtcgctgaaagaggaaagctacggcgactggctgccgaagtgcgacgaccccgcagcaacataa

SEQ ID NO: 192844 - DNA, 531 bp, Klebsiella oxytoca
atgcagggaatagttaagacagtgccgctgttatgttttttactgctgggctgtgatccggcagaaaaagaagcaccgcgcggcagcgggaagagcagctacgtggcggctaatctgctgggctataaccatatggcaggcacgaatatcaactggttctctgttaacggctaccggggacacgccggggggtttacctgctgcatatcgctgccggaaaaatggcggcccaatatgcaggtggcagtggagtgggaggttaaccctaacccgtttccgaaggatctccccagattcagcgaccctaagtatgatgaatatatagaaaaacacagggctaactatcgccagtataaagcggtagccactattcccgaatatgaagattcctgcggcctgcaggtgcatttcttgccctgtcagcagattaaagtaacggccacctgccacgggccgacccatcctgaccacccgattaaagaacctttcgatctgccggagtctgcccagtgcccgccagaaacgccatga

SEQ ID NO: 192845 - DNA, 1533 bp, Klebsiella oxytoca
atggatatagaaaatgagttaacaagaaaaatccttgacccaattcatggtattatccgtttgactgctttagaaatagagtttatcaatcacccactttaccagcgcttacgtaatatcaaacaaaattcttttttatataaagtatttccttcggcggttcatagccgatttgagcattccttaggagtgcttcatttatctaatgagatacttaagaatttgcatcttaatactattcgttatggaaaaaaatatgatgatgggcatgtttttaatacggtaagtcttattccaaagcacaatgttcaggagttgagacttgcggctttgatgcatgatataggtcatggaccgatgtcccatcaatttgatatttttatgcccacaaaaaaagaactaattgagttcttggataagaaatatcataaggttcttgatgttttaacccaagaaaatgatcaggttgaacatgagcacttatctttgatattttgtcttgttatatttaatgatctaaaaaaacgatcgcaagtaagcgaagaaatagatgtggaaaatatatttaagataatagataaaaaatatggtaatcaacagattctgacaaaggtctgtaataaagaagttgacattcttccgttgatgacatctataatatcatcatgtccaatagatgcagacagaatggattacttgctcagagatagttatttttctggtgtaaaatgcggtctatatgattataatcgtttgttcatgtccattgtgcctgtagaagaaaatgacaagatatatcttgcctataaagaaagtgggcttgattctatcgctgaatttattggtgcgcgctccagtttattctctcaggtctactttcacaaaaccaacagagcattttcctctatgctaaataaattatgtgaggttatgataggtaagtccaataaaaatttaataatctcagatatttatgagggttctgcatccgtaccgggtcctgatgatggtattaaaccactaacagatttttatatagattgtagtgatgactatttcttaaatgaaaaggttgcagagtgggtcgacgaaaccaaaactgtagacataaataaaaaaatattagacgatattattaatagacatccgtggtcaaagatttatgaggctaagcattcacttaaaaatgcaagtattacggataaagacaatggagagttaaggaggaaaatacagactagattacagcctattttgggagcccattttcaatcacatgaatactttattgatgttgtatctgatacagcattcaaagatattgataagaccgagattaaacttctaattaaaaatgttgataatacatataaaataaaatcattgagtgaatgtggtgataagttagaccagtatcaaagtataaagtactttattcgtgtattcattgatcgtgatttaaaagggaaagtaccctctaatataatcaaagagattaataatgccgtcatggaagaagtgacgccttcctaa

SEQ ID NO: 192846 - DNA, 1635 bp, Klebsiella oxytoca
atgaacttactcaaagataaacaaaccataaactctgcactttgggcggccgctggtgatgctattggttggatttcagagcttacagatgagcagggactgaagcgcagaacaggtgattcttatctggttcaccctgtaggatggaatagaaaaattggcggttattctggggtaactgtaagacttccagctggaacatactcagatgacactcaactaagattagctgtatcacgggcgattagagataatggtgaatttgatatagaatctttcgccaaagtcgagcttcctgtatggctatcttatgcattgggtgcaggtcgtgcaactaagtgggctgctaataatctattgcgcaaggatactacttggttttcaaatttttataaaacggacgggactgaatatattaatgcaggcggtaatggaaccgctatgagaatacagcctcacgtttggagttgtaaagatttacccggaaaagcatacactattccagtaataaaagactcacttgttacccatgggcatttgctagccgtttgtggggccgtaatacatgcggatacgttgcaatatgcgttgttaaatagtcagcctgttaacatatctacacttggaagaattattgacgacctttcatctttgccagagaagattaatagtgtttatgaattaaaaaatctgtggttacccaattgggaagctattagtaataaaaaattagctgaagaagttgaaaggatcaggatagagacaaaggaatttttatcaaaagctgttgaagcagctaataaattcagtgaaccatcggagcagtttagtgcttcaattaaagcgttagagtgtgataaagattccagaagaggtgctgcaactaatacagccattgctagtagcctcttgtgcttttattttaaaggattaactccttacgaggcaatgattacttgcgttaatcaattaggtaccgatactgactctattggaagtatggctggtgcaattatgggttgttataatgaaatgccccgttgggatatacaagatagccaatatataattgatgaggctatacgtttaaataaggtttcacagggtataccgtcaagtagctttatttatccaaatattaataaatgggttcctccacaaacacagagtgatagtttagttagggataatgctggggagtattatgtcttgggactcggcaaagctcaagccttaaacgaagaagtgtggaaaacaaaaacagcttcttggcagtggatgaagcttgaatttggccaaacgattcttataaagagcaaagttggtgatattaaagctatagatacacctgtactccgtaacagtgaacctatgcgcaccacagagcctgtaatggttaataagtcgtctaagttttatgataatgatccgcagcgtaaatttgattacgaagatacgaaattaagtgatttgaatattgatgagattacaaccttattgattaaagatgggtttaatgagcaaaaagttggtcattttctcattgaattagctgataagaaaggaattgaggcgtgcattgcatttgcggctatcataggtaaggcctttgtgactcgtaagaaaaaacagtaa

SEQ ID NO: 192847 - DNA, 663 bp, Klebsiella oxytoca
atgactatacaagattttataaaagataatgatataattgaagttttgcattttacaactgaaagaggactaaccggttgcgcaagtaagaaagaagtactttctcgaaaggctttggatgaagaacagtatcttagccatatagcaactccagtctctagcgaaaggaaagaggctcaggctacttttaataaagatgaaaactggttggattatatcaacatgtcaattggtgagattaatactcattattttcgctcagccattgcaagatctacttgtctgaataggtggtggtgtattatgtcgttcgaaccaattatattaacacatgacggcgtgtattttaccacaacaaataacatttacactggggtaaaaagagcatctggaatttcaggtttacgagcgatgtatagtgaaaatattacccgttggtatagtaacgttatctctcgtaatggaagacataaatctctgccaacttgcgagcaagcggaggttttgtatccgaatcccctaagtttggactatcttcggtgcgtatatgtacaagatcttgcgcaagcagcttcgatccatggaacactagtgagcttgggttttcaagatgtagatgttattatatgcccagataaattttccggtgtgccaaatatataa

SEQ ID NO: 192848 - DNA, 1398 bp, Klebsiella oxytoca
gtgaaaatactatcaaatcatcaagcaacacgagaacaattaccaatagtcagtcgaaataccccaggtgttgtggttatccgtggcgcagcggggagcggcaaaactacaagtgcactgttacgtttaactgcaatagtgaacacactatcttacaggagacaacttgataatgacccaaccccaataaaagcactagttctttcatttaataggactttatcaggttatattgaaggattaattaatgatagtattaacgcgggatttattccggttgaagttgaaaatgatacgtttgctaattgggcaagaagacatattaatacagttttaataaacgacaaagtacgcgactcattcttatgcggtaagtctttagatttaggatatgaactggattttattcttggcgaaatagattatatgaggggacgttttcgaagtcctgatttagaacgatatttgacggttgaaaggactgggcgaggattatcaccgcaagtgacaagaactaccagacaaagattgataaatatcgttagacaatacgaggattatttgattgcgtgtggattagatgattggcatacgcaatgtgaaaaaatgatcaacaataaatgcttggattacgatattatcatcgttgatgaaacccaagatttttcagcgaatcaaataagagctattttgaatcatcttaaggatgactgtttcttgacttttgtgattgatacaaggcagcgattatacccaagaggtttcacttgggctgagactgggttggatatgagaaatacggcttattatcgattgggagaaaatcatagaaatactattgaaatagctacttttgccgcttcaattactgacgggttaacaattgatgacgatgggagtattagtgattttactcaaaccacaagacatggacctaagcctgttgtatgtaaaggtttctattctcaacaagtacagtacgccatagattatattcgtaaaaatgttaatttagaaaatgaatctgtagctttcttgaagcccaaaggtggtcagtggttttcagaaatcgaaaaaaaattgaatgataataatctcccatatgtaataattactaagaatagagtatggccaagaggacctgagaatattgcattatctacaatgaattcagctaaagggcttgagtttgatcatgttataatccttgggttaagtgttgcaaatatgcgacatcaggaaggtgagtatgatgataagcttcaacagttgagaagattacttgcgatggctattagtagggcaaaggaaacagtaatcattggttataaagagtctgaaaaatctgatttggtagactatttcactgatggaacttttgatgaggttaacctttaa

SEQ ID NO: 192849 - DNA, 1326 bp, Klebsiella oxytoca
atgcaacatttccaagctcactctaccgatgacttgcgtcatttaatcgctgaatatgggcaaaatgcgctatttcgtggacaaaccacccactacggccagccaggtcacccctctgttgtcgcatcctccgatcgtcaagtatgtcatcctagtacaatgttaaaatggtgtacctactctcgaaatgtccttgagactttccttggcaggcataaaaacgagccgcattttgtccaagctcttctccagcattatggatggcggtcgttttacgttgattgttccgcaaattccgcagtcagcacatggtttgctagtcatatataccgcgaagataaacatattgagatgagtgaagactgtaatgaagagccagtcttacttctcaaacgcctcgcatcatatgattttgaggacggtgacggtcatctctacattatcgacaaagaggaggccttaaaaattggattagtcgatctttcttctgtgacgcttcctggttgtcgccctcgtacaatcgctcaggaagcttggttactaggaccactattaggaaaccccgtccccaaagaatgttttcgtgctcagatcacagccccgcgttcagtcttacgggactatgcattttcctctggctttacttgcatagatgatatatttccatccacagtagaagatccaatcctcaatgctttactgagtttgccttggagggaaatcaaagaagcatgggatcctgatttccctattccttggttcaaacgaaccctgagcctccctgaatatcaggatagttttgtaaaaatagcatggcctcataccgcatttttccgaggaacacgtctgtctgaacgatttagttcggtcgatggaaatgcttctggcggaattattattccagttccggacgtcgttttttttggaactgcacctgaaaccatccctcttcgttttcctgaactcgaagccttattgcttaagtttggttcagtcattcttgaactggatgaacttatccagcataccagtatgcaaaacctcacctactaccaaaaaggtgtcagtgtcgtaatgattgaagccgaccttattcaggtatcagaactcatggttgaacatcccggacaagaaatgacagcagcaggattagtctatggctggtattaccgaaaaagtgaaagcggattatggtcaagagttgcacatcctgatgaatgtccctgtaatgatgcctttacacacaatcgacatttatcagcactgaaaattgctgagaattttctccatagctcgccatttgtggaggaaactgatacaccgtga

SEQ ID NO: 192850 - DNA, 1515 bp, Klebsiella oxytoca; identical to SEQ ID NO: 105281

SEQ ID NO: 192851 - DNA, 615 bp, Klebsiella oxytoca
atgaatgtccgtatctattgccgcgcatcgacagaaggccaacatgccgatcgtgcactgattagcctgcgcgaatttgcgcaaagcaagaactggcagattgccgaagagtacattgagaatgccagcggtgcgaagctggatcgcgtagagctaatgcgcctccttgcggaagctcaaccgggtgatctgcttcttattgaagcgattgaccgtctcagccgtcttaaacatgaagaatgggctgaactcaaagctacgctgaatagtaaagggctggttattgtatcaatggatttgccaaccagttggcagatggttgaaatgtccgggaatgaccttaccagtggcattctgcgtgcagtcaatgcaatgctgatcgatatcctcgcgacaatggcacgacaagattatgagacccggcgtaaacgccaggcgcaggggatcgcgaaagcaaaacaggcaggtttgtacacggggaaagaaaaagacctggtagcccgtgaaacggttcgcgaaatgctggcacagaacgttaaaccagctcacataatgaaagcggcgggtatcagtcgcgccacattttaccgaatcaagaaggagttagtaagctaa

SEQ ID NO: 192852 - DNA, 2700 bp, Klebsiella oxytoca
atggtcgttggttcaagatggtacagattcgatttccacaatcacaccccagcttcagatgattatgctgacgacgcactgacggacagagcatggttactgtcatatatgcgccgacaggtagatgcggtgatcatcagtgatcataacactggcgccagaattgattcgttaaaagccgagttgaatcgaatgacgcttgatgctgatgaaggaggggtggaagggtttcgaccactgactcttttcccgggagttgagcttactgccacgggaaatgttcacattctggcagtattgaaccctgagtgtaacggtgtgcacatagagcgtctcatcggacaatgtaatggttcagcctccatcccgagacaactacccaatcatcagttggtattgcagaatagtcctgccggaattgttggaatcatcaggcaaaatccagatgccttgtgcatcttggctcatattgatgctccgaaaggtgttcttaccagccagcggaatttagctgagttggaggcgacctttgctgccggtccacacgctgtggaaattcgttctgatcctgcggagatagtgaatggtacccacattaggctaataaaaggtcttccttggcttaggggatcagatgctcatgagcctggtagcgccggtattcgtacatgctggttaaaaatgtctgagccaaactttgatggacttcgcaacgctcttctcgaccatgaaaattgcgtactcttcgataaacaaccgccagcagacccagccctgcatattcgcagcctcagaatacgaacccgactatgcaaggcagaaaacggagcaccagcatcggtaagttttagccccttttataatgctgtcattggctctcgaggtagtggtaaatccaccttgattgaaagcatccgtctagttatgaggaaagttgatggcttgtctcaaaaccactcagagttacttcagctatttaaacaagacgggcggggaatggatggcaattcagaaatagaatgtatctaccgtaaagatgggacagatttcaaattatcatggcatccaggcgatatccatacccttcagacatggcaaaacgggcattgggaggacgatcatcactggtcgcctgaccgtttcgctatttcagtattcagtcagaaaatgctttttgagctggcgtcagacaatgatgctttcctccaggtatgcgacagcagtccaatcgtggataaacgaacttggactgaacactgggaacagcttattcgcgatttcaaaaatgaacgtattacttaccgtgggctactttcccgacagagtacggcctcggcacttactggtgagcttggcgacattagaaggtcaatcgcgcagctgagtgaaagtgattattttccagttcgcaaccgcctggttagtgctgaaagagagttaaccgaaagcaatgacggtctggacacataccgacagttattagattcactttctgagctgctgccagataccactgatcctactgatgtagaagaggttgtgcaaaaatcagcagcatatgcttccttagaggaacaacttcagtctgctcaggcttccttatgtgtgagcatttctgacattgttactgaacaccgtgcccgtttggatcaattgaaagttaatgcggaatatatgactctggcagagtcagttgacactgaaaaagagaatgtactgaaagaagccgaacagttacgtgcgcagggactaaaccctgatacacttgatgatttagttgaacgagacgaaagggttagcactgcacttcgtgaatatgcagatcttgatggattggtttctgcttcatcaacacgcattgaacaactgatggaactcttgcaagtacatagaagggaactgacagcacgtcggcgggaattcatcgctaccctcaatcttaaagatctggacgttaaaattttaccactttctgcgccaccggaagcggttgtcactagctaccagagcactacaggtattaataatttcggcgatcgtatatacgatacggaacaacgtagcggactgcttgccggattaattaaccttaacaccattgatcaacgccctgctgtgacagaacagaaatacgccctcctgcaaacgctaaaaaatctgcacacggatataaaggaaggtgtggaaggtagtgcacaggacattcatggtgctttttccagacgactgggtcagctgactgatgataacctggatagtattatgtgctggttccctgatgacggtatttatatccgctatcgtgctcacagtggaaatctggaagatatatcactggcctctccgggacagaaaggtgctagcatgctgcaatttttgctttcttacggcacagatcctctgatactggatcagcctgaagacgatcttgactgtatgatgttaagccagagtgtgattccggcgattgtttcgaacaaacaacgccgacaactgataattgtttcgcattctgcccctatcgttgtcaacggcgatgctgaatatgtcatcagtatgacacatgaccgtcatggattaagacctgcattgtgtggtgcactacaagaaacagaaatgaagcaactaatttgcagccagatggaaggtggtgaaaaggcatttagatcccgatttaatcggatcctgagtatcagctaa

SEQ ID NO: 192853 - DNA, 603 bp, Klebsiella oxytoca
atgaaaccaccgtatgtacgctatattaaaacatctgttatagctgttgctatagtctatggcatcggtaatctcctgtacgctctggcaaccactccagaccaacctaaaatgcctgaagcaaaggttgtggaaaatatcccccctttacaccaaccagcggaaccatcaaaaccacagacaatcgacatatttccgagaatgtacacaaccggagaagtgtatgcacgatttcaagaacatgaattccgcgcaaaaaatgacttcaaaaattgccgattgatgattacagggaaaataacagatattggtactgttactttcagcaaaaagcctttggtaacattaagtattcccggttctgatgaggggctgaagttcatattcgaagatacggactccaataacgacgaagtagctgcattggatatcggaaaaccgatagtgatagccgggaggaacgcacgctcaggatcctttggtggcgtatttctcgatgattctatactaatgtcagacatgatctccaaggaactacataaacatcgacaaatccttgttcccagtggtggaatttttgacagagttatttgtcataagtaa

SEQ ID NO: 192854 - DNA, 351 bp, Klebsiella oxytoca; identical to SEQ ID NO: 105284

SEQ ID NO: 192855 - DNA, 813 bp, Klebsiella oxytoca
atgacgctctatccctctattgagtgtgaaagaaagaaggtatcaaaaatgaaaaccctaataaaaacgttaaaaatcatggcgtcaggcgttgccctcatttctggcataacagctgcctccagtaccatctatttattgccagaggcaaaatcagctggcgtagcaagcagtaatcaaaacgcgctgatgtttctcgggatggacaggaatgcgaatctaaagggaatatgcttcacaatggcaatgcaatcaccatcgatcacgccactggtagacatcacagctactactgataacggcaggttcatcatgcacgggctacgcccgaagcatagtgacgatacgaaagaattggtctgttcactcggttcagaagctggggatttcttgacaggccttgcaaagtcatcagttgttaacgtaaagctggatttcaatggggaggtccgtagttacaggttcgacacgactgaattcggaaaaatgctaacaaccaacggacaaagcgtgtgggaaaaagcagccaaagactacgctcagggagttcgtgcacccattttctatggaaacagcatcaaagcccttaaaaaaaatgcaatactgccgaatgttgaaacgcacgcttataaagctagcgatgataaactaaattctgtctggaaaagtcttagccctgaaacacggaaacgtttactcccctctcaaagggagtggataaaaggaaaatcagtttgcaagaatgaacaaaaatgtctcactgatatgacgaataatcgtattcgcgaactggaagctgaaaatggaaaataa

SEQ ID NO: 192856 - DNA, 924 bp, Klebsiella oxytoca
atgtcgatcgaatttgacccttatagtttagttgtttctataaacaatcttaatgctaccttaaaagaggttgattattttaaagattatattttgcctatagttagcctgattgtaagtggaatgtttggatacataatcgccattcgcgggtataaatggcaagaatgtgttcagaatgaacgaattaaggttgatacaattaataaaacgataatgatgtttcaggatatgcaaaataatcttgttgcaatcaaagctacatattctgacggtctgagtcatcacccgcttcaaagggcaggttatatgccttttatcatatgtgatgaaacaattatgtattgtgaatcagaacggttggtgcaggttggattaagtgataacactggtagcaaagcctggaagttgttacataaaaagaataagtgtaatattaaagcaacgccgtggcttcaggctcctacaatttttacagttgtttctaattacaatcatctgattgtactgttaaaaactagaaatcaattagatcttgatgttaagtcaatgctatcggaaaagtatggtagtgaatatggtatgggaatgactgaagataaattatatgaggcattaggtaggtctttatttgtgaagtatttcgatgcaacagaattattgatattgcaagtggataatatgattattagtattaatgatttccttactcattatcctaatgaagtgtctttaaaagttaataaaaaatatctatccaactataaagtaattgtaaattacataaacgaaactgctccctatatatctatgcttaaaagaacgccagcgctagatataaaagttatgtcttccttagtaaggatggatactgttgaagcaatgcgaaaatatagggattatacaactatacaaacaaattaa

SEQ ID NO: 192857 - DNA, 1227 bp, Klebsiella oxytoca; identical to SEQ ID NO: 174018

SEQ ID NO: 192858 - DNA, 228 bp, Klebsiella oxytoca
atgagaattacagaaataaacggtgagttttacattaaggatgggtttgtcccagtaggtggtcgctttcgctcttcagaggcagccagtcttgcgctcagtagtcttgatcaggaacaaatggatgttatgtggatggaatttactcaaaaattccctaatacctcagtagattcagattttttgagggcatatatcgaaacacttcaagaaaatacagagcaatag

SEQ ID NO: 192859 - DNA, 1527 bp, Klebsiella oxytoca
atgtttggcggacaaggcaatagcccggatattgataatactgatgcagttcttaatgctgtcgcggtagccaaagagctgagttacggaatagatttgcgtggcggtccctggcgaatctctaaaaccatcgatctcacaggtattcgacatattattactgacttttcgggacgctttctccttgatcctgaaaatttcagttatctgcatgatgcccgttttgctgtaacttttggtaacccggatacccgctggagtgatgacagggcggtgaatgtctgcgtcaacggactattacagatacagtgcgacagcagaaacagcctgtctaacgggattttcattaagggcgctctgataacgattgaagcaatgagagcgaccggattcaatggtcacggtatattcctcgggagcgtatgggattcagcatttaagtctgtttcagtagagctatgcggcaacattgcatcctatgcatttcagatttccgcctttggtgatacgtcaaactgtctgtggataggtcgtttacaggttgaacgggcctaccataaacaaatgagtatcaacgttatccgctctgaaatacatacgattcatgctgagcggctgatgatactgaccacagatgatggcacaacgctttcaccctctggacttacctatcaaaattcaaatttattattgagtaatagcgtacttggccaggtagtactggatgcaatgtcttctgatgatgctggcacggtatcgataacacctgctgttacactaaatctgtatgcttcgtttgccagtgcactgtcaatgaataccagcatagtttcgagtacctatggtgactatgcagcgattacggcctcatcattccggggttactataaccatggacaaccaataactatctgcaatagccgcatgtcatattcggacggaagcggggtttgccgtatggtgaatggcgtgctgttcaattgcaccattgacaagctaattccacattatggaacaaacgggcttactgtcatatcgtccactattatcagtgattttgatattgccgctgatactgtgaataacatcacattttactcgtgtatgttcaatggagccgtgaagcggacgcagtctccggcaggaaagcctgtcacattcattgattgtaatctggcacagctgaattcgtactaccaacacaaagcggatttccgtggaggctatattgcgcaggtcaatctggcgagccgggctttcgtcaatctttctggcgtcagaggagccatattctcctatgtcgagggcggtgaccgtggctttacgacaaatgattgtatttttgattctgtgacgcgctgggggcctccgacgcatggttcttttcctgcctgcgttcgcacgcagcgactgggtaatatgaatatggttgataacaaagtggtgaccacagtggttgagtatatcaacactgcgaataatggagtctcttttgctccgttgcttacttatacaccaaccagctaa

SEQ ID NO: 192860 - DNA, 267 bp, Klebsiella oxytoca
atggcttacgcaacaaccaacccaccggctttacttcaggatcgcatcggcggcggtggtgctgcctggtcttactcttcatcggacctcattgcagccgttacggctgccaactacatcaccaacggcaaagctcttggcatgaaagttggcgatgcagtagtggtttataacaccacattaccgatgtcttattccgcatttgtttcggctgtaacggcatccggcgcaacgctgaagctggctactgccacagcatcggcgtaa

SEQ ID NO: 192861 - DNA, 585 bp, Klebsiella oxytoca
atgcttcagaacagcgttttgttgccattgcaaaggccacctccgggtggcttttttaatggctttaaccaagagaattcaggcatgacaacagttgcatgggatgggacaacgctggcatctgatagccagtcttcctctggtgacatggtgtgtacgttgcgggagcagaaggttttcacaccgccagagaatgagcaatggtcagtaaatggtgaattagtcgttgctgttggtactgctggtgattgtggtattgaggcgcaactgtttgggctaatgtcgaaaaaccttaccttttcaactgagtttacgcctgagccggattttaccgcgctggcaatgacagcaaatggacgcgcctggattatcagcaaaaaatcaggtgatgcgcacgcgtcaatcagccttcaactagacagctacgcaattgggtcaggtggcctgattgcgttgtctgctatgcgatgcggaaagaatgcaatcgacgccgtgaaggttgctgtcgagcttgacctttacagtggcgggaaagttcagtcgttctcgacaaccgcagaagttaaatacgcaatacaggattaa

SEQ ID NO: 192862 - DNA, 180 bp, Klebsiella oxytoca
atgattattcacagcgatatagagggttacttattgcttttacttagcatgtacccagttttggtagttctgtgtcttgggatgtcattagcattttatggcgtgctcatgcgtaaaaccgcaattacattaatcgtcgctgcaattgctattggtgtatcaggttggagctattcatag

SEQ ID NO: 192863 - DNA, 915 bp, Klebsiella oxytoca
atgccaagtaaacgttttttctttgatttttatcaatgcaacacaatcagcactgatgctcatgccgcaatacaatctcctgaggatgtatttaataatttattcgatgtatacagtgaggcacctcaacaaacagtgagaaaagttggtagtaaactggtagaaattcggtttatggagagaaccgcatatggctataggggggttattgggaagcatcgctcaaatgaccttccgcatgtggctgtcgctggtggtcaagagagagaaattttactcgaggcaaatgagaacttactagaaaaagcgtacttccatttttacatccaagactcagttcttatcattcaacgcaaccgtttctgttatagttggttgttgttgagcaaatatctctcaaacggtactcaaaatacaactgttaacccaattattcaggcaaatagtctagaatggctacttcgcaaccaagtccatattaaaactctagagattgggatagcgcgcccaacaaatgcacaactctttgaaaatgtagaacatgattttaacaacgcattaattgcgacattaaacggaacgaattccgctaaagtaaaccttacactgagaggtgatggtcgttccgatgatcctgaaaataggtacctgggttctcgattaaaaagagcgctaacggaaactcttgagaccttcgaagttgagaaattgaaacttgaaacacaagacatcgagactggtgtgcaacacccgattgatcttgtcgccgataagttagtttactacacagatgtagagctcggaggccgctacccccttgctgcgagcatttgggatgcattaactcaagcaaaagatagtaaaaatgacgaattagcagcatactttggagtgggtgggcaaagggtcgagtaa

SEQ ID NO: 192864 - DNA, 480 bp, Klebsiella oxytoca
atgaaaaaggagaatgttaaaaatctggctaactatgtctatattttagcctctgctgccttttgtatcatcgctttaccgctttcggcaaggttgacttttgcccagattcaacctattgcatctgcaatttctacattcgccggaatattatttggtttcgtgttgggttcaataaccctgatggcctctgctaaagataacacgcttattaaaaacatcggaaaaacaggttatttaagaaagttcactgaagaaatgcactcaactatggggtggctgctttcagtttgcattatattcattatcttattattttttcctgacacattaaaatttaaaataccctacataacaaacgatgcggagtatacatatgcccaggcgttgcttcaactgggcatatttgtgttactcatcacctttaaaaaattttacattacatggctacgtcttaaggaaataacgaaacttatgtaa

SEQ ID NO: 192865 - DNA, 369 bp, Klebsiella oxytoca
atgcgtgatatgtacgaagttttagactgttggggtgcctgggctgctgctgatagcagcggagttgattggcaacccattgctgccgggtttaaagggctgctaccgcacggtaagaaatcacgtttacagtgtgatgatgatgaagggataatgattgacggatgtgtagcgcgattgcggaaatataagccggaagagtatgagttgattatcgctcattttgttatcgggatttcactacgtgccatagcgaagaggcggaagtgttcggatggaactgtccggaaagagctacagactgcaatgggatttattgatggtctaatgtatatgataagagacactgtacattttaaaattacataa

SEQ ID NO: 192866 - DNA, 306 bp, Klebsiella oxytoca
atgagcaaatccaaaacaaaagctgaaaagcttcatcttagccgcgtagccgctcttggctgcatagtttgccgcaaccttgattacggtgaatcacccgctgaaatacatcactgtagctctggcactggcttatctgtccgcgctgataacttccatgtcattcctctttgccacgctcatcatcgcactggtggttacggcgttgctattcatgccggccgtaaatcatgggaagagaaatttggtactgaaagcgagttgctggcgcaggttctgcaggaattaggggagaccatcgcatga

SEQ ID NO: 192867 - DNA, 1176 bp, Klebsiella oxytoca; identical to SEQ ID NO: 175990

SEQ ID NO: 192868 - DNA, 702 bp, Klebsiella oxytoca; identical to SEQ ID NO: 175995

SEQ ID NO: 192869 - DNA, 873 bp, Klebsiella oxytoca
atgcggttgtatgtgataggtaatggatttgatatcaggcacgggcttccaacgcgcttttgttgttttgaagcgtatgtaaaacgccataatcaaaggttgtatgagtctatttccaactttgtcccaacagaggatgaatggaatgatcttgaaagtgcattaggaagcttcaattacgatggtgcatttgaagaaaatagtggctttctaatgtcacccggagatgatgactggagagatagtgcaaaccatgattttccgtatgaaattgaacaaataactcaacgattaataaaagaactccctttggccttaagggattggatcaacgctatcgatctttctcgtgctttaacaccgccttggtatattccaagtatcaacagagacagttactttttcaccttcaactatacaaacacattgcaggatatttatggtgttccagatgaaaacattctgcatatccacggtaatgcaaaaataggacaaaatttagttattgggcacgatgtattctacgaaaactctcttaatactgattacgggccagatcaagatattcgggttagtgatgcctatgatcatatagacaattactttaaaaactcatataagccaaccgatgttattatcgattttcacaaagagcaattcctccgttattcagaggttgatgaggttctagttctgggacattcgctggctagtgtagatggtccctattttactaaaatatcgcagtctatttcaaaaaatgccacttgggttcttgccaagtatccaggagaaacgaaggcgggaaaactgagtgactatggaataaatcctagcaatatatttgaaaaaaattacgaagacttggtttaa

SEQ ID NO: 192870 - DNA, 261 bp, Klebsiella oxytoca
atgggaaacaaacgtaaacaggcgcgtcgcgcagctcgccaggcgcttaagtcaaaatcgcgtattctcggctacgagatcgacacaattatcgtagacgagctggcctccgccgcccctgctctgcccccaaaaccgaagcgtgacacttcccccatagaggcacgcaatgaggcccaggcccactatcttatctcccttgatagcaaagcactgacgttcgccactgacgttcgccactggcgaagccggctgcggtaa

SEQ ID NO: 192871 - DNA, 432 bp, Klebsiella oxytoca
ttgggcttcctgcctggcgatatggctgagaagttcgctccgttctttcgtcccgtctacgatgtgctgcagaagcgcctgggcgcttcatttctcgaatactgcctaaagcctgaggtggccaaagtcgagatcgcacccttcgcatacatgcgcggtcgcacgttcgaaaacgctgtggtgatcctcgatgaggcccagaacgtgacggcgtcacaaatgaagatgttcctaactcggatgggtgagaacgtaacggtcatcgtgaatggtgatgtaacccaatgcgacctgccgggtaatgttaaatctggtcttgaggacgccctgcagcggttccagccatctcgccaggtagggctcattgagttcacggccgaagattgcgtgcgctcagagctgtgtaaagtggcgcttcaagcctatctgtaa

SEQ ID NO: 192872 - DNA, 387 bp, Klebsiella oxytoca
atgactgacatggaaatcgaaaaagaaatcgtggccaagggaaaaacggccgcgcgagtaaccccagaacgtatccaaagcgttatccgcgccgaacattattttacggcctttgatggcagatctggcgccctggcaagtgggacctatgccggcaaagaggtgccagttgctggcgacgctgatcttgagtcgcttaaattactgacgttttgtgtactggtgttggagaacggattcgtcgttaccggtgaatcagcttgtgcaagcccggaaaactttgatccggagatcggtcgtaagattgcgcgccagaacgcagtcgctaaaatctggccacttgaaggatatctcttaaaacaaagatttaacgaggcaaaacaatga

SEQ ID NO: 192873 - DNA, 246 bp, Klebsiella oxytoca
atgaagtgtgtgatttatggccgagataattgctccttctgtaagcgggcagttgagctggcgaagcagctgcaggggcatggatatggcgaatatcagtacatcgatattgtcgctgccgggatcgataaacaaaagctgagtgacatggttgggaagccggtagaaaccattccccaggtgtttttggacgatgttccaatcggcggttacacagaatttgctgctttcgcaagcactctgtaa

SEQ ID NO: 192874 - DNA, 618 bp, Klebsiella oxytoca
atgcatttagaaaattgcctggaagatatgaatgtcattagcaatgctcttgctaccgtgacttctaacgcttcacgcttttcgaatgcaaatagcactccgaaagcattcccgaagcgtgtagacacaaaatttaagatgcgtccccgtttcggcggcatcacaaggccgacgaggccgggttttgcagattctaacgagttcagactgccgcaaacagaaggaattccggtagctgaaagcgataccgcagctcagcttgcggatattgaacaaaggctcgcagagctgacggcgaaacacgttcggttgacccataacatttcaggttacagtgcggaacagatccgcgatactttcggtgaaagccgttacgaggacttgaagaacgttgacctgtccatacgtggtttagagggctttgttaacaagttcatccgtgacgccgaactgccacatccgtacatgaaacgtttgagtgatgctatcactgagtaccgtctggcggtttctgacctcctgatgattctaaatcagtgctttaacgaggtagaagttatcgaatcgcagacaggcctcattgatgaggacgtcttcgcaaacttctccttccattaa

SEQ ID NO: 192875 - DNA, 411 bp, Klebsiella oxytoca
atgaaagtcacatggaacagtgatagttacgcccaatttttggagccggtcttcagagtaatgcctgatctgaagacctccttacttgctgactttgtgagttttaagaacggcttttatccggccgtttttggcaaagatggcccctataccgaacctggttctgtagtttcctctcgtgtttaccacgttcatctcttattcaccaagcaagaacgaaatagtcaccgaaacaggttcaactgtacaagcgaccgcgccctcgtttatacccagcacgccaagtttcaggacgtgtatagtctgctggccatcttcccgaaagaggcacacaaaacagccagtgatccagtcaaaatgagcgacatcgccaaatacgcggcagccttccagaaattaacaaacccgtag

SEQ ID NO: 192876 - DNA, 360 bp, Klebsiella oxytoca
atgatgaccttaaaatattatttacggcactgcttatggggatggtgtggttatggctatctgatttattttatagtgcgcgatatgaatgacggactcatttttcctgcctatgttccttatatgccatttgtggttacatatcttgttttaagcgccgtcctgtacccattctcatattatacttcggagaaactagcccttaagataatgaccaaacccttttgggatcgtcacattggcgtgaatagcggtgtgtatggcatgttcattattttgtggttattttgcctgccgctttctgtaccgttatttctcgtatatttatgcatacgcgcaaagactagattaagtgcctaa

SEQ ID NO: 192877 - DNA, 1101 bp, Klebsiella oxytoca
atgaaaaacacgtttgacagagcacgcgcagcggaaaacacgtcacaggaagcgatcacctatctggatcgggcatcgcagatggatgccaggtcggtctcgatgcagggtgccgatctgactttcgccgacgcatttatgttattcactcgcttatcattattgataactcgccgccggcccgagatagctgtccattgtgttttgatacacgtactcccgcacatcgctcaggaaaaagtaagtaagcttaatagaatgatggtgaatcagctggtgaacccgcttatccttgaagggaagatcgtgatgggtcgccgtgttttttccatcatgaagcaattcctgggctggtgtgccttccaggggattatcgaaacgtcgcccctgaatgatatttcgctgaacaaagttgccggcggcgcgaagacgactccgcgggaacgatgcctgacggatgctgaggtttgggtattctggaatgtctgggactatttcgacgtatgcccgggcacgaaatgggcagcaaggctttgcctcgttgctgccagacgtcccgatgaagtgctgcgggccagagtaagcgagttcgaccttaaacttaatgtatggaatcaagggtctcgcaacaaatcggcccggccgcacactcttccgatgagctcactgatgcggaaatgcgtggaagaattgatcgattatggcgccggcagccagtggctcgtcccgtcgaacaaaaagaaagctgatgcacctatgtcaaaggtggctatagcccaggcgttgagacggattctggagcggccggagctggtggaagttgagtcgtttaccccacgtgatctgcgtagaacggcgcgcagctacttcccggcgcttaaaatttcgcaggaagtatcacgtaagatcatgaatcatagtctggaaggtatcgaccgcgtttacgaccgatatgactacatggatcagatgcgagaagcccttgagagcttctcatcgtacatctcgtcgattgttgagcaaccggatttagaagaaattgaccacaaaatgaagggagatcgcctatccaccgagctgatcagagtaaacttctcatag

SEQ ID NO: 192878 - DNA, 381 bp, Klebsiella oxytoca
atgacaatggccgatgagaagaccgctcgttacgtcgcctacatcgattctttaatcactgtctcgccaaaaagtcagtcggcgatctcccgtgagatgggttacaagaatccgaacaacttatccctgattaaatcgggaaaaatcccgctgccggtcgataaagttcgtccactggctgaggcgcttaatgcagatccagtgcggctcatgatgatggtgcttgaagctcgccagccagaactcgcagaatttttacgagatgaaggcattgcgccactaacccccgaagaacgtcaggttctcgaggcttttagaaaccgctttccaagccagacagatggtgttgagcaggttgtcgaagcaattaaaaagctatga

SEQ ID NO: 192879 - DNA, 213 bp, Klebsiella oxytoca
atggaaaaattgtcatctaatttacttgctctgaatgtaggcaatgttttcgcgctgacacacctggaggctgctgaagtactatctgagttacccaatcgccaggtaaatgtcagagcgcgtgatgcgacggttttccggttctctctggaaaaaggctcttacacgctgatcaatactggcgacctctctttcgcggttcgaatcaactaa

SEQ ID NO: 192880 - DNA, 2304 bp, Klebsiella oxytoca
atggcaaccaaacccagcacaactgtactcaaagaggtacaggacttccgcgattccgtaaaacgcgtcgttggtcttctttcgggaaagaacatccctgtagctgaatgcggagatacagcatacgttcgctacaataaaaagggtgagccagtcatggttaacatcccatccataccagatgatgccaaccctgcgcttatgaatgcgatacgtggatttcttgatcacgaagttggccatctccttttcacagacgaaaaagtcgtcaaaaaaatgcgcaacactaaggcatttggtctctggaacgctctggaagacgtctacatcgagcgtcgcatgagtgaagtgttcgctggcagccggcggaaccttctgtccacacgtaatctcatgattgacaaatattttaatccccatattaaaaaggcagttgagatgtgccgcggggatcagcgagagctgtttctaaagttcttcctttgtcctgttctccgggcatgggatggccaacaaacctttgtagatttcatggaggagcactggcgcctcatcgataagcctattgccgttctgaaagagttcggcgtcgatgaagctgtccgtcgtatggatagcactgaggattgcgtcaaggttgctgcagccatggctaagatcctgcgagaaatgacggagaagccagaaggcccgttgcctgagcgcgagtcctctgcaaccaaaaagagcaaacccgagaaaaagaccaaaccagaggaagactgttcagacgagccagctgctggacacgatactgaggctcatgacgaagaggagcgcgacaggacaccagacgactttagcgctgacgatgatggtgataaaaatccagacaaatcgataggtaagcacatacctaatgatgatgaagatataaatgatacagaaagtgatactggagatagagattcaggctgtgaaaaagttgatgacttgcctgacggcggagaaacggcagtagatgagcctgctacaactctgggctcggatgcaggggaagaagtggatgatgaaggtgattacaacccatccacggatgatagcgctaaggacaggcccggcagctcctctgatgatagcgaagctgtcgaggacggtgaaggtgaaggcaaggcagacaaagacggtggcaaggagaaggatgaaggggatcgagacacctctgatgaatgcgatgccggctttgccccacacgctgacgatatgtctcttgatgatgctctcaaggcattagaaaacgtcgatgaagagataggttcttccaccgaagatgcgctggcgtcggcgatcaagtcggagctggccagcgcatcattatctgattaccggccatacaatcgctcctacgacttcctggggccaattgacgaggcggaagagcatattaagcgcgccagaaaagctttcggcgcaatccctatgtattcgcccgtagatcgctaccgcattgttccagagggcagaaaactgtttgagatgaaggtggagagacatctgtcttcctcggtgtcatctaccttggccaaagacctggagcgcgcgatcgccagtcgcaaccgtgttcagttcatccctggccagcgtcgtggacgcgtacatggggcgagtctttaccggctgtcgatgaatgacgatcgggtatttcggagaaaagaagaccacaaggcagtaaacgcgtgcgttcaacaggtcatcgacttgtcaggctcaatgggcggccgaaaaatcgagctcgcgctggcatccgcatacacactggctgacgccctagatcgtatccacgttccgaacgtcattaccggcttcactacgtatggcaatccggatgtagcaactatgtcgaaacgtgggtttagccgctttgaagcgcttatgctgccgattattaaaaactggcatgaaaaagcgaactccccagagatacgtgctcgtatgggctgtgtggcggagactttccccctgctaaacaacgtggatggcgagagcatcgcacagctggcttctctgtttgcagggcgtatggaagacaagaagatcatgattgtgcagagcgacggcgccccatgcgctgcgggagatggctttagcaaccatctgcgctctgtaacgaatgacatcgaaaacacaagtgacatcaacctgttggccattggcattcttacggacgcgccgcgccggtattacaaaaactatgcgctagtgaataaggtcgaagagttgggtacgtcagttgtcagcgagttatctcgtatcattttagagtaa

SEQ ID NO: 192881 - DNA, 1233 bp, Klebsiella oxytoca
atgaccgcgactgcgctaccacaagacgcccactctgatgccgtcacctgcaaatggtgcggaaaatccttccatcacctcaaatcccacatttcgatgggtcgttgcgaaggaattccggaagaagccaaggggcttggtgtggatgacgtagtgaaaatgtacaccacagcattccctggggaaccaacgctgtctccaaaggccattgaagcgttaaagaataaacgctctgagaaggctggcgcagacggcaaaatcgcggatatcagttcccaccctggctatgcagggacagtcgaatacaaaactgagcttgtcgccgcgcacgagctgcttggcctgactatcaaggaacttggcacaccccgaggcaaaccccttcaggtgacggtcaacatcaacacgccatatccggagttcgtgccagaagtgaaagccggctatgtatacggcgacttcgatctgattaaagacatcttcatgatgctggagatcggcattcctggttatctatggggtcatgctggtacggggaaaacctccctgccaacccagctttgcgcgctcctgaatcgcccggttatccgctcacagcatacggcatcaactgaggaagcccatattacgggccagattctggcgcgagaaggcacaacctactttgaacctgggcttctgtcgctggcgatgaagaacggttgggtctatctggcagacgaatacgattttgcattcccgcagattctggggatctaccagccagttctggaaggcgaaccactcgtaatcaaagaagcgacaccagactggcgtcgcgtggcgccgcataagcgcttcgccttcatcggtacaggcaacactaatggttcaggggatgaaacggggctttatcaaggaacgaacatccagaacgcggctaacttctctcgctttggcatcgtatctcacgtcaagtacatgaagcctggtgctgaggtgaacatgctggtcgaagcgggaatcatccgtgaatacgccgaaaaaatggttaagttcgccaatctggtacgagacgggtatgagcaacacctgatcagccaaccaatcggcccgcgtgagctgcttctgtccgcaaaaatcggaatgatgcgaggtgatttcgcagccggcatcgagaagtcattcatcaataaactcccctccacctctgcgcaagcggcgcgtgaagtggttcagaaaatcttcggttaa

SEQ ID NO: 192882 - DNA, 2364 bp, Klebsiella oxytoca
atgaaagcactgatggtcaggactgatttttccctgggagaatcagcactgaaggcagagcacgcagtaaaggtagcaaaggaggctggctacaccgcggtgatctctgctgacacgatgaatatcgccagcgttatccccctgcagcgagcagctggcgatgagatggcggtgatctgtggtgttaagctgaatgttgtcgacgatccaacatacgagtaccgggctaaactggctaaagagtctaatggatgtatggaatcattggagcgtggacgtaacttctgcttcaccgcactgattaaaaacgagcaaggttatcgcgacatttgcgaactaatgactttagccaatacccgcgagcagttttacttcgtaccacgcctggcgctcgaacagctggcggctacttacgctaaaggcaatatactgttgctgacttcggatatcggcagcgtattccagcgcccggacttcgctaaaattattagcgcgctgattactgccggcggacgcgagaatttctacagcgtagtttatccgcaccctacgccattctatgaccagatcaacgtgcgagccatgaaagtggcaagcgcactgaaaatcgagcccgttgcgttttacccagcttattacgaaggggttgatgacgctgacatcaaagacatcgcccacatggtgatgaacaatatcaaagtcgatcagccacaccggctgcgtatcccccaccagcgcgacaatgcaataaatggtcgtcgtcatctgctgcaggctctgaaagagttttctgtccgtatgggcgtatctgtgtctgccgccatggcttctacaacgcaggactccattgttaaggcgtgccaatggcgctggcacgagatggcgccggcgctgccaaaaatggcagacgatgagcccgcaacgttgatgaaactggctgtcgcagggcttcgaaaacgtctcagcaacaaagaatttggctacacgccaccagcttccgagcaccgcgtttacgtcgatcgcctcaagtatgaaatggagacgctcactcgcctgggattctgcggttattttctgatggttcgcgatctgatgaatcatagtcgcgagactggtattccggtcgggccaggtcgtggttcatccgccggctctctggtggcatggtgcatcggcattaccaacgttgaccctatccgtcatggcctgctgttcgaacgtttcattaaccctgaacgtctcgacttgccggatgctgatctggactttagccaagcgcggcgccatgaggtgatcgagtatctgaatgcccgatatggcgaagagtatgttgcaggtattccgaacttcacttatctgggcgccgcttccgcgctgcgcgacacagcgcgtatttatggagttgatgcggcggatatggctgtttccaaggagctaaagaccctggaggatgacagtctgtctctgtcggagctgcgcgagcagctggccagtctggacaagtacgccaccaaacatccggacgcatttaaggcggcgagcaagttgcaaaacctgatgcgtggcttcggccgccatgctgcagggatgattgtcgctggcgtacctctgacggaacgtacccctgtagagcgacgtggagacgcgcgttgcatcgcattcgataaacgatactgcgaggccatggggctgatcaaactggacgttctgggcctggccactctcgatctgctggatagcgcaaaacgttacatcaaagagagcaccggtaaggacatcaacctcgatgccatcccactggatgatcgcaaagtacttgatggattcgccgcggggtatacgcaaggtgtgttccagcttgagtccggccccatgaggaagctactcaaagatctgggtggtggtatcgagccaatgagcttcaaaaccgttgtggccacaactgcgcttttcagaccaggtccaattcagtcaggtatgttggacgactatgtctccgtggcgaaaggttttatggctccacattcaattcatccgcgtcttgaggaagcaactaaagaaaccaacggcgttttactctatcaagagcagatcatgaaaagctctcgcgtactcgctggattctctatggctgaggctgacgctctgcgttccgctatcggtaaaaagaacatggataagatgaaagcgatcggcagcgattttgtagaacgagcgcaagcaggttgggtgacactgtcacttgaaaacggaagcacagtagaagtccacaaaaaggccaagctgatgtgctctgacggcaaacgcagaacctatgacgaagcgattggtgataacgctgatattgttgattttggagtttga

SEQ ID NO: 192883 - DNA, 696 bp, Klebsiella oxytoca
gtggaagaaatttggaaatccattcctgagtttgaaggttattacgaagcatccagtttaggtcgcattcgctctttagatgttatacgaacagcccccaatgggggcgaatgggtgaagaaggggcaaatcctcaaacctcgcgtaatcaatgattttggacatctgggcgtgaaactaagcgtcaacggcgtcaaatgcgaccgcacagttcattatctggtagcaactgcattccacggagaacgaccagaaggcttacttattcgtcatcttgacggaagaccatcaaacaatgcgccctccaatctcgcgtatggcactcaagtcgacaacatggctgacgccattgcacacgataccgttgagtttggtgagaggcgctacaacgccaagctaaccaacgaagtcgtcattgctattcgcattaaaaagtcagaaggcgctctgaacaaagacctcgcggccgaatatggtttaactgagctttacattcaccatatcgtcaccgggaagaaatgggcacgagttggtgggccgatcgttgtctcaagagcatccaaaaaactggatgctgaagcaagagctgaggtggtcgccttgcgcaaggctggcgcaacctatgaaaagttgcgagaaaaattcggcatctctaacactcaaatcgcaaatatcttaaaaaaagctagcgtttga

SEQ ID NO: 192884 - DNA, 1170 bp, Klebsiella oxytoca
atgaaaattgccaaagttatttccgagcaggaaggtcttagccctgagaaagcccaagaagtatgggacgcctttgagaagttcggtggatatgccttcaacaaatcacactccgttgcctactcgctgatcagctatcagtctatgtggttaaagacacattaccctgctgagttcttcgctgctgctctcaccattctgggcgaggataagcaccaggggctggttaaggatgcgctgacctatggcattcgcgtattgccaccagacgttaacgtgtcatctaaccgaattgagatccgcacgctggaagacggcagccaggtactttacgccccgttctctgcggttaaaggatgttctgaaaatgggtgccaggcaattatgcgagcgcgtgagaaagttggcggcaaattcgagtcacttgagcaatttgaggaagcggtcgagaagcgagcctgtaacagccgagtacgtgagtctctacaaaaggttggtgcattcgcctctattgaacctggcagtatgtcggcgaccgatccggaacgtctgcgcgatcaggcagagctgatgggcaatctggtgatcgatgcggtgaaagcttcacgcccatttgaaatgaacccaaaacgctctgcagaggtcaatgtgctgatgactcgcatggccgcagaaatgggtctgggcgatgagttgatacgaccaagcatcggcattaagccaaaaattatggtcatactcgacaacgccaatggcaatgatgcacgtaccggctacttcatggagaacggctacgatgacttcaaagccaagttgctggtttctggtgacctgcgtatgggtgatttgtatgtcacaggcgtgtgtaaaaaggtaaaggataaggaaaaagactacaccaaagatgagatcggccagtttatcgactttatgcgggaagagataaatctggttcgtccaacttacgtgctgacgtgcggcagccgggcgacatcgctgtttaataacaagagcaagccatccgatcttgttgggcgcaaagaatatctgccagacctggacgtgaccgtgttctatggatttaacccgaatattttgtacttccgtccagaggaaggagaaaagctggaagccattctggcagaggtagcggagactattaacaaatga

SEQ ID NO: 192885 - DNA, 426 bp, Klebsiella oxytoca
atgagcgcagcggataaaattgcacaagagctcacagcaataccacaggagtttcaggataaggcgattgaagccactctgcgatcccagttctgggaaattattgactgccctgtcacgctcgatctggcattggcgtttgcaaagcaggatggcgccgaccctatttgtcgattacggaaatgcgcgcgtgcgctggcattaaaaacgcaagatccaaaggcgtgccaatatctgctggagatttatgaatctgacaaaccagaagaagagctggcttcatttaaagcgttccgtgcccgtcttgtcctgaaggtggccaaggagttcatggaggtgagcaagataggcgacgtcagaagataccggcttaagaggcagaccagagtcactctatcaaacattttcggtagaaaagtagcataa

SEQ ID NO: 192886 - DNA, 216 bp, Klebsiella oxytoca
atgtctaacaaaatgactggtttagtaaaatggtttaacgctgataaaggcttcggttttattaccccagcagacggcagcaaagacgtgttcgtacatttctctgccatccagagcaacaacttccgtaccctggaagaaggccaaaaagttgagttctctattgagaacggtgctaaaggccctgctgcttcaaacgtagttacgttgagctaa

SEQ ID NO: 192887 - DNA, 432 bp, Klebsiella oxytoca
atgagcaccgaaatttacgaaaaaatcatgaccgatctggagttcgatcgcgacaatcttgaagaggtctggcggcagcaaccgaggctgttgatggagtacggcgcaaaactagcgcgcgcagaacgagaggttgcagatgctaaactatccctcgatgccatagaggcaaaaatttacgacattgaacgtaagaatctgagtatgaacggaataaagttcaatgaatcggtactggaagctaaggttcgcacaagcccacaataccttgcgaagcgccaaaaactggatgacgcacgtctgatcgctgacatctataagcacgctgtcaccgccttctctcaccgtagagacatgatcgtgcaggcctcgaaaatggctatcgtagagattgaacgactgggcgccgaacgcttcaccgccacccgataa

SEQ ID NO: 192888 - DNA, 1008 bp, Klebsiella oxytoca
atgtctaagtcattacttgatctgcttaacaagacccgcggcgatattgcttccaaacgaggcaacaacgtcgacctaacccgcctgaaagacggtaataactatctgcgcatattccctaacaaggacgatcagaacggtgtgttcttccagactttcggtatgcactacgttaagcatcagaatgaggagggcaaagaagttaccactgcctatatctgcgaacagcacacccacaatcgtgcgtgccagctgtgtgagatggtgatggaaggtcgcgctcgctacaaaggcaacaaggcaatggaagagcgtatcggccaaatgcgcgctactccacgctacctggtcaatggcgtactttcagctcgtgaagactttggcgacgcagaaaaatgccagctgattgagctcccgtccactgtgttcgacgatatctgcaaagtgatgtctgaggatatcgcagatgatatcggcaacccgttaagcaaagaagaaggctatgcattcctgatcaaacgcaccggctccggtcgcgataccaagtacgacgtatccccaaaacgtaaagtctacaagggcgatatccctgaaaaactgtggtcgacccagcatgatctgatcgcttacgccaatcaggctgatgaaactcgtctgctgtctaccgttcgcaccatggggcgtctcattggtattgcagcacctgccgccgccaccgctgctatttccgcaccagctgctgcaagcgcagcaacgctgcctggttttggcaccatcactggccatacggaaggtgcagctgctgttgccacgacctctaccccggaaccagcaaaaacatctctggtagacgaagagatcttacgtgccgcagaagctgagttcgtaccagagccggaagaagttaaagcatcagctgctgccgccactaccactgcagccgcgaccagcacttctaatgacgatgagggtcttgacgatctgctggcggaattagaatcgctttaa

SEQ ID NO: 192889 - DNA, 945 bp, Klebsiella oxytoca
gtgaattatctctttgtggacggtaacagcctgggctattaccaccagcaatctgacaaattacataacggcgaaatggaagttcaggcggtgtttggcttcgtcaaaaacgttcgtcgctatgcgtccattcttcacgctcgccccatgatcctgtgggacggctttagcgacaagcgtcgcgactattacccggattacaaagcaaatcgcgatgaagatccggaaatgaagaagatgaaagaaggctttgcagtccagaagccttacatcctgaaaatgatggcagcccttggcgtcaaccagctgatcgccaaagacgctgaggccgatgacctggcggggatgctggttggtcgtcttgcgccacaaccaacggtcgatcatatctacctgctcaccggcgacggcgactggctgcagctggttcgagaaaaagtcagctgggtgagccttcgtgaagacgccaaacacaagcaggtgaactttgagcagttcccagagctgatcggcctgcctactcctcgtgctttcctcgaagccaaagctctgcagggggatacctctgacaacatcaaaggtgtaggcggaattggtgacggtggcgccaaggagctgctgcacgaatggggaagcgtcgctgctatggtgcgcggcattaacgacggctcgatcgtcatcaataaaggccgatacaaaacggcattcaacaaactggccaaaaatgccttcaacgagaagaccggctgccggatgctggaagccttcaaacgcaacatgacgctgatgaacctcatcgataccaagttcccacccagcgaaatcgaaaagataaaaggcgcacgtgatttgaaagccttcgagctgctctgccatgagctgaacttccggtcattcctggaagatctggacgtgttcgttttgccttttgagaggtactgctga

SEQ ID NO: 192890 - DNA, 267 bp, Klebsiella oxytoca
atgttgaaatcactcatcaacggcaatacgaccacacctacgatgctggctaaggagattgtcttcttccatggagaacatgccgttgttgcactaccgcgcattctcggcgcggccggcatgagcgtgacagaacgagagtacgggctgattagcgaacaggtcgtcaagatcctttcccgcatggccaaacacctcaaccacgacgcaataaagtttgatgaagccgccgcatccaaacgcatcaacgagacaaaaggagcctaa

SEQ ID NO: 192891 - DNA, 1077 bp, Klebsiella oxytoca
atggcaaaaggaaaatcagcactggcaatggcattaaaaaagaaaatcggcagcaatgacgagatccaaaaggtttcacactggattgattccggcttccctccgctgaataaagccatctccgggcgctatgacggcggtttcccaagcggacgtatcgttgagatctttgggccgccaagtgctggtaaaaccttcctggcgacggccgccatggtctccgctcagaaacaggagggtctggctgtattcctcgaccacgaaaacagctttgatgttggtctggcggtggcaaacggcctgaatgcggatgaggatgacggccagtgggtctataagcagccggacacgttcgaagaatcggttgagctgatcggcaccatcctgaaactggtgcgagacgaagagctgatccccgcagacgcccctatttgcatcgtagccgactcccttgcgtcaatggtgccaaactccaaagccgagaagttcgacaaaatggcggaaggtacagcgaaggataaagatcagctaaacatgaacgataatacggccctggctcgcgccacgagcgccaactttccaacgctggcgctatgggcgcgcaagtacaatgcctgcattattttccttaaccaggttcgtacaaaaatcggcgtgatgtttggcgatccgaccacctcccctggtggtgattctccgaagttctacgcctcagtacgtattcgtcttggcgcttctgtcatgaaggatggcaaagataagatcggtcaggacgttggcgccgagtgcatcaaaaacaaagtggcaccgccattcggcaaatgctcatggaaattctacttcgacccgacccgcggtctggacgttatcgagtcactggttgagcacatgctcgaagaaggatacctgccaaagaatgccagcggccgcgtagagattggcgacaagaagtacaccaaatcgcagatagtcgacatgtatcgtgataagcccctaccggagatcattgcggcgctacaggccatcgacgaacgtcgaactaaagagcctgcttcagccgaaacagaagaagcgtaa

SEQ ID NO: 192892 - DNA, 1590 bp, Klebsiella oxytoca
atgcttgtatatataaattcatttaattgcattggtgatgatagcttttttagtgtaatacgttccgtatctggctggcttaataaagttgcaaaaatacgcatttcccctgaagacctcctttcaagacgtgattggaacttagaaagagtctatgtcagaacctatacagcggaaaaaatagaaccgaaaatttattcaattatgtatacacacccggatagaaatgttggcggtagacaatggattacagagatagggattaagagagaaggagtcagtacttttgtatctatattattagaaattagtgatgtaagtacaatggttgatgccagaccaatagcaacgcgtccatcacttgtttcctatctgaagaaaaactgtacttttgatcacgatgtaattggccagcgagtagattatattaaaagtcaatacggagactttcaatatttaaagcatgaaatatcaagagatgatagagtttatcctttagtttttattagcgagggagatggtggtttccctgttgtgcctgaaaagttgcaagaacaacttattggtttagcacaagttgtagcaacaagcggtgagatggattcgtgggaaatggaacgtttgttgggaaggagttattcatcctggggaggagcaattaacatcatttaccctatgaatcaaacaggttatattggtacaaaactatttcttcctaagcaactggatgaggttgccgcatcaaaaactccaattaataattatattttatcagttataactcattcgctaaacggttttaataaaaaacgtcatttatcgccagcaaacgttcgtgctaaaaggctaagcgatgataacgtagccttcaggcaaagaatgaaggatttaaaagaagggatgcaatatgaagaattacttgacactgcactattagagtttgaagaatttaagtcagccaaccaagaattagaactagattatttaaaaacaatagaagaacttgatggaaaatatgatgcattactcactgaaaaaaacaaaatagagactgagttgaatcgactgaagtttgaagccaaaaattttcatagacaggcaacaacccaaaaccctgatattgatattgaccggctaatatccctagtaggcaacaaactaaccccagagtctgttttgttattattagaaatgctaattcctaacaatgttgaaatactaaaatcagctattagatctgcacaagattcagttgactttcggcatggccctaggcttgtattcttactatataaactttgcacatcatatctcattgaatatcttgaaaatggtgataacactgcgaaagaatttttgggtgacgcctattctgcaaatgaatcagaaacggttgagcgttcagcaacattatcaaaaatgagagagtttgattatgatggtaagaaagtgaaaatgtttcagcacgttagaattggaacggctcgtgcaaaaaacgaaactataagagttcatttccttgtcgataaagataaacgaaaaataattattggatattgtggtgagcatttagatgttaaatcgacatga

SEQ ID NO: 192893 - DNA, 282 bp, Klebsiella oxytoca
atgagaatattagttcggatatcggtcagcactgacaatgatgtgacctgctacccattgtttatggtgaacggcttcggactcaatgacaaagggttgcaggcagtcatagaccacaatgtcattgaatatattgggtatagtgcagacagtgtgtttgttgatgtggatggggtgtgctggcataacggtggatgcttgtatgccgatgggacaaagcctatcagtgaggaagatgctcaacatcttgagcgaattctaggccttagcgctcttccgtag

SEQ ID NO: 192894 - DNA, 180 bp, Klebsiella oxytoca
atgaagatatatatagatatcctgttactcatcctttcaatactgtttatgttggactgcctgatgatcgggacactcaagaaagctctgtcacctgtcaacggaaccactgtgaacatgctcgcactggtgctggtcgtcacctctacagcacaggtctacacagggatagtggtatga

SEQ ID NO: 192895 - DNA, 336 bp, Klebsiella oxytoca
atgagaaaaataacattactgctggccgccctctccttctctctgctggcggatacccgaatttaccaatgcgatatgaccgtatcgcaggtgaaaaatgatcaaatcagcagacctactaaagctgacttcggcgcgctggtcgttgatagcggagatcagttctatgtcgtccgcggcgatgaggttctctcatctccatatctggctaaacgcaacggtaaactggttggcgttggcgaggataagcttatctacaacaaatcccacgacgtctacggcgttcatagcaaaaaccaaagtttctttttcgacggatgtaaggaggttggttaa

SEQ ID NO: 192896 - DNA, 213 bp, Klebsiella oxytoca
atggctctcacaatgactggtcttgagattgagaaaacaagcggctactggagagcgaaaggcttcagaaaaccggacatgctggagcgtctggaacgtgaagacggttacatcatccaccagcgtcgggaatggcgcatgtttgatcctgaaactgggaaactcacatcgaaagcacaaacgctttgggggctgctcaagcagatccactaa

SEQ ID NO: 192897 - DNA, 1098 bp, Klebsiella oxytoca
atgtccacaagaaagaaaaaagagagcgatatcaaagaaatacctgaagataacgaaattcttgaggaagaagctctcactttgtacacaggtgatttagttcctaacagcaacaacacggtgcagccaatcgctttaatgcgtcttggcctcttcgtgccgacactcaaaggaacgaagaatagctctcgcaacaagtccaacatgatcgacgcatccagagagcttgtccagctggaagtcgcgcggtcagagggttattcaaacattaaaatcaccggtccgcgactggatatggatcatgacttcaaaacctgggttggtgttgttcgctctctggctgaatacggcgagccaaccgggcgcgttgagctgagcatcacgaagttcgccaagttctgcggctacccgtcctcgcagatccgcaaaaccctgcgagaccgcctgacaaatagcctgctcaagatcatgcgcacgacgttgtcgttccagcgcactcatgaagagaagaacgtcgacgacaccaacaagatatccctgttgatggttcacctcataaacagcgttgattacaacgagaagaaagactctattgtcttttatgctgaacctaagctgtctgagctctatcgctttgaccacaaagttctgctgcagttaaaggtcatcaacaagctcccgcgcaaggagacggcccaggcgctgtatactttcatcgaaagtcttcctcctaagccggcaccggtatctcttgcccggctgcgcgccaggctcaatctgagcacgcgcaacgtcagctcgcaaaaccagactatcaggaacggattgaagtcactgcaagagctgggctatctcgaatatagcgaggttaagcgtggccgctctgtctacatccagatccacagtcgtaacccaaaactgaaagtaacatcgagcaaacccgagaagccagaggcgcctaagcaggcagaagaagcgaagggtgaaattgatgcgaaacagaacctcaaaaacaaaatttctgagctgtcgcagaacctgacgccagagaatatcaagctgatcgagatactcaccaatagcctcaagttgctttga

SEQ ID NO: 192898 - DNA, 645 bp, Klebsiella oxytoca
atggacttaaaacgcacacgttgggtacgccgtctggaagacggaacctacaccatagaatcaaactccacactgagcaacgagaaggttctctgcagcctgtgcggcatagcctcgaagtgcaacatcaacgagacccgactcaagttgcgtgatgccggcgttaacttccacctgaacagctgtgccagatacgtaccgctgctggcatttcgaaaaccgatcatcggtctggataccccatacttcaacactatgcgttcaggcgttacctggcgtgacagattgaccgagggaaagattgtctgcctggttgaagctgatactgcgaagatccttcgattcggtgtcgtggataaggtttactctgggccagttgatgagatgctgagaaagcacagtcgattcaatcacctctgtatgggcggagagaagatcgaaaaagtgggtgaagtgatccgccgatcctatggccacttcctgaaagaagacagcctgctcacagcgatttacatcagacacatcaaacgggactttgatatcgagtatcacagcgaagaagaactcgatttagtcgaccctcggccaaaagcggaagtgtttagcatcgcaaatgcgcgtcagaagctctctgacgaaccctaa

SEQ ID NO: 192899 - DNA, 495 bp, Klebsiella oxytoca
atggacgatttttactcaagagagattactctggctgatatgccctttctgatgcatgaattcgaggaaggagcacgtcttggtcactttacaaatgagatcatcacaccagccggtgggaagaagtttgaaaaacaaacgcgagaagcgattaagacacgcgacgctgaaggttattcaggccatttcatcttcatcctgcttcgtcgttcagacgataaaaaaattggcctgatctggtttactcctgcgattgatccaactggagatccacgtcttgaactccgtgccgtctgtatcaccaaatctatgcagggtaagggatatggttcgatgctcctgtctgacatgattgactcaaacgcacaacaaccaatgatggcaaagtgttacgtcaaatcgacaaaaatggctgaaatgcttaaacgccgaggctttcaccttgttgataccagccccacaggcactcaactgcttttccgcaacccacgctga

SEQ ID NO: 192900 - DNA, 1086 bp, Klebsiella oxytoca
atgacgttgccatatggggtaatctccgatccccattaccacaaatgggattcattctcgacgaccgatgcagatggtctcaactctcggctggccattcagctggaggccacaaaagaagcggccatcgctatgaaaaaagcgggctgcagccacatgctagtggccggcgacacattccacgtccgcggaaccgtatcccctaccgtactcaactacgtctccgatgcctatgagtggatcgtcaaagatctggggctcagcgttgcgatgctggctggcaaccatgacctcgaaacgaacgactctgtctacagcgctaacgccgctgcggcgctaaagtcgattggcgtacagatcgtctgcggccgtaagccccacagcatcaaattgggtgacgtcacagtccatatggtgagctggcgaaacaaccacgccgagttaattagtgacctgaaagcacttcgtgcgcggcttgacggggatctgcacgacgtcgtgattcataccgccatcaacaaagctatccccacaatgcctgatgttggcatcgatgcgcaggagctgaaagacataggctttcgcctggtgctgtccggccattaccacaaccacaaggaggtgatccccggagttatcagtgtcggcgcgctgacgcaccaaaactggggggacgtaggttcgctggcgggctacatgattgtgaaccctgacggctcgttcagtcatttcgaaacctcggcgccgaaattcgtaaacctggaagacgatgtggatgacaggcagatacaaggcaattacgtgcgcttccgggccgtcgtcgaaaacgatgaggaaggcatcaagctgcagaacgtcctgaaatccatgggagcgaaaggtgttgtatgcaacttcatccgcaagggctcaatgatggagggtactgccagcacctcagagaccagcaaaatcgacagccttggcgagtctgtttctgcttactgcaaaatcgttcatgacacagacggtggatttgacctgaccaaactgaatgccttgtgtcaggagatcctcaccgaagcggaaagtgcggaggcgatgtag

SEQ ID NO: 192901 - DNA, 234 bp, Klebsiella oxytoca
gtgacttcctcccacaataatttctgggatttcatccagatgattaaacggcttgaaagcgggaagcccgttttattccagaagccctatccgccagaaggaaacccacaggcgttttaccttggtcaactaacgaaacgtggcctcctgtcacgcaactccttcccggcacatacggaataccgccttcgcaaagggcagaaattgactaaagcaattcgaggcaaagcatga

SEQ ID NO: 192902 - DNA, 1917 bp, Klebsiella oxytoca
atgaaatttttaacgctcgaagtggaaaacttcatggcgctggcaaacgccaaggtcgagcttgatcagcgtgggctggtgctcatccagggtgttaatgccggggactcatcggccgccagcaatggcgctggtaaatcaaccctcatgaatagtttgatgtggtgtatttatggcgagacatcccatggtgttaaaggtgacgacgttctctctacgggccatgagaagaactgtcgcgtaaaagtcaccattgaagacgaaggtaaacgctacgccattatccgccaccgcaagcataaggaatttaaaaaccggcttatcgtccgtggcgaagacggcgacatgacaaagggtaaagattcgctcacccaggagtttgtagagcgactgatcggtgcgtcaaaagaagtatttatggcatcgatctatgccagtcaggaggcgatgcctgatttgcctggcatgtcggataaaaacctcaaaaccatcgtagaagaggctgccggcgtcgatcgtctcaccaaagcctacgcgattgctcgcgaacgagccaacgcagctgccgcacgcatggagaccactaaaaccaagatggacgcctgcttgtctctggtcgaatcggcccagaatgagctggagtctgccaaaacctcttctgaagcctgggagcgagaccgcagcgaacggcttgatgtcgcccgtgccgatctggttggagcggaagtcacgctcactgaggtcgaaatggagttgcgcagtctgccagagcagatccgagatactgaaaattccatcggtaaagagcgggaaaaacttgcctccaaagaagaacatgacgccaagctggttaaagttcgtggagcgatcactgatatacgcgccagcatccgcattaccgaaaacatccagaaggaagcgatgcaacgtgctcgcgcattcaaggtgaaagcggaagaagtaaataccaaagtcggggagccgtgccctacctgtggcaaggcttattgcgttgaagatctgtctaccgtgaaggagagttttgttgaacaggcgcgcagtgagatcagccaagcgcaggcatctgcaacgtcagtggctaaataccaagagcatcttgagaaggcgctcaaaattgaatcatcacttgtcgccagtacaccagatgtgtctgccattatttcccgaatcgaacaactgactaaagagctgggaacgcttcgtcatcgggaaaaagaagtcgtggctgtagaagctttggttgcccgggcgcggagcgaagtagatcgcattaccaaagaaactaacccatttctggctgtcatcaaacgccatgaagaaagcctggctgccaataaatctaactatggtgtacttaaaactgagttaaagaatatacaggagcaggctctgctccttgataaagcgcgccaggtctactctcctgccggcgttcgctcgcatatcctgacctccgtgacgcctttcctgaattcccagacagcggaatacctcaatacactgtcggacggaaacattgtggcggaatggtcaacgatggaatcaaccaagaagggcgagtggcgcgataagttcaatatcagcgtgcgcaagatcggcgccagcaaaaccttccagacattgtcaggtggcgaaaaacgcaaagtgcgcattgcgtgctccctggctctgcaggatctggtggccagccgcgcgagcaagaacatcgagctgtttatcggtgatgaaattgacgatgcgctggatactgccgggctggagcgtctgatgggtattctggaagcaaaagcgcgcgagcgcggcacggtgatgatcatctctcacaaagaaatgaagtcatggttccgggaaaccatcacagtggaagtgaaagagggccgcagctatgtcgtttaa

SEQ ID NO: 192903 - DNA, 747 bp, Klebsiella oxytoca
atgtcgtttaacctaagccgcacgcagtttttgcaaatgtttgctgtgatgcagtcattcagactgattaacagctataccgctgctggggcggctcctggtgtcggttggcaaaatcttaatattgagacggagcagtttacggctctgaaagatctacttttcaagaccccgttaatgccaagtctgaaatcgatgccgtcaggaagtacagcgcccattctgatcaacccattttcggaaggtggctatcttccacacactgggcctgggttcgtggtgatcccggaatcacctgagatggttatcaaagatgatgcgcagtacggggctatagaggcgcataccagcagcgcgtttactaacctgactcgactggcaaatgcacgtgctgggcaggttgcaatgccaggcattgcatttgctggcatcaatttcaattgcgattcacatgggacatttccagaaagaggtaaattaagcttcgagactgaagatggcgataaggcaattgttgagctctctgtcccctatgtacttcgttctaacaggatggttgcgcgtaagctgatagatatcatgtcctacttcatcgggcagagcatgatcgacgcagacatagaaaatggtgtgctgaccagtgacaacatacacgtggtgagccgcattccagagcccgttcgcaagtctccagttaaaaccctggaagagaaattaatggaatgcccggtatgggcaacatggtaa

SEQ ID NO: 192904 - DNA, 570 bp, Klebsiella oxytoca
atgagtaaagtgatcaaagtagttggcgtcgacccttcaatgagcaacttcgggctggccattggtacgctggatctggatacagacaaactggaaatccatggtcttgaactggttgaaaccaaagccggcggaacgaagaaaaccgtcagagtaaacagcgatgatctgcgccgggctaaagaaatctggcgcaccgccaggcccatcattgaacaggcccacatggtattttgtgaactaccggtgggtagtcaaagctctcgcgcgcagacttcttacggcgtatgtataggcgttcttgcttgcgttgataagccacttatccaggttacgccaaatgaaattaagcactacgtcgggaataaactgaccacatctaaagaagagatcatccagtgggcgattacaaaacagcctgatgccccttggttgcgtcggaaacaagcgggaaaagacgtactcgttgccaagaatgagcacctggctgatgccatagcttcgatatattctggaatgcagacagaccagttccgacaagtgcgcgacgttcttaaagggattttataa

SEQ ID NO: 192905 - DNA, 2304 bp, Klebsiella oxytoca
atgataaggattgtcaaacgtaatggctccacagagccgctatccgaagagaagtacaaccgcgtcgtgatgtggggtgttgaaggtatacgtaacgtaagcgcctctgccgtagccatgggcgctgccgcgagcatttttgacggcatgacaacttcgcagcttcatgaggcattggttaagtcggctgcagatctgatttcgcctgaaactccgaactactcccaggtcgcagcacgcctgaacatgttcaaaattcgcaaagatgccttcgacgaatacgcttacccaagtttctatcatcatatcgtcagcaacgtcagccgcggcgtttacgatgaggatttgcttaagttttactcccgcgaagagatcgctgaacttggcgtatatatcaaacccatgcgtgacgaactctttggttatgccgcgactgttcagctggcgagtaagtacctcgtccagaaccgagtcaccggcgaaatctacgaagccccgcagcagctgtatatgctggtgggtatgtgtcttttccagaattgggaagatggttgtgccggtaaaacacggctggaaatggtgaaggggttctatgacgtcaccagtacattcaaattgtctctgcccaccccaatcatggccggcgtccgtaccccgacgcgccagttctccagctgcgttctgattgagtccgaagacagtttgaaagggatcagcgctgcgtcatctgccattatcgattacgtgtcgcgtcgtgctggcattgggattggttttggccgactgcgtgcattggggagtgagatccgcaatggagaagccacccacactggcgtaatcccctttctgaaacacttccagaccgctgtgaaatcatgctcgcagggtggcgttcgcgggggcgccgcgacggctttctaccctatttggcatctggaagttgaaagtctgctggtgttgaagaataaccgcggcatcgaggagaaccgtgttcgtcatctggactatggcgtaatgatcaaccgcctgatgtatcgccgcctggtacgcaacgagaatattacgctgttcagcccgcatgatgtgccggggctctatgatgctttctttgtcgatcaggacaaattcgaagcgctgtacctgcaatatgaagctgatgagagcatccgcaagaaatccgttcccgctgttgatctgttctcaaccctgatgcaggaacgagcctctaccggccgcgtgtatattgcgaacgttgaccatatgaacgaacacggcgccttcgatccgaaagtcgctccagttcaccagtcaaacttatgcatggagattacgctgccaactaaaccgctggcgtttaccgatgaccccgatggcgagatcgccctttgcacgctgtctgcgtttaatctgggggcattacgctcactggacacgctgaaagaggttgcattctatgcggtggctgcgctcgattccctactcgactatcaggattacccgatggccgcagcggaaattccggcaaaagcacgtcgtagtttgggcgtcggcgttaccaatcttgcgtactatctggcgaagaacggatttaactactctgatccggccggcaaccaactggtgcatgacacgtttgaagcgatccagtattacctgcttgatgcaagttgccggctggcagaagccaaaggcgcctgtgattggttttcccaaactaaatatgcccagggacagctgccgattgaccattaccgcaagtcgcttgacgctaaccctgatacgtcctttgagctgaaaatgccgtgggaagagctgcgtggccgcatacgcgaatatggtctgcgtaactctaccctgacagctcagatgccgtgcgaaacgtccagccaaatcaccaactccacaaatggtatcgaaccgccgcgtggcccagtttccgtgaaatcatccaaagacggcattgtgaaaatggtggttccggactttgcggcactgaaagatcagtacgagtacctttgggatatgccggataaccgcggctatctgaccaaagttgcgatcattcagaagttctttgaccaggctatttcagccaacaccaactatgaccctactcgcttcccgggcgacaaggttccaatgatgaagttgcttgaagatctgctcttcgcttatcagcaaggcgtgaagacgctttattaccacaacacacgagatggtgccggtaagcgtgaagacgatgatctggcctctgttgcgttggttgagccagaagatgagtgcgatggcgcatgcaaaatctaa

SEQ ID NO: 192906 - DNA, 1143 bp, Klebsiella oxytoca
atgagttactccactttccgtttgggcgctaacgacgcaaccaaagagcctatgttcctcgggcagtctgtcaacgttgcgcgctacgatcagcagaagtaccgcgatttcgaaaagctgattgaaaaacaactctccttcttctggcgcccggaagaagtcgacataaccaccgatcgcatcgatttcaatactaagctgcaagagcatgagcgacacattttcctgagcaacctccgttaccagactctgctggattccgttcagggacgcagcccaaacgcaacgctgctgccgcttatttcaattccagagctcgaaacatgggtggaaacatggtcgttctctgaaaccattcacagccgcagctacacccatattattcgcggcatggtggatgatccgagcattgtcttcgatggcattgtgaccgacgaggaaattatcagccgggctatcagtatctcgacagagtacgacaagctctatgagatgacctgcgcgcgccagcatctgggagaagatgaattcgaacggctctacgtctccgaatttgacggaaagccctaccctctccagcgccagctgttccgtactttggtatccatcaacgcgctggaggccattcgtttttacgttagcttcgcctgtacgtttgcttttggagaaaggaaattacttgagggcaacaccaaaatcatgcgtttcattgcgcgcgatgaggcgcttcattgcgaaggcacagaacgaatgctccggtttatgcgtacaggccgcgaaggcttgctatgggcccagatcgctgcggatgaggaaccattcatctatcagaccatgatggacgttgccgaacaggaaatgcgctgggcagattacctttttaaagacggctcaatgattggtttaaacgccgatatcctgaaaagctatgttaaataccgtaccaatcttgcgatgcgccgtcttggcctgaaaccactgtacccggagataaaagatgacccgctggtgtggatgaacaaatggctgttgtccgacaccttgcagattgcgccgcaggaagctgagcaaagcacataccttgttggccagattgactccgctgttgatcgcgctggcctaagccagtttgccgatttgtaa

SEQ ID NO: 192907 - DNA, 876 bp, Klebsiella oxytoca
atgaaattaacgaaactgaccgaccatctcaagctggccaccgataagctggtgggcttcaaaccagagccatatgagctgaaccccggctttggagaagcgactgagagtatttacaagatggtcgaccagttccacgagctgtttcaacacccgcgtcgtgtaatgcccactccggagctgctgcgcctgcgcgctaagctgatccatgaagaggcggtagaagaagggctgcctgcagcgaaaaatggggatatacagggattgttggatgcaatggctgacttcctgtatgtgggcgtcgggacgatggtagccatcaaaggtgggctatcaactggtatgagttactacactcaggagcaaagtgtcgatcgctttattcataccattatggtgcctggaaataccgtcttcgacgatatggccatccccttcaatgaagcagatgaagctgcgcttatgctggccgcgctggccgataaacttgaacataacaaggtaggtgatgctgagctgattcaggatctgcgccgtgtgatgaacaaaatctatgtggcgtgcatgatggtatatcgcctggctgaattccttggcgtcgacgtcgtggagctggtggcggagatccaccgttctaatatgacaaagctgtggccggcggatgctgaagcgcgtcgtcttgccgttgagagctgtaaatatgacaagaatgacctcggattccgccatgctgacggcactgacatgatgatcggctatcgcctgtctgatgggaaaatccttaaatcgccgacatatagcgatgtcgatctgtctcatttccttgagcaagcacaggcatcttcgctgtatgaagtagtaaaaaacagcttgtaa

SEQ ID NO: 192908 - DNA, 1104 bp, Klebsiella oxytoca
ttgtcttttttacttaatcgagaattcagtaacggtcagctggcttcgagctcttatggccgtgtaatccagaccgttgttgataccggcgttccctccgacgatcgcaccggcaccggtacgcttggcgtttcttatgtgccttcctactacatgcttaccggtggggctgttccgctcatttcttcaaaacaggtaaacctgaaaccgctactggttgagcttgaatggtatttacaaggttcaggcaacattgggttccttaaagagcatggtgtgaagatctgggatgcttgggccgatgaaaatggcgatttagggcctgtatatggcaagcagtggcgccgatgggaggacaccagaattgtcccttacagcgagtatcgccttaaggaggacatcttcttagaacgtggttatcgcgttgaaggttacattgggctgaatgaagatcgcgtcgttatcactcgtgaaatcgatcagttacaacttatggttgatcagttgcgcaacaacccgaccgatcgccgcatactgcttaatgcctggaatgttggtgagctggaggacatgaagcttccaccttgccactttgtgttatccgtatggagtcgtgagctcgatttccagacccgtttgtctatggccaccgatattggtatccagcataaccggcatggctatgaatcgatctatacacagatgctttgcctgatagagcagcgaggcagtatctctgagccaatgctggatgagcttggtatccctaaacgtatcctgaactcctgcctggtgcagcggagtgtcgatactttccttggtatgccattcaatattgccggttacggcatcctcacgcagttcattgcgaagattacgggtcacatggctggcgccttcgtccatttcggctttgatgttcacatttacaacaaccacttggagcaggttgaagagctactggctcgcgaacatccggagtcgtccgaccccatcgtcgtcttcccgcacgaatgggaagagctggatgacttcaaatgggacggcgtgcagatcttcggctacgaaccacttccatggattaaggctccagtggcggtgtga

SEQ ID NO: 192909 - DNA, 414 bp, Klebsiella oxytoca
atggccagaggcatgtatgtgttatgtgaaattgaagatgtgctggcgagagccggccatcgtaaagccgctgctgatgaaaacgcagacactctcgttgcaggtgatgagctcatattccccaccagccgcatgttgcgtggctttgctcgctccggtgctgaagtggtgcttatcagccaccgtccggaagcgctcgaaagcgcaaccaaaaaatggctgagagatttcggcattgattatgactggctgcacctggcaccacgtggagtcaattacgaaacccatataaagcgcacgcttgccgcgcataaagatgatctgatgatcgcggcactggtgagttcgtcacgtctacgagctgctctgtctggttttcaccagcgcccggtaatgtatgaggtgtctcaatga

SEQ ID NO: 192910 - DNA, 477 bp, Klebsiella oxytoca
atgaagatgattgcagctgtcggtcgcaattatgagatcggtagaggaaacgaactcccctggcgctgcccctcagagttaaaactgttcagggagctcaccacaaacgccacagtcgtcatgggcagaaagacaatggaaagtcttaagcgcccgcttccggagcgccacaacgtcgttctgacgcgctcatctgggttcatgcccaatggtttttaccctgccactatggacgatgtaatgcagcttgatggtcccgtttggattatcggcggtgcgcagatctattctctgtttctgcctcacgtcgaggaactctggctatcgcatatgggcgtagacgttcctgacagtgatgctcattttccgcggcaaatgatgtgtaatctcggcttctttcctgtgttaacggctcatacacaacggggaacggaggatgagcccggcttccaacagattgtttacagaaggtggtaa

SEQ ID NO: 192911 - DNA, 645 bp, Klebsiella oxytoca
atggattaccgaattgggatcactggcgctcagggcagcggaaaaacaaccctggcaaagtttatcgacaagcattacggcattccgtatgtggatgctggcgtcggcgcactgatgacaaggcttggagtcaacgtaggcgatccaatgccgctctttgagcgtctgcaggtgcagatggaagttgcccgccatattgagctggtaacacgcggagcggaaggttttgtaatagaccgtacgcctgctgatgtgatggcttatacgctcgatttggtcggccagaccaatgacaaacgatgtattgatctggcgctggaaattgagcgcttttgccacaagaccgcgttgtccaattttaatgccattgcggggctgcgcccgggcgtgaatttgagagcacaagattatgaacgtgcccagagaggttcgcttgatcgtctttatgtcgctcgtatcgactcgttgatgtgtggcgagctgacaaaaattaactctctggccaaatccggagatctgcaggttttcgtcctgtcggaaacctgcatttccgtcgacgcaagagcacgctcgatcatgcgagtaatcgaccgtcatgtggaacgtatagagagccgtatctcaaatcgcgtcaccttccactga

SEQ ID NO: 192912 - DNA, 420 bp, Klebsiella oxytoca
atgttaggcgaaatatctctggctgatgagttagatcgtaaaacgatagaggcgctgacacgcatcgcagacgagcagtcccgatcgctgatgacagaacgagaggccaggctggctatcagagctgtttttgagtccgttcagggattggtaggcgatgatgtgggagaggttctgaatgtggcaatgtcccagttcagcgaacgcggcaagcgacctatcttccccatgcatatcaaaatggctgccggcactgttctgtatgtgtcgatttgtctggataccaatgaaattcgcattctcaacgtcaccactggtgagtggcgtgcgccggtagcgtgcgaatcgcaggaggagaccatcaaaaaagcagctcaattcgtgcgtagcgcactgcttaaaggtgcaaaaaagctgtaa

SEQ ID NO: 192913 - DNA, 558 bp, Klebsiella oxytoca
atgacaactattgttgctgggcttgatattgaatccacagggttggactttagagctaaccacaagattattgaaatagccattacccgctatgaactggagacccagaagcacatcgatagcctggcgatgcgttttaacccgcggcggagtatcgatccaaaagcccaggcagtgcatggcatttcgctggaagatctttctgcagagccactattgtctgaacatgccggtaaaatcgctcgctatattagcgatgcaagcgttttggttgctcacaatggtgaagcgttcgacctcccctttattcgccatgaatttgcagagtacggcgtcactctcccagagctgcctcttgtggacactatgttatccggattatgggcgacagaagacggcaaacggccgcgactggaggaactcgccttctcattgggttttgtctatgacaaggctaaggcgcacagcgcgctctatgataccgatctgatgatgcactgctttttcaaagcacgggaaaaatacggcttctataagctcccatttgaaagcgcctga

SEQ ID NO: 192914 - DNA, 834 bp, Klebsiella oxytoca
atgagcaacctcaacaatacagtcaaaaaagatgatctggatgagctgaccgccatgctgcaattgctcgatgagcctgaaaaactggcttcggaggccgttgtaggagacgaaatagacgacctgctggcagatcttaacgatgagacggtcgttccggtgccggctgttgctgaaactgttatggaagcgaaagacggcggcgatctcaccggtgtgtttgaagagttggaaaacgaacatgagtcgctgaaggtggttgatgttgagatacctcaagtcgagtcgatctcacctcttcctgagatcgactcgacacagggtgataaacctcagactgatgaaaaaaaggagaaacacgccaaagaatcgtcagttgcggcacagccaaaagagtcgaaggcggcgaaaaaagagcgtgcagcacccaagccccgattcagcctgaacgataagggcgatgatttttatgctgtggctggcctgaaacgtgaggtcttcatcgaagctctgaatgcggcgcctgtcaaggcaaaagacaagatctctaacctgctaaattggttcaatggcggaccggatatcagcatctacacggtgattgcattgcggcatcttattgacacaaaagaggcaagcagcaatagcattaagcttgcgttaatgagttatccggaaaagccatatccactcagcaccgcgtcaactcaggctggccagatgatggctgttttcccagtcacgggaatcgctacgagggatggtggaagattgcttcttaatgaagagtccccgatcgtaaggaaatttatcgcggagtattccattggctga

SEQ ID NO: 192915 - DNA, 594 bp, Klebsiella oxytoca
atgatagcagccgaaaaaatcaaaaagcgagagcgagatgcctctcttcgagacctttggcgcacaccgaaatggttgtttgtcgccattcagcgatatctcggcattacgtttgatgttgatgtcgcctgcaacaaagaaaacgcgcttctcccgaactacatcggtgtggagcgagatgctcttaagtccagctggggtgagcctggaacggtggcttttctcaacccgccctactccaaaataaccccctggatagaggcggctatccgagagcaagcgcgtggcgtaaccaccgttatgctcattccgcaatcgcttgacacgatgtggtatgagcgcgccaccgagtgcgcaaaccagacggtagttctgtctggcggccgcgtagcgttcatggaacctgacgtcacattgggtctggttgaggtcaatatcaacccaggcggaagtatgctggtggtctttcgcggattctgtcagaacgctggtcacttcatgaataaagtcccgctgacggtgatgaaaagtctgggtggatacgatcctgccaaagtgatcaggaaaaaaagaccacggaaacaggctgcttaa

SEQ ID NO: 192916 - DNA, 234 bp, Klebsiella oxytoca
atggcatacccgaccaacgttgtagcgctcgttgagagcgattttttggctaacgctcgcgaactcatgaaggatcgtgaaaaggcattcagtctttacgagtggtcactgaaatgtttgcacactggcgaacacaaagacctgattgagcagctccttggcgagctaatcaacgaggtttttgctctgcaagttcagcttcatggtagacaaaatgatcagtcaggaaagtaa

SEQ ID NO: 192917 - DNA, 474 bp, Klebsiella oxytoca
atgacgacaagcacacacgccagacgaaaaacggcagccggccgtgcgcagcaccagtatcaaaaacacccccgcaaaaacttcaaaacgccagttgtcgaatttaatccccggtttaagacggtcaaagttttcagtgatggctcttgtctcagaaacccaggcgggcccggtggatatggcatcgtctttcagttccgcggcgaagaacgcgagttttccgacggcttccacagcaccacaaacaatcgcatggagatgatgggcgccctgatagctttggaacgccttaaattctcctgcaacgtgatcctgcactcagatagccagtatctcaaaaatggtatgaccctctggatgaaggggtggaaacaaaatggttggatcactgctgacaagaagcctgttaagaatgtcgacctctggaaacgactcgatttagccgccagtcgccacaatgtcaggtggaactag

SEQ ID NO: 192918 - DNA, 540 bp, Klebsiella oxytoca
atggcacatcaaacgccttcctcttctcttaagaaacacccccgttcgctacgactcatcctggcggagttattctccggccgtgtgtctgcacgcctgtccgaactggaagagaaagtaggtcaaatggagcatcgtctggatgaccatgcggtggccatctctaacctgggggctcgtgtggcaatgggggaagtgatgaagacccgaaccgcaaacatcctgcgagacacctggggcgtgcgagccaatcaaacgcgcaaggagagctcagatggatcaatttcaacgaaaaagacttcttccaatggcctacgggctgatcacgatttgtctggcagccgtagcaataccgtctactcaggcgttgctgatgccggactcatgcaaaacggtttcgcagcagacgccggcaccagtcacggaaagcacacccagcatcaccaccatgccccggtctgccactctggatgggatgcggttggattcgattcctcaagttcgtcctgcgactccggatcttcctcctgctgcgactga

SEQ ID NO: 192919 - DNA, 426 bp, Klebsiella oxytoca
atgttaggtttcttcaaaaagaaaactcgtaaagcggttattgaagttaaaaaaatggagaaccgcgatgcggtcgaagctactgtctggggcgcatacatgatcgcttatgcagacggcaactgtgatgcaaaagaaatcgctattctggagaagaccatctccgcattgccagctttctcaccgttcgcgggtgagatcgcccagatgagcagcaatattcgtgctcgctatgaagcttctcctcgttccgccaacgcacaggctcttcgggagctggctgatgtcgccggcactccagaagccgttgatgtgttgtgtctctgcctggatattgccgatcaggatggcatcggcgaagaagaagaggttgtgctgaagaaaattgctcaggcgctgcagttatctctggatgcgtacatctaa

SEQ ID NO: 192920 - DNA, 156 bp, Klebsiella oxytoca
atggcagagaaattaaggctggccgtcgtcgccattcttctcgtgctggtcgtgctggtggacttcactggcaaactgatgtctatcgcggcagatggcgtgttggttggattggctatctactttgcccaacctctacttaaaaaatcgaagtga

SEQ ID NO: 192921 - DNA, 579 bp, Klebsiella oxytoca
atgtgtgataaatgcaccgccgctaacgctgaagtaaagaagatcattaatgaagtcggggctaaaaaactcgtagggatgcttgattctataactggtcatggtgacgctcatccgctgaaacgcatcatggccatcgtccaggtcatggacttatttgatgaaccaatgaaaatcctgatgcttgctcgtcactttggcggggcgtatgtggaagagcatgaacgtgccaataaactgcaggcaactctggacatgatgagcgaaccaaaatgcgcgccggcgccagatctctccggagacaatataggcattgaaagcaaagagcgggagatcgccagccttaagtcttctttaggcatgttaattaccgccttcaaactaatggcaacccataacgggttcaaaatgccagagctaacctgcgatgaacatcccgctgctattcgccagctgcttggtgcgatggcggataatatggatgaagcgaagagccgtatcgaagacatgatgcgagaacttgcccatcgccacgatctaaatgaccagccgcacaagatgcagcaagtcagccactga

SEQ ID NO: 192922 - DNA, 1686 bp, Klebsiella oxytoca
atgagtacagcgctttctgtccttgagtcttttgcttcgaacaccggtatcgaccacagcaaagagatgaacgtcatccatgacatcgtggccgagtgcgagaaagagattgcgttcatgcaccaggttcacgacttcgtttatggcgatgagcgtcacaacatgattaaccgcctgcttcgactcaaccaccggccggatgacgaacgcactcgtttcaacagagcctggctggataaggtcgatcttgagtgggtgaagcagaatatctgggccgaatactggaagaaggtcacggatatgacaaacgttctgctgatcatgccagcttcccgccgagatgaatggcgcgaacagttcatagaaggcaagcaggaaaccatcaagactgacagaaccggctaccagatgaaggttaaggagttcgttggcgtacctgagttcaaagcagagacggtcatccctacgatggtcaatctgctgaatgacaggcataaatatctctctgagcgcgtgtacggtttgtttaaggcgctgagccctgcgcacaagaccaataaaacgaacggctttagcgagcggctgatcatcgccagctgcatttcagagttctggcgggatagtgtcagcgtgaactatcggaaagaggattacatcgatgacctgcgcgtaatgctgcatttctttgcgcataaggagttcatcaccattaaccgtacaacagagatgctatcggctgcgtaccgggcaaatgattgccagacgggtgattggatcaacgtggatggtaacctcatgcgcgtgaaaatgttcaagaacggtaatgtgcattttgagatccacccagatgttgcctggaagcttaatgaggtgctggcgtacagtatgccggccgctatacctgccccctgccgaacagccccaaaaaccagagctcctaaggagtttggcctcattcaaaagaccatctctgagcccgttcgatccactttacgtgacgggcgattcagcaaagacaagggggtttggtacttctctgattccagtctccagaagtcgcaggttgaagaattggagcgcacattgagcttcattggcggcgtacaggataaaaagcactggcagttcccgtatgagatcggtcaaacactcaatacgattgtggcgacaggtttgatcccggatgcaaaatcacatcagttctaccctacccctcgcgtaatcgcggaatacgtggccaaggtcgttgacttgaaatctggcgaaacattgctggagccggaagctggtcgcggagatctgcttacgtttattgaggcgaatcctgaggacgtgacctgtattgaggttgcgccgctatttgctgacatccttcttggaaaaggctacgtgaacacagtctgctgtgacttcatgaagtggtctgctgacaatgaaggatacctcttcgacaagatagtcatgaatccaccctactctctcgggcgccacaaagaacacacgctggctgggctgggacatctgaaagtcggtgggcgccttgttgctgttttgccgggggactcaccaacactgaactggatgatgctggataatttcgtctacgccaaaggtaagtcgttcacaggcgagtttgatgacacggagataactgtcagcgtgtatgtcttcaaacgcacaaaataa

SEQ ID NO: 192923 - DNA, 729 bp, Klebsiella oxytoca
atggaaagcaggaataaagacacttctatggatatacaggctgtattaccgatgagcacggacacgcctttcagactttgccttaagggcaacaacccaaccgctgtgggcacgattattgtcgataagggtaaggtctcatttgaaggcgacgccgacgaatcagcgctgatttttattgagtacctggtgcgtcgaactagtcagcagtgggcagagctggagaaacgcgccagacattatgatgagtttatgaatgtcatagaggctgcgcgtgccgctcttgctgctggcactcctgtagatctggagtctttgtttaacggagagctggcctctgccatgttcgccaccatgttcgccggcgaatttgttcgacacggtgcaaaaaactatctggaattgagctacgacgttcctgaacttggatatttcactgttacgactcaacgtaaggggtgcaaaacgccaggcgatcgcatcgcagagctggaggctgtagtcgaccaacgcaatggagaatgcgtgcggcttatgaaagagcgcgacgaactgctcagtgatcagctaaccaaaggctcaaacattcgcgcggcagccgacgtttactttcaactcatggaagagtgccaaataccgccaggcggatctctcgttgagtatgtgcgtgagcttgaagaacagatcaagacactgcagcggcaaaacctacacgccaccgcatcatga

SEQ ID NO: 192924 - DNA, 264 bp, Klebsiella oxytoca
atgggcggaaaagacaccagttatcagatcgtctacagaggcgagacacttaaacatttcaaacctggccagtgcgtctttttccagcgagagagacagtatggtggcggctattggttgggcaagacacatgtggacggttttgagttcctgctcgaacaaccaacctctctaagagaggggatgttgtttctgctcactcttgcaaaggtggaagccagacacatggagtttgtcgatttcgatgacttcaatttaacgtag

SEQ ID NO: 192925 - DNA, 1386 bp, Klebsiella oxytoca
atggatagtgtcagtagtgttgagcgtttaagaacaaaagctttttatcagttgcttgtagataggcttggaactgaggcctgggctgctcgcaaagctgcatatttcaagcgcataagagagaaggaagctaagtttaacatcaatctgccgatagagccccagctcttcgtaccagcagaagatgacatcgactggtacattctggcgtcgtatctgtctcatgattttccatatagtgatgctacttacagcagcagacgtatctacccctatgctatggccatcggagctgttgcagaccagcttcgcaaagtcccatacgtcgatgatgttctggacaaaatgctagcaaataacaataaaccagaaactcaaatttttgagctgctgacggcatcgttctacctaaagaacggctatgaggttgccttcatcccggaaaacagcattgtttggcccgatggaaagaccaaaaaatcaccggatatgctagtcaagttaggtgatctggagttctacgttgagtgcaaaaggtcggataagcaaaccaagtactcaaagacagaagagcaagcctgggccaacatctggcatcaattgagccaacatatgctcaaagtcgcaccatggaacattgtcgatataattttccatgatcaggtcgccagtgtgactccggcagacgttattaaagcggtgaatctagccattaaaggggggacgggaaaagctaatgaaggttcaatcagtgtgggaatacgagccatcgacaaattaggtctcagacatcactacagaaaattttcagtcagagccaatagcccacagcatgaattgctggtatttggggatctagatagcaatgagaaacgaagtatctcgactatcgctcagagagttattcgtcctggcaccaataacgatattctcaacatttttgtagaggatgttgcaaagtgcgttggagctcagtggcgctgcgatcatgagatttctctcggcctcagatccaagcatttcaagagcttgctcaatgatggagtcatgcagattccccctgatcgtgctggcgtggtgcatatttggtatgagacttgcgaaggcatagatattgaagaactacgtagggataaaaacatggagcatatctcggcctacgatgcctctaaaacaaccgtgttgggtgctttcctgcatgccgttaattattacccattagaggacaactatgagtgggctgagactgttcaagactttgcccgtgtcccggatttgatggggctcttccttagacagccattgatgcttacatctgactcgacgcgtggggtcgaaggtgtcacacattgggagcaagataaggccgcaaaaagcacgcgttga

SEQ ID NO: 192926 - DNA, 369 bp, Klebsiella oxytoca
atggccggcgatgagtcatgcacccatatcagacagatagggtatggaagagtcatgtgctctaatgatgagggtatcgaaacgggctacagagatgcgatgacacaagctgacatgaattattaccagatgcagcaaatgaatcagcaaatgcagatggcacaattaaatcagcagctgcagcaaaccgggcagtcattccagaatgcaggccagcagatgctacagcagagtcaatcctacacggccccgcaggtccagtcttatggctcttcaggtagcacgacttatactcaggtgggcaacaatattatcgggtctgatggtacttcctgtacatatgttggccagagtcttatctgtaggtga

SEQ ID NO: 192927 - DNA, 360 bp, Klebsiella oxytoca
atgtctgggtattactattttacaactcgtaatgctgccaaaacttctttcactgctctcattacgtcaccagtagaggggcagaacgagttttacatcgcgccagatttgtctaacgtgctggcgatggttaacacgtatggggatggtgattttggcactgttcacgtacacaacacggagaaactctccctggtagattttgataccagttatgaatatttagccaaagactctgtgagaatgtcgaaggagtacgacaatggtgcctctggtgactttgcctacacgatgccagatgacgctcgactggttgaaggcgaggatgtgaccttctttatggaattagatgccctatga

SEQ ID NO: 192928 - DNA, 312 bp, Klebsiella oxytoca
atgaataccgagatgattttgaaactggataaactccagcctcgcaaagacaaacctgcagtactcggttcgatcactttaatggacattgtggccaacggcacagtcatccgacttttcaaagagaccgttgtcgtcttcggcgaaacttctcgcaagcgcatcgtaatgagcgtcaggcgctatagtgcgaaagggtgggtagctaaacaagttatctggcctgagtcagaactggagttggctttactggaagttaacaaggtcgcccagcaggaaattcaacgagcaacaaccctcgccatagcatag

SEQ ID NO: 192929 - DNA, 408 bp, Klebsiella oxytoca
atgagtttgaccaaagaagatttagtatttgacctttactacgcatccagcactgacgaagaaggcaataaactggcccagctgaccgttcagttccgtgacgaatcggctgttccgcatgtgaccacccagctggcccgtacaactcttaagcgcgatcgctcgaaggcttatgccgtcggcgagcaatccgtgaaaaatggttcggacactctgctggccgccattgaagcctattatcgaacagacccgaagaccattttcgaaaacctgatggcacaggttcaggatatgatcgagggcaatctgggcgccaacaatacctgggttggttcttacggcatcaccattgtgtctggcggctctctggaagagtatctgccggagtccgtttacaacgtccagtaa

SEQ ID NO: 192930 - DNA, 282 bp, Klebsiella oxytoca
atgaacgatttcaccatctccccgaaagcagaaaacgtatggctggaatcctggcttgacctgtcgccggccgagcagaaagaaatggatcacgtcgaaccggacgaacaaaccagctcccgcttcttccattatcaggatagcgtttatgacattgccgatttcatgcgcgatgaccgcttcccggaatggaacgccggctatccactgaatgccttcgctatgttgatgatccgcttaactgattcaggcgacaccatcgacatcggattacttcattga

SEQ ID NO: 192931 - DNA, 177 bp, Klebsiella oxytoca
atgctggtggctcttaactaccacctgctttcccgcaggctaaaaacacccacctcttaccgccaggctaccgaagcacccgccgacttcccgacggccaccagctgccgaaacagaacgcttggacgcctcacacccactgcgataattaaacaaatgagaaaacaagttgtttaa

SEQ ID NO: 192932 - DNA, 483 bp, Klebsiella oxytoca
atgaactatatcgccactgtaaacactcccgcgcatggcaccatctctgtcacatactccgacattgaaaagaacatccttggcgcctggcgcgaagaagagaccatccagctgtccgggaaagagaagcagcagatcgccaacgacatcatttgcaaccgtcgattcacgcgtgtcttcgaaaaagcttatgtcaccacctcaggattcggggtgtttatcttcccggttcgaagcgggcggttctgtcagtcaaaactcatcgagctcgcaacacagattgctgtgtggatcaaaacagagtcagggttcgactttacagaccaggaagcaaccgcgcagggtgtgcggatcgctgacaatgctcttaagtgcaaaaacgtcatttacgaagccggtatcgactcgtggaaggtcacttgcggggagttcgtgaaagagatgcacgccagtaatcggattcacatactggctggcaagtaa

SEQ ID NO: 192933 - DNA, 204 bp, Klebsiella oxytoca
atgattagctatgaccagatccgcgcggagtatcgcgcaaaatatcgcgcttataaacttgaactcatcgaagaattaagcgcccaacgtgacgcgctaaactttacgttctctgatttgcttaacagcaagcgagactgtaaacggaaaagagaatatttgcgcttgtctgaaatgatcggaaagttgcaaaacagcatttag

SEQ ID NO: 192934 - DNA, 651 bp, Klebsiella oxytoca
atgtctaacgtaaccatttctaaaaaatccatcattgatgcagctgtagttatcactgacgaattacaattaaaagcagatcaagctacacagacttacaacgaacattatcagaatggcacgcacaccaaagcagataaagctaacatgcttgcagcgtctactaaacttgcatacttcgtgaataacgttgtaaacgcagtaaacgacgataagctgtctggtgtcttctactacgcgatcaaagcaagcaagcaaacgccagaagtgtttttccgcgaagcgatgacaaatagctactctctcgaaaagctggtttatctggtgaaatctatcaagtctggtaaatgtgtgtattcagtcgctgatatgtccggatctcgtgtattcgctttaatcgatatgattaacgatgagatcgacacgttcacaaatggtgctgttttcgatttgatgaatgaagcaaaacaagcaaatgaaattaagttagacgcaggatatacgcaagccaaccagctgatcaatctgtgtgaacgtctgggactggtcgagaagattaaaggaatgggcgcagccaaaaacggatcacagcaatatcgctttatcaaaaatgatttttataactatctggctgacgctttcaaagcataa

SEQ ID NO: 192935 - DNA, 531 bp, Klebsiella oxytoca
atgcccaataccattaccgatatcacctacgggatacctgctgaggtctggccgcgcgattactcaaaagtagaggcgtcgttgatgttctggcgcaaggagcaaattcccgtcaaggtcacgatggaagatggccaggtgttctgcatgtacgttcaggggacgatgtcctcccgtaacaaggtagatctgtgcccggcgccgttcgacaaagacaatcgtgtaaggttgccacttgagcgaatcagcactatcgagtcaggtgtaaatgacgctgtcacccatgatttcgttggtcgcgtaaccgtacatccagactatgttgataaccggccatcccgccgtgatttctttaaaatttgccgccaggcccacgagaaccagaaatcaataagggtctacatggcggacggccgcgaaattgaaggtgtgtcactcggcgtcgatgcttgtcaggtcacacttgccgtggggaacgggcgaaaaatgatcgtcctgtttgattgggttgaacgtattctgccgttttag

SEQ ID NO: 192936 - DNA, 438 bp, Klebsiella oxytoca
atgatgaacaagtgcgcattaatagctttgctaacctccagtttactggtggccggatgttcaacccaggcggtcaggacgagtgctgccgacccagtcccagcttcgagaatactgtcgaccaaatacaatacgccctcagagaatacgcaaaaaatcatcgtgaaacgagactctggcagtaagggcgcgctttgtaccagccggctttctgttgatggtgagccagttgctgatatcaaaacatctgagaaggttgagttaaatctgccttatggcgagcatatcctgtctgtagatctgcagggcatgtctattatgtgcggaaagatgaacaccgaacgagaaatcatggtgtcaaaagataagcaagacgaatatcggatcggggtgacggtgtcggcagagctgttcatcatgaaaacagcctataaataa

SEQ ID NO: 192937 - DNA, 276 bp, Klebsiella oxytoca
atgaccgaaaatcgctcaatttcatgtcaggtgaagctcaccgaaaaagccaacgaaaagcttggttcgttcaaaacgcgcctgaaagagcgcaacatcaaaatgtcgaagtcagacatcattaaccttgttctgaccaagatgagcacagcagagtttgagaagatcgcgacctcgatggcagcggctgagaacgctagacagaaagtgttgcagatctacgagaactccgggatgaccaaggaagacttggaagatatcctcaaacgtctctaa

SEQ ID NO: 192938 - DNA, 1560 bp, Klebsiella oxytoca
atgactgttaggattgtttcgaacgcggtcaacgctatggtctccggcgctgatgacaacgtgaagcgactcgtccaggaaatgctgagttacgaagtcgaagccggcgactggaaaggcaccagtactatgttcaactggagcaaaaatgccttccccgcgggttttgcaaaatcggtagcagccaatctggtgaaggctggcatcaaatgcgtccatattcgcaaagacaaggttccggcgctgggcaaaccaaacccggcagttaaccccttcccctataatccggactatgcgtatcaagatcagactgtcgagacactggttcgcgaaggaatgatgattgcgcagatcgccactggcgggggaaagtcgaacgtagcttgcaaagccgcggcgcgtattggtcgcatgacgctgtttttaaccacccgctctgttcttatgtttcaaatggcagataacttccagaagtcgatcgactatcgcgctgagaatggagagccatggcttaaaggtcagaaggttggcatcattggttctggtgagtttcaggtgtctcgccatatcaatgtcgcaacagtgcaaaccctggcgagttttcttgaagagcctccacgcgatatgccggcggagaaaaaggcttatcatcttaagcgccgggagctggttaagcgattcctctcaagcgtctcactgctaatcctcgaagaagcccacgaatcctccggttcaaacttttatgacatcgccaggctttgcattaacgcagactatcgtctggcgctgacagcaactccgtttatgaaggcttcaactgaggccaatatgcgtctgatggcggttgcaggccgcatcgagataaaggtcactgaaaaatatctgatcgagcgaggtattttggccaaaccttacttcgtataccataaaatcgcgtacactccggatgaggctcgtatccgagcggaactcgcttccaagcatctgaacttcagagttggtatgagcacgccgtatcagaaagcttatcagctcggtatcgtttacaatattggacgtaacgaggccgtcgttcgcgacgcgctgatgtaccgtgatcatggactgaactgtatgaccctggtgaggatcaaacgccacggtcagatactgatggaaatgatgaaagagagcggcttacgggtagattttatttacggtgaatccaaccagagtaccagacaggctaagcttaacagcctggctgcagggaaaattgatgtgctgatcggctctacgatactggatgtcggtgtcgatgtgccaagtgttggcgccgtaattcttgccggaggaggcaaggccgaagtcgaaatgcgtcaacgtgttggtcgcggccttcgtgccaagaagaatcaggcaaatgtgtgttttatttcggattttatcgatataagcaacaaacacctgatgtcacactcatacgaacgaaaacacattattgacaccactcccgggtttgctgaaggcgtgttgcctgtcgggagcagttttgactttggtgtattacaaagagattaa

SEQ ID NO: 192939 - DNA, 705 bp, Klebsiella oxytoca
atgcaatggattgtatcaaaaagtatggacgtaaaaattaccattctgcaggtagaagtggccagactccggccaaatccctggaacaccaactcggttggtgctcaaaacttcgaaaaactgaaaggctccatcgaaaaactgggttttttcaagccaattctcgcgcgagagctggacggtggccaatttgagatcctcggtggcgaacatcgctggcgagccgctatggaaaagggtatttccacggttcccgttatatcggtgggcaaaataagcgatctggtcgcgaaacaaatgtctctggtcgataacgagcgatacggcgaagacgatcaggtcgcattacagcgtctgatcgaggaaattcagtccgaactcgattatcagctgtcggaaattgccccttacgacgacgaactggcggccacactggctcgtgagtcggcaatcgacctggaaatgcttgaggcgttgtcgcgtggcgacgaagagcccgttgagaaggactctcgtgaaaaagctgagcgtgttggtgcggaacaccagactatgcgcttcaaagtgacgtttgacgcttctgatcgcgttaccgaaaccatcaaatccatcatcaaagagcaggcgatcaacaccggcaacgacatggagaatgccggtgaagctctggtatggctggtcgataactacaaggagtgtatttaa

SEQ ID NO: 192940 - DNA, 669 bp, Klebsiella oxytoca
atgaccaaaacgttcgaaatcgtctaccgagacccggcagagctcattccctatgaaatgaacgccaaaaagcatgacgagcagcagatccgtgacctggccgcagccataaaaaagcgtggttttgaccagccgatcactgtcgataaagacgatgtcatcattactggccacggccgccgcgaagctgcgcttttagcggggctgaaaagtgtgccggtgatcgttcgcgacgatctgtccgatgaagaagtgaaggcgaagcgtctggaggataaccggctggccagcattgattacgatgccattaagttacagaaagagctggagtctctggtacttggtgacgttgaagtcttcggctttgacgagcgtgagctgaacgtgctggtcggtagcatgaccgaagaaatggacactggcgcactggttatggatctgggggaggaaaccgagcgccagaaagaagagcacaccgaaatcagtcgcgaagtcgccgccgaagaggttcgagtggtcgatgttctgggctttaaaacgctccctgctggctctgcgattgtcgtgggggatttgctcgcccatatggaagaaatcacgggagagagcggggtagacgcgttcgttgcttatgcgcagaaagtttcctccgggggagtcgaagcatga

SEQ ID NO: 192941 - DNA, 642 bp, Klebsiella oxytoca
atgagcacatataccatcaacgtatcgttccagacccgtgtcaacaagactactcgcacgcttgagatcgccgaatcgtttgggcttggcctggatgaaaaagactggacactttacgacaatcttgagctggaagttgagcagggtgatgtggtttacatcactggccagtcaggttccggaaaatctgtcgtgctgcgtgagctacaacgccagatgaaagaggaagggctttcagtcgcctccattgatgactttacctttgacaacgacgtcaatgtcatcgaccagctgggtaaaaccaccagcgaagcgttagggctgctttcgatggctggcttgaatgatgcctatctctttgtgcgcaaaccttctgaaatgtcggatggccagaaataccgtctcaagatcgccaagcttattgagttgggcgcgaaggtatgggctgcggatgaatttggcgcagttcttgatcgtgttaccgcccaggttgtggcctcgaacctccagcgtgccgcgcgaaaggttggcgcaacagtaatggtcgcaacgactcacgaagacctgaaaaatgcactgcggccgaacatgcagatcaccaagcactacaaggagcgagtgaaggttgattatgcagattaa

SEQ ID NO: 192942 - DNA, 552 bp, Klebsiella oxytoca
atgcagattaaaaagactttcccgatttatgagggcccagatctgcaccgccgctggactacagaagccgaatggcgagactggcttcgtgctcatggcgcgtacggttttcgcgttaccccgtatttcaatcgctgctgtgtcgtctttggtgaaagacgttatgtcgagacgataaaacagctctacggcctcgatgaaagcgagttcgtatatggggttggcggcatggtgacaacgctgggctatgttcaggccgacacgatgcttcattgcgtctacctgccagaaaattacgatgaaacagtctactggcatgaggcactacatgtggcgctgatgaccgcagaatatcacggcgtgcaactccatgatcaggaggcattgacctacctgcagggttatatcgcggaagagttcaatcgttcccgactacagtttatggccgacaagaaagctggtggactgcctgcgatcgagggaatcgtgactcgtccagcatccactatctgtcgtggcggtttttgcaatcgtaaggtggtgatgcgatga

SEQ ID NO: 192943 - DNA, 891 bp, Klebsiella oxytoca
atgactgacatcatcattaaacggtatcgcccggaggagttcccgcgccatctggattttcttgagcgcatgaccgtcaccagggggacggtagaagactggcacgcgcttaagtcgcttcactacaagacagatgggaagccgttcgcccctacctactaccgttgtgagcttgatggtcggttggtaggcgttgtagttatggccttccctaaactgctactggcgccgcggcatcgcatgtttccaaagctgaaacccacaaccaataccaccgtggcaaatcagtactggggacgttacgtaaacaacaacttcgctgtgatcagccgctctgtagtggacacccagtatcgtggcgtcggggtatcgtatcgcatgattaatctggttagcaggatgcatgaccggccaatcatcgagatccagtcgtcgatgagcaaatataacccgtttgctatgaaagcagggttttgcttcatccgtcctgaacgtccgaagagctacgaaagcgcgcttcgcgtctttcagcgccattttcgttctgaccccggcgacaacgaagcgattgtgaaggagctgtttgcgatgactgattcacgccggcgccgcgcactgcgagatctggtggcggactaccacaagaatagttctctggcaaaagcaggccgcaaccgtggcactaccattcaggatatcgcggatagcctggtggatgaggccagcatcgtgaaactgctcaaggatattcacaatctgagcttcacttcaccgctatatggggtttatcgcaaccctgattttggtcgccagctgcctgacacactgccactgctggcttttgataaacaaccgctgaatgcaccactggatattgcgttaccggcataa

SEQ ID NO: 192944 - DNA, 267 bp, Klebsiella oxytoca
atgacactgactgataaacagaaagacatcattaagaccatcaacttaggccatgaacgtggacatttgctcgatctggacgagctgctggaagtgctgccttaccggacgacaaagcagtctatgcaattctccctgcgcgcgctgatcaagaaaggtttggtcgaaaagcacgactgccggccgcgagaggattctggctaccagcgtcgaactctggggctgacgacattaggtcgagccagagccaagttactggtgatgtaa

SEQ ID NO: 192945 - DNA, 642 bp, Klebsiella oxytoca
atgactgtcgaaaaagacgagagcaaaactcgcctgactccggctgaatgggcggaagccgaagcgaaatggacttcgggcgagtatacgctctcaaaactggaagaagagtacggcatccgtcgtgaaacgctctccagacacttcaaaaagcgtggattagagaaaggcgctgattctgttgggaagatggtgcgcgagtctctcaagtccgatgcagaactgcgcgctaaagcccgagccgaaaagatagaagaccgccggacacgctatgacggctgggcgtatgcccttggtcagatggtgatggtcgaggtcactacagcaaagcgcgaaggtaagccactggcctcgattgaggacgatcttaaaagcctgcagcgcgccagcggcacgctggccaaatgcttcgaaatttcctccaaggcattgggcatggagaaagaagaaggcggtgaagaggatattccgaaccttgtctttggcgagctaaccccatcacaggtggcccagctgcgcaaggaagatgatgagcccgaagtgattgatgacgatctgttggaatcactcgaagaagaagcgctgagcgaagctgagagcgattttgacgcatcgggcgaagacgatgatggagatgcataa

SEQ ID NO: 192946 - DNA, 1257 bp, Klebsiella oxytoca
atgtccatcccgtcgtctctaagtctcgtacagctgcactccgggcagatgcaagtcttccagtcgccacatcgtttcaaagtggtgtgcgccggacgacgttggggtaaatcgaggctgtcgatctcaaccatcattcgcgctgccgctaaggaaagaaaacaacgagtttggtacgtcgcgccgacctaccaaatggcgcgccagattctatgggatgatctgcaggaagttttgccgcgtaagtggattcggaagaagaacgacaccacgatgaccatcgtgttgaaaaacggttcggagatcgcgcttaaaggcgcggataaaccggatacgcttcgtggtgttgcgctgcatttcgttgtgctcgacgagttccaggatatgaagccagacacctggtacaaggttctccgtccgacattgtcatccacccgcggcggcgcgctgatcatcggtacaccgaaagggttctccgaattccataaactatggactatcgggcagaacaaagagctgcagcgcaaaggtcagtggaaaagctggcagtttgtaaccgctgattcaccattcgttccgacggcagaaatcgaggcagccaagaacgatatggaccctaagtcgttcgctcaggagtacctcgccagcttcgaaaacatgtcagggcgcgtgtattacccgttcgatcgtagcgttcacgttaagccgctgcagttcaatcctaaattaccggtgtgggtaggccaggacttcaacattgatccaatgtcgtcggtcatcctgcagccacaaccgaatggggagctgtgggctgtggatgagcttgtcttgttttcgtcgaatacggcagaagtgtgcgatgagctggagcgtcgcttctggcggtggaaatcgcaggtcacaattttcccagacccggccggcgcctatcgtcagcacgctcgtggggaatcggacatcgacatcttcaaggagaagggctttctgcgtgttgattatccgaaaaagcacccaccgattgctgatcgtgtgaactcagtgaaccgcatgttgatgagcgcctctggcgaaactcgtttgtatatcgaccctaagtgcaaacatctcatcgattcactggagaaagttatctacaaaccaggctctcgcgatatggataagagcggggggattgagcacagcgcggatgccttgggctacccggttcatcgtaggtatcccgtaaaaaatcgtgttattcttggtggctcaagataa

SEQ ID NO: 192947 - DNA, 1575 bp, Klebsiella oxytoca
atggaattgactgataagcaaattaaggatcttgtggcaagacgccaccccgaatacataaagaaaaaagagcactgggatttcctcgccagcacatacgctggcgggcgtgcctggttcgatgacaacattttccgatacttcaaagaaggtgatcaggagttcaaggagcgtctggaacgcgcctaccgcttcaatcacaccagggaagtggtgaacctgattaataaatatctcttcaaagaggacatccatcgaaatgtagaagaagcgcctgagccaattcagaaattctggaaacgcgcgacacgacagaatgtttccatcgatggctttatgtccgcgcttgacctccagtcctccatctatggccgtgtctgggtggtggtcgatagcacgatggatagtgacgcagaatccgtcgctgacgagaagaagaaggatgttcgcgcctatgcctactggatttctccgcagcagatgttggatatggcgtgggacgatgacggcaatttgatctgggcgctgattgtcgaagtggcgcgcgatgatcaagatccttttacctcatctggccaggaatatcagcgttatcgtctatggacacgtaacgagtggtatctattccgggaagaggttaagaaaggcgccgggaatgccggtcgtcggaccgcaaaagttgtgcttgaagataaaggcgaacacaaacttggcgttgtacctgtgtttcctgttgattgcataggggagagcgaatcgccgtattttagcccgtcgcttattgatgatatcgcctaccttgaccgtgcagtagccaactatctgtcgaaccttgacgccattattcaggatcagacgttcagccagctggccattcctgttcagtcgctcctgccaggcgatgagaatcacgcaaaggtaatggaaatggggacaaaacgcgtcttcacctatgactcggaaagtggcaaccagcctttttatttgtcgccagaccctaagcaagctcagatgatcatcaccactatccagaccgtgattaatgagatctaccactccgttggggtcgctggcgagcgaacaaagcaggataacgctaaggggatcgataattcatccggggccgccaagttatatgactttcagcgggttaatagtctgcttattactaaagccgagcgtcttgagcgggctgaacgccagatgatgtttttggcggcgaagtggatgggggtcgatctcgatgaggagcattcgctgattgcctatccggagagctttgatatccgcggtctgacggatgaatttgccgttgccgagaaacttgggctgctggaagcaccggattctgtgcgtcgatatcagatggaaatgctcattgagaaaatcttcccgaatatttcggccgcgatgcagaaagaatttgagaaagatctcttgaattttccgccaaaaaatgctctcaacacccttgaaaataagtcagtacttacttatcatcgtgatacagtccaagagagcggacaagatctatcccaagggaatgggaactcatcaactcaagcaaccgagtga

SEQ ID NO: 192948 - DNA, 900 bp, Klebsiella oxytoca
atgaatctgtggcaaatgctaatggcccgtcgtggcctcatggatgtcgccgaatcacatgaacgtggtggcgcaggtgctggagctcccgctggtgcagaagagcagggcacccaggaatctggtaagcagaacggcgagcagaaagatcagccgaaaatcgaagacgatgaattcggagggatgactcaggaagagttgctcgctgaattgcgtaaatccaagaaagccggtgctgacctgctgaaagagaacatgaaacgcaaggaaaaagagcgtgccatggccgatcagctggctcagtacggtgatatcgatccggcacgagcacgccagcttcttgaagctgagcaagccgcagaaaacgcacgccgtgaggcggagcaagctgaactggaacgccgcggtgaattcgatgctgtgaaaaagcaaatgatcgaagctcaccaggctgagatggctcaacgtgatgaacgtttttccgctctggagagcgaaaacgccgcacttaaagcccagctggttgaaatgaccgtcggcgcttccttttctggctccaatttcctgcgtgaaaaagttctgatgactccggctaaggcccgcgttatctacggctctcatttcgaagtgggtgaagacggtaacgtcgttggctatgacaagccggcaggtcagaaagagcgtgctgttctggttgacggcgaaggtaagccgttaccgttcgaatccgcgattgagcgtattttacgtgcagatccggaagctgacgctttattgcgcagcgaagctaagcagggtgctggttcaattagtaaaccgacccacaaagtaacccagccgaagaacaagtcgacaatggataagttgactgccggtttagggaaaatcggaatcaagtaa

SEQ ID NO: 192949 - DNA, 879 bp, Klebsiella oxytoca
atgccattactgcgtgaagaagctgaaaagctgtctaataacgagcttgaacagggcgtgatcgagaccattatcgatcgtgacgacctgtttgccgtcctgcctttcatgaagatcaattcgaaggcatatctgtataaccgcgaaaaaaccctgagcgaagctactttcattgatgtgaacgacaccatcaccgaaggtgctgcaaccttcgaagagaaagttgcgaagctgcgcattctggctggcgacgttgacgtcgacaaattcctggctaccactatggctgatactaacaaccagctggctatccaggttcgtcagaaagtcaaaggtctggctcgtgccttccgtcgcaatctgattgttggcgactccaccactaacaacaaagccttcgacggtattccgaagctgatgcatgacgatcagaagatcgacatctccggcgcctccatgactttctccatgttcgacgaactggtcgacgcagttaaagatctgggcgcagactgcatcatgatgcgttctgagcatcttcgcgcatatcgtgcgctgctgcgaactgtaaacgtaggcccgtccgaaatcatgatggaaaacttcggtcgaccaatgctgtgccataacggcgttccgtttatcgtaaacgacttcattccggttgcggactccaccaaagcggatatctactgtctgcacctttctgaagaaaacggtgtaactggtctgtacggcggcgaaaacgccggtatcgttgtggaaaacattggcaccgttcagaacaaagacgcagtacgtactcgtgtgaagtggtactgctctctggccaataagcacgacaaagctatcgcggcgctgactaacgtcaaaatttaa

SEQ ID NO: 192950 - DNA, 429 bp, Klebsiella oxytoca
atgtcagaaaaaaaagtgaagatcactgaaaaggccttcaccgactttacgggggttatgttccgtacttctttcactaaatcggtgtccgatcatccagtaaacgagcgcatgcagaaccgtatcaccgcagctatgcgagcggttccggtggagcccactgtcgctgttactggtgtgtcggtaagtcctaagtcggcatcggtggaggtgaaaaaaacggttcaactcacggctaccgttgcgcctgctggtgctaccaacaagaaagttacctgggcgtcgaaaaatgctgaatttgcaacggttgacgcggctactggtctcgtgaccggcgttgcagaagggactgcaacaattgaagtcacgaccgcagacggcagccataaagcaaccgcaactgttcaagttacagcagctgcagcctga

SEQ ID NO: 192951 - DNA, 435 bp, Klebsiella oxytoca
atgaaaccagcaaaaattcatcttctggaacctcagttccttggatacacgggcatcctgtgcggcgtttactttaaagacggcatttccgtagcagagctgccattcctcgatcaacagcggatctgcgcctcaatgcgtgccgaaacgattgatgggcaaaatgtctctccatcagctgccttcagcaatcgtaacgagctggtggccgatcagattgtggagcctacggcccctgatattgtccctatgaaacgtggcgtcgcgaaggaggagacaaaacatgtgcagcgcttcacccgagaagagctggagtccattgctgactgtgaaggtatcgccggcctgcgccagatcggtaacacgcttggcgtgaaagcgaagggcattgttgaaatgattgagggcatcctgaaagcacaaggcggtgagtga

SEQ ID NO: 192952 - DNA, 834 bp, Klebsiella oxytoca
atggctctgatcgacacgtttcgtagcggagacatcgtgtctctgaccttcgcctttaacgtactggatatcgattccgcctcttacaccgtgcgagatagtgcaggtaccacacttgtggacgaagagcctctcgatattgcagaaggccaaatgtctataccggtagtggtctcagcagagcataaccagctggtcgaaaaagagcgtgatctgcgctacgtcatcgtgaaggcaacagctggtgggctaacccacgaagagcggcagatgtatgtgctgcttaatagctttgaactatccgtcccgggtcagtcgtttgccaccgtagccgatgctcaaatgcaggccattgatatgatcaatggagatacattgctggctgatggagaggggttgatgcgcaagcggctaatcgaagcgacacggcgaatcaaaaccttacctttctctatccggaggatcatgcgcatcgatttcgaccggtatgaccgtccccaaaacatgctgaatgtctatgacatcccctggggggctgacggcgtgtatcggcaagatttggtggactgggaacggatcacttcggagcagtttgcggatttaccagactactttaaagaggcgctgcttctggccaccgttaatgaggcatgcgagatcgccaatggcaacgatattgcgagtgcgcgagaagacggcattttgtctgaatcgatcggtgaaacaaccaatatgtaccgcacaagcaaagtggcgaatgtccgtgtggcccgtagcacctggcgattgcttattagttacatcaacaatcggatgattgttcgtcgtgcgtaa

SEQ ID NO: 192953 - DNA, 345 bp, Klebsiella oxytoca
atgaatatttcgtggcaagccgaattgtcgatctaccggtttggttccaaaaacgtctacggtgaagcgcaattgcagttcgtcaggaagacgaaagtaggcgtcgttaaatttgaacagagcaatgaaaaatcgtccgtcagggcagatagctctggaagccgcggaaaggcagcgctggagttgtttgacgcagtacttattgttccacttgaagccgctgttcaactcgatgacgttcttgtgctggaggggcagaagctgaaggtctcaagcgtacatcggcgatggggactacgtggccgccctgggcatcttgagctgggggcgaatatatgggtttga

SEQ ID NO: 192954 - DNA, 474 bp, Klebsiella oxytoca
atgggtttgaaatatgacgcacaccagtttaagcgtgccggcgccagacttaataacagccagaaagcgttcaagcgatacctaatcagggacatggaaaagctggcgcgtctggttgaacgactggcacgagccatggccccgcttgaaaccgggtcgctggagagcgccatttttgcgcgggttgtaaaagaaggatacgcgggacttcgtattgagctttccgtatcaggcgcaaagcagcgcgaaggacatccaggcgttgaggttggggactatgccaaatacatggagcttggtaagtaccgtcttggttatttgtctcgtatgaagaatgttaccaaccctcctgtcgccggcgtgaagcctaaagtgggcccatatttccttgagcgagcgactcagatcagcgaaaagcaattttcgcagacgatcattgaagctgccagaaaagcaggatttacgcgaggttga

SEQ ID NO: 192955 - DNA, 393 bp, Klebsiella oxytoca
atgtttgtagaagcattcgcaaaattgatacaaaaaaaggggcttggaaaagtagggacggacattttctgtcactatatgccatcaaaagttaagtctggcatcttgctgattaatcccaatacaggcatagccatcgacccggatttgcagggtttttacttcgactcattcacgatagtagttcgcaatgcgagtattacaaaatctgttgaaatggccaacaaaatcatggatatccttcctgttagcaacgttgggtctgacggggtattcttcaaaatggttaggccgatggcgatgccaataacgtatccaataaatgacggatcgcttattgaaacggggattccacttgaatttgccgggtactttattgaattgaataaataa

SEQ ID NO: 192956 - DNA, 747 bp, Klebsiella oxytoca
atgtccaatacccatgttaaaaacatcaagcttggcgcctgcaaggtgtcgtttggtggcgtggatctgggttacaccaaaggcggtgttcaggttgaaatcgcaaccgaaacgctgaaagtgaccgtagaccagctgggccagaccacgatctccgagctgatccagggccgcaatatcaccattactgcgccgctggctgaatccgtgttgaaaaacatggtcgatctgatgccaggttccacgctgagttctggcgaagataccgtaaccatcacgtctgcgcagggtgtgaacctgatcgacgttgcgaaagagttggtgctgaccccgcaggatgcgacggattatgttctgaccatccctaaagcagcaaccgcgggtaacttcaccatgacctaccagtctgacgacgttcgcgtgttctcagttgagttttccgcttacccggacgacgctggcgtgttggggaaaatgagcctcccaaagccggttgagagcgtcacgctgaccccgtcttcaccgaccgtaaaagtgggcgctaaagttcagttgagcgcaacctttaccccggccgatgcaaccaataagactggcgtgtggagctctgatgcgactgataaagcgaccgtagatcagaacggactggtaactggtaaagctgtcggttcagccaatatcaccttcacaactaatgacggcgccaagaaggcgaccaaagccgtatctgtaactgccgcaagctaa

SEQ ID NO: 192957 - DNA, 318 bp, Klebsiella oxytoca
atgaccaaattactcgatctcgactccattctgccgccgaaaaaaagcatcaaatttggtggcaaagaatatcccatcgttgaaatgaccgtcggcctctttgtttctatcaagcagatggaagacaaagacctcatgaatatgtctcccgtcgaccaggtgactgcctacgcagaactggtacgcaaagtcattccgtcagtacctgactccgttctggaaaaactgactgtccagcaactccagcagatcttcactttcgccatggaagtgattgatgaagagaacgaaaaagcggctggcgaaggggcaaagtaa

SEQ ID NO: 192958 - DNA, 234 bp, Klebsiella oxytoca
atgttctggatgctcagccgcaatatcgatcgtctgcgagcggaagaggatgtccgcaatctgcaggtcgcccgcgtcgcccaagcggatggcgatggcgttaaggcgttcatggagggtttgcaactcaggattggaaggccagtcgttactgataaagtctaccgtccgcatatggataaggcagaccccgacgccaaagagcagctgatgcaaatttttggcagaggatga

SEQ ID NO: 192959 - DNA, 4539 bp, Klebsiella oxytoca
atgtcacaaaacgtagagtttatcctgtcgctggaagacaaacagtttacggcgtcaatcgaccgggcgggtaaattacttaccaaatttggcgagcgggctaccaaaccggctcaaaaaattaaaaacctcgagcgctctctgggttcggtctccagcattcttggcgctcttgaaacacgactcaattctacggcagacaaactgcaggacgtagctgccggttttgagctcgtttccaacacctctcgaaaggcacaacgtgaactgtccgctatcagcactgatttgcggacattcacagatcgcgttgattcggccacatcgtctacgcacaagttcctggcctcattgcggaaggttcagtcggaactcaatgagttttctgattgggtcaaatacgcaggagaccatgccggcaaattcaacactgagattaagggagccactacttctcttggtggaatgaacaccagactaaatgcgaccagcaagcgtctgagcaattgggggacaacgacaagccaggcggccgaggggttaaaaaaagtcaaagatcagatggatggcgttattcgaagccagcagctgatcagccgccctgtcagggtcagaacaaccacaacgggtgggggaggcagcggaggtggcgctgatcgatttaccgctgcgccccatcgcggtggcagtcgtgaaaatagcgtcttctctgggttacgcggcaatatttttcttctgggggaaattggcgatgcggccagaacggttactgacatcctgtttggttggcagaagccgatcgtagaggctgcggccgagatgcagcgtatgcgtgtcatgttgcgtggcttgaacaaggataaagtcaatcctggagaagccgctgctcaagatatgcagtatatcgtgaacatggcgaaaaacgccccatttgcgatgcaggccttaaccgactcatttgtgaaattccgttctgctgggctcgatcctactgatggctcgttaaaggcactggtggactcagtcgcacgttttggtggcgatagtgaattgcttaagcgagcggcggtggctgtccaacaaatgtctggtaagggcgtcgtgtcgatggaagagctccgccagcaattgggtgaagcggttccaaatgcgatgaaggcgatggcagatgcggccggtatcacgatgggggagctaaccaaagccgtctccagtgggaccgttgaagcgaaacaggctctttcgttgatgtttgttggtttgcgtgcggaaaacgaaaatgccgccaaagatatgatgcaaacctataccggtgcgttggcgcagctgcaaacctctttcactctgtttgctgatcgagtggggcaggctggataccttgactcgctgaccaaggggatgaaagagctggcggccgtaatgaacagcgcagaaggcatttcgttcgctaattcattgggagaggggcttaccaccgcgattgatggcctgcgcgagctggcgcaatggttggctaagaatcaggagttggttattacgctgggcaaaattgtcgccggaatggtggcatttaaaatgctcagagcgggcattttaggtgttgtcggcgccggcggccagatgctttccaccttcatgaagatgtccactgtaatccagacaccattcacgctgggggcgacggcggtcactcgtttcaatcgtgctgcacgcatggggctggcaccaatcccatcgctcatttttgccattcgtggcgcgattacggggctgaaaggggcatttgctgggctgactgcgtttatcgcagcaaacccgattggtgctgcgtttactgttgcaacagtggctgttgccgggctgatcacctacatgaccatgcttcgcaacgaaacgtccaaagttgttgaggagattcgcaaaatccccgaagcgatgacggcggccaagcgcgcacaaatggcggagcgcgcatcgcagcttgagaagcaaattcagcgggaccagcaagcgcttaaaactggcgaaagtgttaactacatttccactgtcgccggccctgtcgccgttaaggagtctaaagaggttgttgaggctcgactgaagaaaaatcaggaagagtacaagagaaccactgacaccatcgcgctgggggatggcgctgtatccaaacgtctggcgaaagaggctgctgaatcccagatcgagaaaatccgggcggataatcagctcttatcagctacgtttgttaaagcgcgtcaggaggcactggacaaaatccagaagatcaatgacgacaaaacactgtccgatgatgagaagaacaagctgcttgcgccgctgcgagagacagtaaacaaatcttatctgcagccggcccagaaacttgtcgactctttatcatcgcgcaagaccgcaactgaaaagcagatcgcacattttagcgatttgctggaaaaggcgaaaaaagaaggaaacacagaacaggtacagaagctgcagggcagtattcgcggctatcaggaacacctggagacgattgctcaggaactgacacaggctgagtttgaacgcgataacgcggcgaaaaccgggaagggcgtgaagaccaaccagggaacagtgcttgggttgggcaccagcgacaaaggcgctgataaagcgctcgcgcagtacatgcgcaaccagatggactctgcggtttaccagcgcacgctgcctgatggcacaccaatgatggattttgaaggaaaacctatcattgggccgaagcagcttaaaacccagcttaacctgcagaaagcctccactgcatcgtctctggaaaagatgagcgagaaggagcgtgcagccgccatagccgcactaaccaaagctcgtgaacaggatgccgctgccgccgagagggcggggaagcgtaccgcgaatgcctctgaacgcgccgcgaagagagaggaaagtgcgcaacagaagctggctgccggctaccagaaggctctggataaagctgatcagctcatggggcaaatgggcgaaagttcaaaggccaccgtgtcgtttgatcagtcgctgcgtgatgtcactaagtcactaaccgatcttgcaaacgccacgcctaacgagtttatctcgcaggagatggttgaccaggctaaaaaacgtctcgcggatttgaggaacgctacccccgaataccgtgaaatgtttaatcgccgcaacgtcgagcaaatgatcagcgcttgggcgccggaatcggattcgattatcagcgcaggcttgatgcaaagccatgaggagaaggctgccgagttttcggatacctacaaccgcaatcttaaggcgctgatcgagctgcgtgataaggcgactgacccgaaaatcatctcgctttacaacaagcagcttaatcagctggtggccgctggcaataatgcgctgattaagcaaacaggtacagcgacccagcagttggctctggagtatgagaacctggctgagcagattgagggcacctggacagatctgtttagcggcttaactgacacgcttactgactttgttgttaacggaaagatgagcttctccagtctggccacatcgatccttaaagacatcaccaacatggtcgtgaagacccagatcactctgcccctcatgaatatgttgggaatgggaacgacaaacgccggcaatgcacaaagtggaaatctcatgaatggcgtagcgtctgcgatcgctaatcaaggggttcagctcggtaattctggtggggcggtggccaatggggataaatctgtcggcgaggccaccaaggagacagcctccggcgtgaactctatggggcaagcgtctcagaatgcggccagtggtttaagccaggcggtgaatggtgtctgggactggacgaagtcattgttcaccggtactgatgctacgaaagatcaaaccaaagcggttaacagcagcatcctcagtatggggaatctgtctaccgcggctggggcgctggcagctacattcgccatggtaggtgcttcgtcgtcgagttcgtccagccgttggctgaatttcggtctgtcactggccagtaccgcagtatccgcctgggctgggtcagcttcatcgtcttcatctgagccaaagcctaatgtgaagaaacacgccaatggcggcatctttggcagggaaggggttgtacctctgagagcctatcagaaaggcggaatcgccacctcaccgcagttggcgatgtttggcgagggctcaatgaatgaggcttacgtaccgctgccagatggtcgaaccattccagtcacactttctgcagagtcaggtggaaagagtacgggtaatgcggtgtcacctgtctcgattcagatcaatgtaaccaaggatggccgaaccagcgagagcagcagtggaagcgagagcagtctctggaacggcgcagcacggcaaatcaagtcgattgtgcttgagacgattgccgaagagaaacgttctggtggttcacttaatccgcataccaccagagggtag

SEQ ID NO: 192960 - DNA, 336 bp, Klebsiella oxytoca
atgtcgaggaaagtatttaattggtatccagattatgagtctgagaaaaccgtaaagcctaacgtgaccgtgctgaactacggcgacgattacgagcagcgccagtcgcaggggctcaatcggattaaagaagagtggtctctcacgttcacccgtagccatgacgtggtaaacgacgttgatgactttttgactgcccgcgctggggtggagtcatttatttggactaacccaagaggcaaagcaattatcgtggtttgtgacagccatacggtaaagcgttaccccggttatcaagtgcttacggcaacatttagacaggtttttgagtcttaa

SEQ ID NO: 192961 - DNA, 699 bp, Klebsiella oxytoca
atgggtattagagctgatattcagagtttatcgccttctgcgctcattgagttgttcgagctggatatgtcggtgacaacctccggcggcaagttgtatttccatgccggcaccaacgggcttagccagccaattgtctggcagggagtttcctatgagccgtggccaattaaagcgtctggctttgataaaagcggtcagggaacacttcctcgtccaaagattcaggtttccaactacgacggtgtaatttctgccgagctgcaggccaatgacgatctgattggctgcaaaatcattcgcaagatgacgctggcacgttttctggacgcggtgaactttccggatggaaacccgaccgcagacccaagtcagcattttgctgatgaaatgtggttcgtcgaacagaagaccctggagacgcaccagtatgtcgaattcgagctgtccagcgtcttagatctgatgggcgttcaactgccgtatcgtcagatcatcaaaaacagctgcccgtggaaatatcgcggaacagagtgtggctacaccggcccatatttcgacaaaaacaaccagcaaacctctttggccggcgccgactactgcaccaagcgttacgacgcctgtaatgctcgtcgcaactacttcgcgaatggcgttattcattttggcggatttattggggcgacacgatatgagtaa

SEQ ID NO: 192962 - DNA, 798 bp, Klebsiella oxytoca
atgagtaaccagacgttacctgagctgggctcagaagtcatgcaggatatctatcgctgcgctatccaacgttacccgaatgaagcgtgtggctttctggtgcgcacacagggtgagaaatatcgctttatggaagcgatgaatgtctctgaaacgccacgtgaggattttgtcatgcgtgccagtgacattattgcggccgaagatgctggggaagtgatcgctatttggcactctcacgttgagcgcagcgcagaggcgtcagacccggatcgctccgggtgcgaggcgacggaattaccgtggatgattctggcaattcgcaaaaatgtggaaagcgatatgccattccactttagcgaaatgaacgtcatttatccgtgtggttttgagatgccctacctggggcgcccatacgtattcggtgtgtttgattgctggatgctgtgccgcgattacctaaagcgtgaatttgacgttgagctgaatgcaaacgcccacctgcatattccttcctggtacacgggggacaacgacatcctcgaccagaactaccgaaatgaaggacttgtccgcatggcgccggggacggaaccccagcgcggcgacatcttcttcatccagtacgggaaaatgccagatcactgcgcggtatacatcggcgacggcatgatcatgcatcaccagatcgaccgtctcagctgtcgggcttattacggtgggatgtatcagaagcacacgacgcatcacctgcgtcacagggatttactcaagggagacgagacgtgtctgaattag

SEQ ID NO: 192963 - DNA, 612 bp, Klebsiella oxytoca
gtgtctgaattagttcatgttcagctcggcggtgcgatggcaaagaactttggccgccactggaaattgaaggtgcgcaacaccaaacaagccatcgatttgattgaggcgaatcgcccgggctttaaagcctggattaaacgtaaccgtaaccacttcgataagtaccacatccaggtcacaaataagcagggccacaagtggtcaatggacgacaccgaataccagatgatgggcgagtcggaaaatatcgcaaaaatccgcattactcccgtaccacgtggcagcggtggtaaggcgtttgggtggttccagactttcgtgggcgccgcgatgatcgctgtcggcgctctggcctctgggctgacttttggtgcgtcttccgcgctggtgatgggagggatgtcattgatgatgggcggtgtgtccatgctgatttcgccgcaggcatcaaatgcgtctgtcagacaggcggataacacggattcgttttacttcgatgggcctcaaaacaccagcaaccagggaaacccggttcagcttaattacggcgaggaaattttagttggctcacagattgtgagttcttcaatcaccatagaccaactgtaa

SEQ ID NO: 192964 - DNA, 1434 bp, Klebsiella oxytoca
atggcaatgtacgaagttggcaccgttacaggtgcagcaaaccagacaaaggttactggtatttccaccaagtggtctgagactgcacttggtattcaagagggttcgattcttgtcatttatcgcaatggaagtgccgatctgtatgccatcaaatctgttaataatgacactcaactgactttgacgagaaacatcacaacagctttttctggtgcgaaatatggaattatcacatcagaaacagccagtacatcgtcttttgcgaaccaactagccagcgcattcaccctttggcgtaacgttgtccagggatggtctaccgcactgactggaagtggcgatattacgatgacagatcctctaacaggtgcatctgtgactgttcctgctgtttcaggaatggcgaaagcgtctgatcttgcggctctcagcaactcgctgaaagacgcagcgaaaacgagcgtcgcaaacacgttcacacagactcagacgttcagtaagggcgttacgttcagtgccaacattacggcatcaggccaaattttgcgaaaggatagtgccacgaagttcactgctattgatgccgggagtattgagctttctgctgctacgccattcattgactttcatcataacaattctacggctgactatacgcacaggatctatacagaagatgtggcgctatccattactccggggctacgtgtacgtggaggtactggtatgtatggtgcttgcactttgtacaactcagcttatagcgacggctttacatgccgtttatcatctgacggttcaccagcagtgggagatatcatcgccaccccgaggagcacgtggagattaaacacgcggggcgcggacgggaatggcgactctggggcgggaggtatctggtttgaggaacaggtcggaaccaaccatcgactggtcgtcatgcttcgcggttattcgcaggatgtccagtactggcagttcttacctggcggcaggatttacagtagccagaatgggaatgttcaatttcaagggacgtcagatgcgcggttaaagcatgacattgaacctactgacggtcagctgtctgttgatcgcattcgtcagcttgagttagtgacgtttatctacaacgatgatgagctgagcagagttcgcagagggattgtcgctcaacaggcacaggaagttgatcctcaatatgttaagcaggtgcacacttcgtacatgaagaacggcatgcaagtaaatgacgatcgcctgcaattggacaataacgtgctcatgatggatatgctggcaactgttaaggtactgctacaacgagttgaatcactggagaatacacttcattcatccgaagcgggagatatccttaaggtaaatcaaacagctctcgacgcagatttggttactgccattcaggagtaa

SEQ ID NO: 192965 - DNA, 324 bp, Klebsiella oxytoca
atgtcaaacgagatggcaggcgtgacgccagagcaggttgagcgcattgccgcaattgttgcgcgagaagtagtcggcaaattaagtaaggagcttcgcgacgatattggtcaggaggtcaacgatcaactgcgaacttactttggtgatatgactccggcgcaacatagcattcagcattccaacctggacaaacttcttaatcggctcgacacaatttcaagcgggttctttgggggcattatttccaagattacctcgttcctgatcaccgtactgcttttgggtttggccgcttatggcgtgaaaaatggactgcaataa

SEQ ID NO: 192966 - DNA, 693 bp, Klebsiella oxytoca
atgggtactccaagaggcattcgtaacaataaccccgggaacctggataaaggttcgccgtggcaagggttagtaaacaaccctgcagagacgcgtttctgcaccttcaaagaccccgtatgggggattcgagcactgacagtaacgctcatcacctaccatgataagcgccgcgcaaaagacggttccagcatcgatacgatccgcgaagtcatcgagcgttgggcgccgccgcatgaaaacaacacggccgcctatatcaatgaggtttctaaagccgtaggcgtgacgccggacatgatcatcgatctgcatgactacaatactatgcggccgctggtggaggcgatcattcgtcatgagaacggtcgtggcccgttgaaaacactcaacagctggtattcggcccaagttattgacgaaggtatgcgtcgcgctggtgtcgttaaaccggtaactgcagtgaaagccgtacctgtcacgaaagaaaccgccggcgcaacggtgactgcaggtatcggtattgcgcagctggcggacgtaatgccgcagatatccgttgcgatggataaagcccagggacatatcaccagcggggacaccgttcgcattatcttcggtattgcgaccattgttgtcgccggctttattgcctggtcgcagattcgtaagcatcaggcaggagtggtgtaa

SEQ ID NO: 192967 - DNA, 252 bp, Klebsiella oxytoca
atgaacggcagcctgctttcaaaggtcaaatcggccatcatgactttggctgccgtcttctttgtactcgttggggcgtacacctggggtggacgcgctgcccggcgggccatggaagaaaaggcgcagagagaaaccaacaaacggcttcaaggcacagtggatgtgaaaaatgagacgattaatgaagtcaggactaaggatgcttctgccgttcatcgcgagcttcgcgataagtggatgcgtgattaa

SEQ ID NO: 192968 - DNA, 186 bp, Klebsiella oxytoca
atgcttctgccgttcatcgcgagcttcgcgataagtggatgcgtgattaaaccccagaccgtgggcgtacaattctgtgatggggcaaaccctatctacatcagcaaggacgacgccctgacagaagaaactgagagggaaatcctgatccacaacacgctgggtgaacggctgtgtaagtggtga

SEQ ID NO: 192969 - DNA, 558 bp, Klebsiella oxytoca
atgtctaactactctggtttaaacattctcaaaagcaaggctaaagaattagccaaaaaacaagggattaagctaacggaagctcttgaagccatcgctatcgatgcagatttttcgaactgccatgagctttcatctgtggcgaagcgatttccattagaacctcggttaatgaaggccgcttttggtgagacgcacttcgaaaacgtcattttttcgagtgatgtgtacgttcaatttgagatggctgttgacgaacttttatctgatgcggttgcttcaactaatgctaatgattttgcaatatatgacctcgaggtaactgaagttcagtatgacgaggaaaaggggctgttgaaaatgactgtgtcattcagttatgagggtgttcaaatgccagaccattttttctcaggtacatcattcttcttaacagcaaatgtttctcttgtatatcgtgataataattggctaatcgctgaagaaggtatcgaaataatatcttcagactcaaatgcaagttctgacagcgactggtacgaccttacagatagctga

SEQ ID NO: 192970 - DNA, 666 bp, Klebsiella oxytoca
atgactcagatcattgtggtgggcggcaccaagggtggcccaggcaaatcgactgttgcgcagcaaattgcagcctgtctgaaaatcaaaaagaaaaagaaagtccagatcactgatatcgacatccaacgcaccacgacaggatggtgtgaagaccgccggcataatgaagagttggagctgatcccgttcgcctacgttcaggatgacatcatcaaacacatcacttcgcttcgtggccgttacgattacgtcgttgtcgacgctggtggtttcgactccgaaattcagcgccacgctatgctgatggctgacgtgatactcatcccgcttcgcccgaaacgtcgcgatctgaaatcgttgcgtgacatcgaccccattgtcgacagcgttagcagcgtgaatgacaaaatcaaaatccgtgctgtaatgaaccaatgcccgtctctgccttcccaggcggcgcgcattatcgctgcaaaagaaattgtcgaaaccttcggtatcgaggcggcaccggtgaacctttacaaccgcaacgtctatgacgatgccgaagaggcgggtcgttccatctttgagatgaccggagccgaacgtgacaaaaaggctgaggccgagattgaagcattagtagaatacgtaatgaccttggagggtgaataa

SEQ ID NO: 192971 - DNA, 363 bp, Klebsiella oxytoca
atgtccatgaaaatgggtgatctggcaaaacgtccggctgcggaagctgctgcgcctaaaagcagcacaccgatgcgccagcctgtccgtccacaaggccgtccaacacgtggtaaagagaaaatcaaaagccgcacgatgtcgcttgaagacgagtatttcgaattactggagatgatgaagttcatccctcgcttcgagaagttcacccgttctgatgtgatacgtgcagccattttccatctggcagaaaagtccccgcaggaaattgaggacatcgtaaagatgaacgaggcgatcaccgctgccgatgtgacgatgcgtactgacgaaataaagcgcgagttgatgaaaaagagttga

SEQ ID NO: 192972 - DNA, 1719 bp, Klebsiella oxytoca
atgtccataacaaaaatcttagatgaatttttggcttctgatgacagggttgcagtaattaaaggtgaatggggagtaggaaaaacacatttttggaaccgatactacgaaggtaaaagaaataaaagagaaattgaccagattgcatattcatatgtttctctatttggtcttaattctattggagaaattaagaaaaaactattcccttccactataccgcttaatcaaaaactttatagagaggatttactagagaaaaaacaacaaatgatggagaggtttttttctggagtgtataagtgcgtaaggtataataaagtaagtaaaaaaatctttaataactttagcatagggataagcggttttggccttaaatcatccgaatttacaatttttgatggttataattatgtaagtaaatatttaatttgttttgacgatcttgagagaaagggtagctctttagagataaaagatttcatggggttagttgatgaccttgcaagatcaaaagcttgtaagataatattgatttacaatgaaaataacttaactaaaaatgaagaagcaaaacaatttatagaatatcgagaaaaaattgtcgatcgtgacattatgtataaacctgacgtcattgataatatcagaaaaatatttccacataacgatccgaattttgaatttataaatagtgcggcagatgttttaaatttaaaaaatattagaatattgaataaaataaaaaagactctttacgcatatgagtctgaattcacaacagcgtgcagggaagtgcggaaagattttactttcagagttgttctttttgcatatgtattttactcaggggctgatgagttgccctatgatgaatttttcaaaaaaatacaacccagagcaatggctgatagttatcatactaatgatgacgaaatgtcagccactgaaaaattcatagagcagttagatatgtcatttacaaattctgataatttatttgattacgggattgattattactttaagcatggatatttgccttccaacttcagttttgaaagtgcggtgaaggctaaaaataaagattatgaagatatagcgataaatagaaagttagatgaaatatggagtgtttttagagattctttcaatacaaaccaagatgattttgttgatgcattgaaaggagcaatagaggagtataggtcgagaatacctcttagcaaggtttcctcgatttttattattctagaggagttaggcgttaactgcgatagttatattactcaatatgttgatgatcttattagtagaggttcacttaataaagaatataatttattgatgaacagcaccattgagcataaaggcttatatgaattgattaataataaattaaatcaaataagaaaggccgaatatgatttagatgagttgcttggccggttatcgagcagtaataattactcttcattacatattgatgctttaaatgcatacagtgaagatgattattacaactggattgttacctgtaacgaagatgttttagataagattaggcatggccttcttaaatttgacgaccacgttgatcctatacctggccagactcaaataactgataaagcaatagctgcaattaaaagagtggcaagaacttcgcaattgaataaaataagagttgaaagattgttaaagatagatattgattaa

SEQ ID NO: 192973 - DNA, 726 bp, Klebsiella oxytoca
atgagccagatcttttttgacaccataaacaacggccagtacgacttcatgacagagtgggacacggctgccatggacaagtgggttgctgaaaacatcggtctttcacgatgccagggggaggctgagctctttgatacaaagtggtttgactatcgcgacatgcacccgctgatggcaacctgcctgttcaccgaagcctataagcgcgcatactcacagatcatgctgtctcatggccgcgagcatttcgagacggcgccattcagcactggtctgaaacgcctgccttaccaagagctttcggcggtgaacaaaacatctctctggaaagctcgccagtttgcagatcggtattgctgttcttatgactattttatatcaactgttctttctgcagctgcgcgccgcctctgggacaaattacctcgccctcagcatctctggcagccagaactgattgagatcttcgaaagcaaactcgccaatcgtgcgggaacgcgtctggatgactctgtagtgagttttaagcacttaggagacatgcagcatgacccaattcaggaacgttactttgaatgggttctggagcgtttgaagcacatcacccgtgataagcgtatccgcaccatcttctctgctgtctggttgatggagctggtgcctgagcgcgttatctatgcccattacccggaagaactggaagaagcacggcgactgtgttga

SEQ ID NO: 192974 - DNA, 1341 bp, Klebsiella oxytoca
atgaccgaactttgccacacgggacgagggttgtctgaagagttcgacgacgacttccagaatcgtctggcggcgtatttttgccgcgatcatgagtttctgactcgtgccggcgatctggttgcccccaaccaattctccaatgcggcgaacgccatactggtgaacatggtatcgggctatttcagaatgtataagagtgcgccttcatcggcggccatcctcgatatgttgaagcgtgctaagcgcgataagacgatcagagaagagatgttcccggatgttgtggcggcgtttaagcgggtgctctcggaaaaactctctgatacggcttatatggtcgaccaggtcgcgacgttcgctaaaagtgtagcgttcgacgatgcgttgattaaagcggccgagatgaaggagaagggcgacttccagggagcgatggccatcatggccaaagtgcagcagatcggttctaacgaagcgacgggcatttatgactatttcgcctctgcagcggaacgttacaaggctcgtgaatatgaagcctcagatgattacgtgccgaacagcatcaccaccggtcttccgctgctggatcgtatgctctatcaaaaaggttgggcgaaacgtgagatggtgctcttcatggggtttgcgaaatcaggtaaatcgacagcgatgggggagttctccattaacgcaacgctggccggctacaacgttttgtatctttctctcgaagtgcatacctcgattctctccgatcgcttcgatgcgcggctgtctgaaacggagatgtcaaagctggtagagcagcgtgacgacgttcaccggaaactcgcggagattggcgcgacgaaaggggtggggaatctctgggtggttgagcgcccgtcaggaagcatgtcgcctgcagatttggatcgtatgctcaatagcatgaaagcgaatggcatgatcccggatatggtggtggtcgactatgcggacttgatgcgtgccagttacgacctccgtgacgaccgggcgaacatccgttctatctacaccgatctgcgtgctctctacgataagcacaacgttgcaggaatcacggcatcccagaccaaccgtgaaggtggctcatccgaagtggccactatgatgcacgccgcggacaatatcgaaaaagtccgtattgccgacttagtcatcactatcaacaagactgaggaggaagaagccaaaggtgaagcacgactctattttgctggttctcgtaaccagaagggcggggtgagtattcgcgttaagcagaacctcgaacagatgcgcttcatcgagcggatcatggaagttctttaa

SEQ ID NO: 192975 - DNA, 1119 bp, Klebsiella oxytoca
atgagtgacctcaaagagttactgtccgagctggatttcgaacaatggctggatatggaaggcatcatctatcgtcgcggcggtgtaagcgcccgcggccgcgaagtgaatatcaaagaatgcccggtatgtggaagcactaactggaaggtctatttcaacctgaccaacaatgtcgggaaatgcttcgccggcgatcacccagaagaaattcaatttaacaagctggttttcctcaaacactacagcggtaagtctcgtcgtgccttcgaggaatacgtacataacgcactcctgtctcaaggttgggcgccaaaaaaagaagaggttgtgctggccagtgctgtggaacttgaaggctcggtggctttaccgcggcattatgagctaccaattgacggtcggctgccggactatcttgttgagcggaacattaccccggaactggccaaatactttgacctgcgttactgcgtcgagggaaaacatgcttatgtcgacccatataccgatcaggttaaagggcaggcattcgatatgcgcatcctgataccgatttacgatctgaatggggtgatgaagacattccaggggcgtgacgtcaccggcgcagcagaacgccgatatctcttcccaatgcagctgccggcatccgggaggtttctctacaacggacataacgcagttggtaagcaaaccgtcgtcgtctgtgagggggcttttgatgtcatgggggttaagcgcgccatattcgacgaggaaacactccgggactacgtagagcccattggcacgttcgggatgcatctgtccggaaacacgactgtagacgcagaagaccagctgggcgcgtttctgtcgttaaaggttgatggtctgcgaaacgtcatcatgatgtgggatagcgagaagcaagcgatccgaaacacaatggcggccgccagacgattaaccagtatagggttaaatgtgaaaatagcctgtcttggagaagaagggctagatcccggagaggccacccaggaacaaattctcaaagcctattatcgagcaaaaccctactctaagcagctggagctgcagagcaaggttctcggtataagggtgtttaattcgtga

SEQ ID NO: 192976 - DNA, 1167 bp, Klebsiella oxytoca
atgtctttgtggaacgagtcctatcaaagctcagttgattcaatcagcaattacattgaaaataatttcattcacttctctgaaatacctgacaacatagacaaaatagacgattcagtttttgttgattcaattttagttgtagcctggcgttattttttaactatatataatcatcgtcgagaatcgctcaacaaatacacaccctttaatcaaaagcagctaggaaaattaaatctccctagcatccaagaattgatggaagataagtttcgcttccttaataaaatattaagggtaatatttgaatactgcttttgggggcgtgatgatttaagcccgcctaaggtcttagatcctcaagtgttagatagactagacaaattaaaaacaccatctgattttccagtcaacttcatctggattgaacgctctatgcctgcggcattaacgaaagatttattattatccaatgatttttcagtactaacgaagattgcgactgatgtaggcaattacagcgaagaaataactcaaggcataaataaaggactcaaagatgttggagaaaaaacagaacaattacgagttgaaatagaagggctaataggatctgcgagcgcatctgtaatatctctcaaagaatatgaatccaaactagatgaatataaaaacgattacaacttcgccctattaagtaaggctttctcaaacctattaaaaaccaaaaagtcagaatatgcgacaaatcacaaaaacataactattttttccatgtggctaattgctactcctttacttacattactaaatcatatatttaatatttacccagtagaatttaatctgaatgcattgttttatttcttgccaatcttatcattagagctattgttcttttattttatgcggctatattacatcgaaggtaagtccattaaggctcaaatacttcagatagagcagcgccttagtctatgtgagtttatacatgattacgtggagaaaaaaaataattcaggtgctgataaggaatcttggtcattgtttgagaagttgatttttagtccaatacaagttacttctgaaaatataccatctttactggatggagcatcatctattgccgagttagcagggaaagtattttccaaagatcctaaataa

SEQ ID NO: 192977 - DNA, 789 bp, Klebsiella oxytoca
atgaaagaagatatcgaacaggcagttttagagatgatcaagaagtcaggcgtagagcttggcgagggagaactggagagcatcatcgatgcctcattcaacacggcatcagagcatatatcgagtgcgctatcctacattcctctcaaagaaggggcgacacatacgtcggtgttagtgtggtacgcaaagacgcctgaaatgcccggtactgttcaaaagcgtgtagctctggttgcgttcatcgtcccgtcgcttgagaccggcattgggccagtcgcgagttttggcgcctggtatgacgacaaaatcatcttctcaaactgctaccagatggaaagcagagaaacgcttgagaagagcgtggacgtgactctaagagccgtagaaagcaaatgcgaaacagtaggggaggctttcgtcagcgtcatgacctctcccgatgttgaaaagcgccatgtagatctggtagcaccaccaggcttgttggaaatgattgtctctggagattacaacaaggctatagcgcgtgttcgtgagctggactatgggcgtatctgcgacttgtgtcgtagtgatctggatttaatcaacgtgatcgttgaggctggccgcatctgtgatggggttttggctcaatacgcaagtaagatcagtcgtttggccaatgaaatgcctatgctgattcaggaagcaaaatcccacgccgttcatgctgcaaacgacctgctaaccccttatcgatacgaagccgcaagtgacaagatgaccggctgggccacctggtaa

SEQ ID NO: 192978 - DNA, 468 bp, Klebsiella oxytoca
atggctaccaaaactgatttatcaaaaattccttcgatctctggactcaacggctactcgctgcgttgcccggaagtgaagcttaacggacatgcctcgtactgcagctacaccgtctgtcagcacacgatccttgccttcaaagagaagcgactgccggcgtcatcgttcacctcctgtgcgaccgctatttcggccggaaaatgccaggcgctgaaaatgatggtggaggaaatccggcaagatgagtcgctgtatttcgtcgatatgccagcgctcattgaagaggtggaggaaagaaaccgaacagcaagaaccctgcagccgaagagaggcagtgcatctatctacagtggaattaaagggaagcgccaatcttccaccgttgctgaaactggccgactgccggatgccagtgagatttattcagaacttatcaaagaaaccttaaaggagaagaccgactaa

SEQ ID NO: 192979 - DNA, 1323 bp, Klebsiella oxytoca
atggagaagctgatcgcgcttaaacataagctggacgccattaaagcaatgggaacgaacgccaagaaagaggcgctggccagtatggatgacttcgaacaaagaatggtgtcactcatgctgaacccatttgttcgtttcggggtgaagaaatacaaagtggccgatccacttagcaagtccgtacccagtgatcagaaagcgatagagctgctggagaaactggctgcccgggagcttacgggaaacgcagccatcactgcggtcgagtctttggtcgcttcgatgtgtgcagacggtcaggacgtatttcgccggttcctgctgaaagacccgaaagccggcgtcggcataagtctctgcaataaggtgttccccaacccgatcccgaagtttgaggtgcagctggccaccgcctataaagaaaaaggcgacaagtacccattcaaggcaaatcccaaagccagatggccaatgataggcagcctcaaactggatggtcttcgggttatttgtgaagtgatcgtggacgaggaagaggttaactttctgtcgcgtaccggaaacccgattacatctctcgatcacctgaaacctgccatgttggagctgggcaagctctccggctacaaacacatctttttcgatggtgaaggtactgcaggttcttttaacaattcagtctcagcgctacgcaagaagaacgtgaaggcggttggcgcaacctatcatatcttcgatttcttcctaccagagtggcgcgtacaggctaaaacagttgaataccagaagaacggtatgaagctgaaacagcgtctttcactgttggtggcctggttcagaaatacacgcggccaggattacgcggctgacattcatatgcaccccttctacatcatctacagccatgaagactttgtagagcggtttatgaagcgtctggacgataacgaagaaggagagatgggcaaagacccggattctgtatacgagttcaagcgcacccgcagctggtggaaattaaaagatgaaaacgaagctgatggggagattatcggcttcctagctggagatccggatgccggctttgctcataccctcggcaaaatcgttattcgcctcgaagatggaaccgaggtccgcgcttctggcattaagcatcgctacctcgatgagatctggcataaccaggacaagtacatgggccgtattgtgaaggtgaattttcacgagtacacgccagatggcagtctgcgtcatccgcggcttaagtggcccaaatgccttcgcgataccgaagaacgtgtcggagataaagaatga

SEQ ID NO: 192980 - DNA, 180 bp, Klebsiella oxytoca
atgatgctcggttggatgattgtttttttgggtgtcggcttcgtcatcggaactctggtgatgctcagctgcatcaacgattacgtgaagtgcgggctgatggaaagacgtggccgcatataccgcatcatcgacattactaacacgctaaaggagactggcgatgatcgtcctgagtaa

SEQ ID NO: 192981 - DNA, 216 bp, Klebsiella oxytoca
atgatcgtcctgagtaagcgagagaaggaaaccctgcgtgaaatcagccaatggtcatgtttctacgctaactggaaacccaagacacgagccaagctcgaacagatgaacctggtggccaatgttgaaccggaaggaaaggcagagaactaccagttaacgaataaagggcgagagctgcttgagcaactgattgaagcaggagaatactcatga

SEQ ID NO: 192982 - DNA, 153 bp, Klebsiella oxytoca
atgattccatacatcgtattgtctttttctggaggcgtcgcccttggcttcatcatctgtcatgacttgatcaagcaggaactgaagaccaaaacactacgtatcggtaagagggtatatcgcgtcgttcacgaaacaggggtatcaaaatga

SEQ ID NO: 192983 - DNA, 300 bp, Klebsiella oxytoca
atgagcaatctaacctccttagactggtgggtaggcttgtactttgtggcctctggtgtcgcagtagctttcacggttggccagtctcttgtaaagctactgctcttaagattcgccagtcgcaagcgtatcgatgacacgctttggtgccttggttctctgcttgaacagcggtacggcgagctgaaggaagatgaagtcctttgcataaaggcaaaaagattcacggccacaatccaacggacgcaggatgagaagccagtgctgatcaaaaaaggagcaaacgaacacatgaaataa

SEQ ID NO: 192984 - DNA, 1128 bp, Klebsiella oxytoca; identical to SEQ ID NO: 175323

SEQ ID NO: 192985 - DNA, 567 bp, Klebsiella oxytoca
atgtcaattacaagcgttgtattaacaaaagaacaaaaatctattattgcagaagcattagaggttatgcccgaagatctagaagaaataaagattaaagcaagcagctataaaaagacgtcctttagggacgatttctcaatgatctttaaaggtaatatggcgacactcgccagaatggatttgacgcccacagcattcagaattgtgctttatctcttctcagccattgattatggaaatattattcctgatttttcacagtctcgtactgccagagaacttggactgaataaatctaatgtttcacgcgcattcaaagaattatttgagagaaaaatacttattcgtaacaccatagataatcaggtatacctgaattcaaatttgtgcgttaaagggattcctcgtcgcttcaatgaagatctgatggataaattcaaaaaatccagactggagacagaagactttgccaattcatttaacttttatcgagcagggagtaagacaaaatcggttaaaaattccagaaaaagatatcctacagacagcattccatttgattaa

SEQ ID NO: 192986 - DNA, 387 bp, Klebsiella oxytoca
atgaacagattcattgttacagcattttttatttccgttttccttatttctggctgttctacctcaggcaaccagactcttaaaaatgaaacatcgaaaagtctgcaatcaaaaatcattaaaaacaaaacgacgaaatctgaaattattacccgcttaggtgaaccggacacccgtactacactggacagtggcaatgaagaatggacttattcaatgaataacaataagtttgatgccaccacattcattcccgttgttgggctgctgacagggggctcacagacgcaggccaaaacactggaaatcgaatttaaaggagaaacggtcagcaagtggtcgttctctgaaaataaaagcaggatgaatacgggtctgattcaataa

SEQ ID NO: 192987 - DNA, 1272 bp, Klebsiella oxytoca
atgaaaggcatgcagaaaataaaaaggggtaaacaattcacaggtgtggttatttatagcctaaagtcaggttctcaccacaaaatcacgccttatgtcatcggtggcaacatgacgggcagcactgctgctgagcttataagtgaatttgaaggcacccgactgctgcgtcccgatgtcgccaaacctgtctggcataattcgcttcgcctgccaaagggtgagaatctgtcaaacagacagtgggcagcattcgctgacgattatatggcccgaatgggcttcactgacacccatcttcgctgctatatcatgcacgatgatccggatgggcagcatattcatatcattgcaggtcgtattaacatggtcggtggaaaactgtacctggggaaaaatgaaaatcttatcagcacacggattatcagtgagctggagaaaatccacaaactcacttacaccacacctgcaaacagtggtcatcgtcaggagaaaagaaagccttcccgcaacgagctgatgatggatgaaagaacgacaactccctgccctaggtccactctgcagagcctgattgataatgcgttaaccggccgccctgatttgctgacttttatcgctatgctggaaaaggtagacgtcagctgcaaacccaatatcgcctcaacgggaaaaatgaacggcttttcatttcagtaccaaggtattgcctttaaagcctctcaattgggtaaaaaatatggctggtcttccctgcaaacattgattgatttcgtaccggaacatctgactttactgaaacaagcacaaaagccaacagtacctgcatctgtgccagtgccagtgccagtgccagtgccagtgccagtgccagtgccagtgccagtgccagtgccagtgccagtgccagtgccatcatgcgagtctgaagagcaggctgcaaaccgggaaacgattctggagaaaatccatcagcttgaagaaaaaattcgtctggaaagacaacagcagacagtgggtatcatccagctcaggagcaaactgcacaatatagctcgtcagataccccgccagcgtcgtctgtattcgtggcttgtattgctcgtccatattgtagcacttctcaggcgcagaggcatgtctctgttacatgccactgcacatcctttccaccaaatcctgcacctacatattctaacaccctgtcattccatgacaaaatatacccttaaagaacaatcacttaaaaacaaccactatcctgcaccgtaa

SEQ ID NO: 192988 - DNA, 408 bp, Klebsiella oxytoca
atgaacagtgacatgagtaatgatgatgatataaccagagtatcaaaacgcggtaaatttcatactgacaaacttcctgagaatgaaatacgacatcactgcatcagtgtcagattaaatgcagaagagttaattattctcgacagtaaaagaggccagtataaaaagggagaatggctcaggatggcttccctgaataaactcccgccggttctgcctgaaatcaatcatgaagcatggattaaacttggcagcctttcacagcatttaaaccacctgctgagtcatctcgacagcaaaagccctgacagcgaactgacccgtacagagctctttgccctgcgcagacaaatcaaaactcttcgcgatcacctaattcctacaacctttctggagccagaccgatga

SEQ ID NO: 192989 - DNA, 462 bp, Klebsiella oxytoca
atggacaatggaaactggcattaccgatccaacgtcagtgctcttatccggcatatagaaaaaattgatagcacacctgttttaatcaggcatatcaactatcactctttagatcttattaaattacttaaacataatggtgttaatttcctgcttgcagagcattgtacagttgaactatatgttaaagacatgaaatcaatctttaacatactcaaacaacatatcgaaatcaagcacactcagttttataattgtcgcaatgagcatattggtatctacaccggcatagagagagtgaaatggtttattcgaaatggtatcagaatggacgacgatatactcagacagcgttccgactccgataagattttttcttatatcgcaggaagagagaaaaaagacctgttaaaagaaatgaagccagaactcccccgtgcacctgtgcgaaaaagactctaa

SEQ ID NO: 192990 - DNA, 213 bp, Klebsiella oxytoca
atggtcagtatgattaatattgcagcctttttttatccagtagtcaaaactatctgtggaatagaggttgtagagtacagtctggccttcattatcaatactgtggatatcagcacctgcattaataagaatttctgcacattttatattatagcgttgttggtggaggcaagattggccttgattattcttgtgctgaatatgaatgcctga

SEQ ID NO: 192991 - DNA, 213 bp, Klebsiella oxytoca
atgaccaatcaaattataaatatattaatccaaagtgagacaagagaggaagttatgaattgcataaattcaggaataaatattaatgcttttgattattgtggtagaaatgcccttttctattgcgaccaattagacgccgccaaagcactgattgaagcaggcatagaactaaaccatatagacaattatggcaataacgcactgttttga

SEQ ID NO: 192992 - DNA, 441 bp, Klebsiella oxytoca
atgaaaaaacaaaattacccaacgctgacaaactatcttgccaaaactaaaaagaacgcagatctctatagattatataacccacaattttctgtattcggaaaaccagtaagtgaggagcaggatttttacttttgttacttctccagacatatgattactgagaggaatatcttaaccctcttttcaattcatacatttctctcttacaacgtaagcaaaaaagagacaattaaatcatttgtacattttctcaaaaaatcaaaccatgacaccttcaacaatgcattccagtttcgcgggtgcaatatcatttatcaaaataagaagagagaatttatggagatctcatggttttctttctcacggatctatgacgatatcgtaaaaatcaaagagtatagtgctaacaatgaaatttataacaaattcgtagcttaa

SEQ ID NO: 192993 - DNA, 1470 bp, Klebsiella oxytoca
gtgacattttctaaatcatttcctgataatttcctttggggtggcgcaacggcggctaatcagctggaaggcgcgcatgacgtagatggcaaaggcttatcagcctccgatgtctttatctttgatattaatgcgccgaaagagacatggcttgatcagtgggccggaatgacgcatgcgcaggtggcggaggctcagaacccggccagcaaaaagtactaccctaagcgcaaaggaaatgacttctatcaccattatgaagaggacatcgcgctcttcgccgaaatgggattcaaatgcttccgtatgtcgattgcctggactcgtatcttcccgcgtggtgacgaatctgagccaaatgaagccggtctggctttctatgaccgggtgttcgatacgttgcgtaagcataacattgagccagtggtttcgctttcacactacgaaatgcctcttactctggttactgaatatgatggctggccaaaccggaagatcgttgatttttatctgcagtttgccactactgtctttaagcgttaccgccacaaagtaaagtactggatgacgtttaatgaaatcaactgcgttaaacatcatccgtacgtcagcgtcggtgtcattgaagagaatcacccggctcttgaacaggctaagtatcagggcgcgcatcatcagttcgtagcaagtgctctcgccactaaagcctgccacgagattattccggagtctaaagtgggttgcatgatcagctatcagatcctgtatccacatacctgccaccctgacgatattcaggcctgcgaggatgctcaacgtgtttccctgttcttcagcgacgtacaggctcgcggtgcttatcccgcctggacagaaagaatgtttgctacaaaaggtgtggtgttacaaaaagaacgcggcgacgatgaaatattgcgtcaataccctgtcgatttcgtatccttcagttattacatgtcaagcaccgtgagtgcacatcccgaaaaattggaaggtgtcaaagggaatctgatcaccggagggattcgcaatccttatctgcctgaaagtgattggggatggcagattgacccgaaaggtctgagactggcgctgaaccagttatatgaccgctatcagaagcccctttttgtagcagaaaacggtctgggtgccgtagatgttcctggcagtgatggtatcattcaggatgactaccgtatcgattacctgcgactgcatattgaacaaatgcaggaagccattgctgacggtgtcgatctatttggttatacgtggtgggggccaattgatatggtcagcgcaagtacatcacaaatgtccaagcgctatggttttattcatgttgatcaggatgatatgggcaacggaacgcttaaacgtactcgtaagaaaagttttagctggtataagaaagtgatcgcctcgaacggtaatgatttgagttaa

SEQ ID NO: 192994 - DNA, 1902 bp, Klebsiella oxytoca
atggattatcaatatactgcgcgcaggattattgcgcttcttggtggcgatgcaaacatcaattcagtttttcattgcatcacgcgcctgcgattcagtctgaaagataatgataagcccgatcgtgaagcactgatgcaactcgatggcgttatgggcgttaatctgtcaggcgatcagttccaggtcattattggcaataaagtgacgcaggtactcagggcaattcaggatgagatcccacgccttgtggcggagggtaagatggatgaaaaggttgaggaaaagcgccgcaatcccgtgtctctggccttcgaagtcatttcaggcattttttctcctatcatacctgcgattgccggggccggtattcttaagggcgttttatctcttttcgtcaccttcggctgggtgacagccactaatcagacctatcagatcatgacggccatcagcgatggtgtgttctactttatgccaatggtgctggccttcagtgccggtctgaaatttggtgcgaacccgtatctctccgttgcactggcagccattctttttcacccgacactgactacgttactgaaatcaggcgatcctgttgcctttgccgggttaacagtctcacctgtttcttatgctaactccgtcatcccgattttgttttcaatctggctactgagttacgttgaacgcttctttaatcgtgtcattcccgcttccattcgaatgatgttttctccactgctgagcctgatgattgtcgctccggtgatgcttatattcattggtccggccggaattttcatcggcaacttgctttctggcggaatcatctggcttgtggagaatatgggcccgcttgccgggattgtggtgggcgggacgttatccctgatgatcattaccggtatgcattatgtgctcgtccccatcatgatcaataacatcacacgcctgggcttcgatcccatcaaaccactcatgtttgtcgcaaactttgggcaggcaggtgccgctttcggggtgttcctgcgctcccgcaacaagaagacccggaccctggccttgtcgacctctttcagtgccctgatgggtgtatctgaacccgcaatgtacggtatcaacatccgtttcaaaaaaccgttctccgcagcactgattggcggtgcggcaggcggatgcctggcaatgaccatgggcgtgaaggcatatgcgtacgccttaagtggcttgtcaggtttacctgcacttgccggcgagggattcggatgggcgctggccagcatcgcattagccttcgccgttgccgctctggtgacggtagtgctgggctttgaggaagcggctgaagttcagccagctacagctactgaaactgatatcgtagcagcccagtctaaagatttgcaggcgggtattagccgtgtaaacgttgcggcaggcgaacaactgtatgcaccggcagaagggaaacttattccgctttcggaagtgagcgaccctgtttttgccgatgaggtctttggtaaagggattgctatcgtcccggtgaacggtcaactggtctcgccgctaaatggccgggtaggttctgtatttgcgaccaaccatgccattacgctggagagcgaatcgggggcagaaattctgattcatatcggcatcgataccgtcaagctgaacgggaaaggttttacgcgtcatgttgacgacgagcagcttgtgagagtcggtgagccacttatcagcttcgacctcgatgcattacaggcggataacatcgatccgagcatcatcattatcgtgaccaatacagaacgttataacgacatcagcctgatttcacaaactaaagtggaaccacgtgaagcttttttgaaactgacagcagcagctgtgtaa

SEQ ID NO: 192995 - DNA, 834 bp, Klebsiella oxytoca
atgattatcaaacaggtacttaataacaacgtcgtcagcgtttccgatgccagcggggctgagtttatcctgacgggccgcggtctgggctttaatgccagagtaggcgatattgttgatgaaaaaaacattgaaaagaccttcagtctggcagacggatcagtctcggatcgctttaaggttttacttaatgaagtgccggtagaaatcattcagttgacggatgacatcgttacgctggcgagaaactctcttggataccccctgagcgataccttgtatgtctcgctggcagaccatttgaactttgcacttaagcgttattctgagggccttgaaattcagaacccactggagtgggaggtccgccatttataccgtaaagaatacctggtcggacggcaggctctggcgttgatcgcttcgcgtaccgggcaactgttaccggatgcggaagcctgcagcatcacccttcatatcgtgaatgcctccatgaatgtcccggatgggcaggttatggagatgacccggctaatcttccagatccagaatatcgtaaagtactggtttgcgataagtattgacgaacaaagcctgaattatcagcgatttgttacgcatttaaaattctttgctcagagggtaatggcaggcgagattcttaataatgatgatgcagaattgttcgcgaaaatgcccaaacgttatgaaaagacgctggaatgtgttcaggcgattagcgaatttgtggcgaaaaattacaaccactccatgagcagttcagaaaagttatacctgacggtgcatatcggcaacgtattaagccgtcagtaa

SEQ ID NO: 192996 - DNA, 942 bp, Klebsiella oxytoca
atgttatccactttaaacgttgtcctgcctgtatttgctctcatcctggttggctggctagctcgtaagctaaaaatattgggcgaaacagccctgactgaacttaaccgctttgttgtatacctggcgttacctgctttgcttttcgatatcattgccaatgcaatgtgggcagatctggctcagcctgcgtttatcagtgccttttcgatagggatgatggtggtgtttttcctgaccttatttgttcagctgagacgcacccgccaccttgcagatgcagctatcgatgcactgaacgcgggttatgctaatacagggtttatcggtttcccccttgtcatcgtttttttaggccatgaagccctggcacccacactcatcgccacaattttgaccgtctctgtgctgtttggtattggtattatcattatcgaaaccgggctgcagggtgaagtgaaacggcgcatcatttttacgcgtgtagctaagtccttgattaaaaatccgttactcgtatctccggctatcgccatatgtattccgctgtcgggattaaccgtgccggactcaataaatgtgttcctgaagttacttggtggagccgcgtcgccctgcgcacttattgcactggggttattccttgccggtcagtcagataaaaggacgaacaatgataattttacggtaacgcttttagtagtacttaagttattgattcaaccagctttaacatggtggtttgctacaaaagtgtttcacctgtcacctcttctggttcacaccgcagtgttactggcggcattaccaacaggtacaggaccatttatgctggctgagttctatcgtcgcgaggcatcaacaacatcgaaatgtgtactggtttcaacagtgctttctatgtttacactttctgcttatctgtacaccatcggtttataa

SEQ ID NO: 192997 - DNA, 885 bp, Klebsiella oxytoca
atgtccgattttagacagttgaactatttcttgaccctggccgaatgtctcaactacggcaaggcagcaaaagtacttaacatttcgcagccacctttaagtcgacagattgcttcactggagcatcaactcggtatgaagttatttaatcgccatcactatggtgtctcactgactgaagccggcaggatgttctacgccgatacccgtgcggtcgtcagtgcgtatgaacttgcctgccgaaatgtcagaaaaatggctaccggcgaaaaggggaagctgtcagtaggttttatgatgcacgctgcgtactctacacttcctgaactcactaaacaggtgattacgcaattccccgatttacatctgatattgcaggaagtcacaccggctaccctggtcgatgccgtgctggaagcaaaatatgatgtaggtctggttttcaatccggggccggttcgtttactacaatgtctaactttgcatcgtgaaaacttgtgcctggcagtcaatgaaactcactctcttgcagatgaaaaaaaggttggcgttgatcgattaaaaaacgagccaattatcgctactccacactcggttgcaccagtattaagagatatgatcgatctttacttgcgccagggggggatcgagccttattaccgactagaaacgcagttacaacagactattatcagcctggttgctgaaggaattggtgtggcaattgttccagaatcagtaaaaaaattacattatgctggcgtaaaatatcttgaacttgagcagagcccagctatagaacaggttatcatctggcatcaagataacagtaatccagccctgaattcttttacacgtctggccagagcgatagctgaaagatag

SEQ ID NO: 192998 - DNA, 900 bp, Klebsiella oxytoca
atgttggcacaacaaaacatactggcactactgcatacgtttgaatgcgcggcacttcatatgagtttcaccagggcggctaatatcctgaaccttacccaaggagcagtcagccagcgcatacgtcatcttgaagagatgctaggatttcggttgtttattcgcttgacgcgtaaattgcagttgacgaacgaaggtgctcggttgctgggcattttgtcgtcttcactaaagcgcattgatgacgaaatcgaagacatccgcgtgcaagggctacgcggaacgttatcggtaggattgccaccaacattttcctttatctggctaatgccccgtctggaagaattcgccctgcgttggccaaatctcaatatcaattttcgagttcgtgctggactgattaatttcaaccatgaacgtgtggatatagcaatctactacggcatgcaaaaatatcctgatctttattgcgagcggcttgctgatgagtggctggtacccgtttgcacccctgctctaagtcaacgaatcagacaggataagaattggtttgaaaaagtacggtttattcatgcttctgaatccgttgattcgcaggatacattctccgaatggcgagaatggtgttccgcaacccaaactgagctacctcttgaaaaaaacttcatgagcttcaataactgccatatgtcgattgaagcagctcttacagggagcggtatagcgatgggtagaaaacaactggttaaaaagtacattgctgagggaaaacttaccattccgtttaacaaagaggtacaggctaagcgcggatatgatttgataatgcctcgcgagaaccgttcaaggccgggcgttaaggcattaactgaatgggtacgaagtataattaatgaataa

SEQ ID NO: 192999 - DNA, 1320 bp, Klebsiella oxytoca
atggaaggtttgaagattgttgttataggtgctggctcaagttatacccctgagctgatggagggaattattaaacgccagcatgagttcccggtgcgtgaaatttggctggtcgatattgaagacgggcgcgaaaaaatggccatcatcgctgggctgacacgcagaatgttgaaaaaaaatggtctcgatattaccgtccatgaaacgctggatcgccagaaggcgctggctggggctaactttgtttgttcgcaattcagggcagggtgcctggaagcgcgcataagcgatgagcgtatttcattaaaatataacatgattggtcaggaaactaacggactgggcggttttgctaatgcctgccgaactattccaattgcactggaaatcgcagccgagatggaaaaactttgtccagacgcatggttgctgaactttacaaatccttcaggcatggttacggaagcgatacttaagcattcctcggtgaaaacagtgggattgtgtaatgtgccggtaattatgcagaaaggtattgccggtatgttcggcgtagaagatatcaacgaatttatcatgcaggttgcggggctgaaccactttatttttgcccgacatgtctggttcaaagggaaagatattattccggacataatcagcaatattgagcagggaaatgatccacttattccgaaaaacatccctccgtttaaatggccagcaggaatgctcaaaaacatgaggatgcttccatgtccttatcatcgttactactatatgagtgatgatatgtatcgccaggaactcagtgaagcaaaaggagaaggtacgcgtggtgaagtggtaaagcaactcgaaaaagagctttttgatatttatcgcaatccagaacttgctgaaaaacccaaagctcttgagggccgcggcgggcaattttactccgatgccgcctgcgaattaatgagcgcaatttacaatgataaacgtatcattatgcacgttaacacgcgtaacaatggcgctatatcaggtcttcctgataattgcgcggtagaagtgagttcgatgatcaccagctcaggtccaataccgctcaatgtcgaacctttcccggacgacattatgtgccaaattcagctgatgaaaacttttgagcagttgactattgaagcagccgtgaccggagaccgacatacagcatggcgcggattagtaataaatccgttaatcaagagcggagcatcccttgaaaaagcattggatgaagttattgtacataaccgcgcgttgatgcctgcattccacacatctaattaa

SEQ ID NO: 193000 - DNA, 216 bp, Klebsiella oxytoca
atgctctgtttcgatttcttgtattacctgcacatcaaacaccgccgctacccacctgatcacgtgacgcacgttccgtcagcggcatctataatgatgaattcagaacgggttgggctcgtctcagaaatacgtacttccctgatcattatgtatgggttgttttcgcatgcttttaacagcgatacagtctatgttaaggaacagatcctttaa

SEQ ID NO: 193001 - DNA, 210 bp, Klebsiella oxytoca
atgaaagccattaataaagtttttatcatcactgctctttcactggtttcgttaaccagctttgcacagtctgttaccgcaacaggcagtacgctcgatgaagcccatgcaaagatcgcagcaaaagcaaaagaagccggagcagaatattccatcactgaagcatacagcggcaacagagtgcatatgactgcaaaattaacacactga

SEQ ID NO: 193002 - DNA, 333 bp, Klebsiella oxytoca; identical to SEQ ID NO: 167518

SEQ ID NO: 193003 - DNA, 906 bp, Klebsiella oxytoca; identical to SEQ ID NO: 167519

SEQ ID NO: 193004 - DNA, 699 bp, Klebsiella oxytoca
atgaaatcattaatgccccgaatctcagtagatgtctggtctgattatgtctgtccgtggtgctggatcgctaaaaaaagatttgaaaagggtctggaagagtttgaatattctaaacaggtcgatgtacgtcatcacagctatcgtattgcgagtgaccacccccctattccattcagatcggctttgtatcagaagtttggtggtgagcatggcgcagagttaatgatgaaccagattgaaagcacggggaaatcagagggattgatctataactttgacactatgctttttggcgatacacgtgaagcgcatacccttgcagctgctgcgcgtgaggcagggctcggaacacagatgtcagaaaagttgttctctgcggccacaactgaagggcgttctatttttgacagggatgtattgattgctctggcaattgaagccggtatgacagagtctcaggctgaaagtgcccttgaaaaccctgtattcagggactctgttgatgacgatgaggcaaaggctcgtgcgataggtgcaagtggcgtacctctatttgtgatcaataataaatatgcaatcagtggcgcacagccagccgcgaattttttgagcgccttgagacaagtctgggaagaaaccaaagatgagtccatgttcatggaggggatggtctgcggaatagatggttgtaaataa

SEQ ID NO: 193005 - DNA, 1110 bp, Klebsiella oxytoca
atgaagacgttatttaccccttacaacctcggtggcgttgagctgaaaaatcgcgtggttatggcacctatgacacgtactcgcacgttgaatgacatcgctgatgacgtagttgccttgtattacgcgcagcgtgcttcagccggattgctgatcactgaagggctgcctgtttccgaagaaggtcgcgggtatctctatacgcctggtctctataatgatgcgcatgttgagggatggcgtaaggtaacggatgctgtccatgcgaaaggtggccgaattttcgcgcagctgtggcatgtggggcgtatgtctcatacctcactacaacctggtcatattgcccccgtctcttcaggcaccattcctgcgactaatacaacagtatttgcctgggacgaaagtggtaaacccggcccggttgccccaagcattccgcgtgcactcgaaacgcatgaagtgaagcgcgttacccgcgattttgtgaagtcagcacaactggcggtggaagccgggtttgatggcgttgaaatcatggcggctaacggtttcatctttgaccagttcctgagcagtgagctgaatacccgtaccgatgagtatggtggttcggtagaaaatcgtcagcgcttcctgctggagaccattgatgccgtttccgatgcaattggcggcaacaaagtcgcagtacgactctctccgttcggtcgcatctatgatcttgccccctatgccggggaagaagaaacctggtcagaaatggcaaaggctcttagccagcgctccctggcctacgtgcacctctatttccagccgacctacgtcaccgcaccgcaagccgctgagaaatttaaagctgatttccgtgaatcatttggtgggacgatcattgcagcaggtggattcagccgtgatattgcagaagaacgcctgaataacaacgaagttgacctggttgcgtttggtgtgccatttatcgccaacccggatctggttgaaagaatgaaaaataactggccgctggcggaaagcgatcgcacgacctattacggtgtaagcggctctccggaaaagggctataccgattacccggtatacagcgaaaaataa

SEQ ID NO: 193006 - DNA, 342 bp, Klebsiella oxytoca
atgacaaatgtacgcacctacaatgaagacaactttcatgatatcgcatggggtgagggactggccgtaatcaggttctttgcaccgtggtgtccaccctgtcgtgagagtgaagcggaatatttgcaattcgcaagaaaactggggccacatgtcaaagttggtgtggtgaatgttgataaatcacctgttttattaactcagtatgaggtttttgggcttccttctgttctggtgttcagaaatggtcagctgatgaaacgtatgacaggacagaaaactgcagagcaatacgcagctattttttcatcaattaccgaacacgaagcagacgtacactga

SEQ ID NO: 193007 - DNA, 795 bp, Klebsiella oxytoca
atgcaagatacacagtttacgaatcataaagtcctgatcattggtggcaccagtgggatcggtcttgaaacagcaaagatggttttagagcagggcggaaagtctgtcattgtaggtagccgtgctgaaaaagcagaagccgcacgccaggaactcgtggctatttcgggtgaggagaatgcattcgctctgactgctgacttatccagtatggaaagtgttgcaaagctcatcgctgccctgaaaaaggatcacagcgatattgatatgctggtcaattccgccggcatttactatccaaaaagtttccttgagcattcagtcgtggattacaacaacttcctcgatctgaaccgggcattcttctttattacacagcatgttgctgcatcacttgtagatcagaagaaagctggatctattgtgaatgttactgcagtcgctgcacgccaggcagtagaaaccatcaccgcttcagcttactccatggccaaaacgggtctggatactctgacacgccacgccgcagcagagctggctgagcacggtatccgtgtcaatgcagtaagccctggtattgttgaaacccgaattttcgaacgttttattccgggtgaacaactggatggtgcgctggccagtttcaataacttccatccgctggggcggaacggtacaccgcgtgatgttgcggaaactattgttttcctgctttcagataaagcttcgtgggtaaccggggcaatctgggatgtggatggcggtgtaatggcagcccggaaactcggcaattaa

SEQ ID NO: 193008 - DNA, 336 bp, Klebsiella oxytoca
atgtctgcagaatggggcaatcgtctctccgcgctgatcaaaagcgtcggtaatctggccaaaacaaataaacctgttgctaacgcgtttcatggccttgaaaccgctacgcgcgaaaacagtgttctggatgccaaaactcacgaactgattgccattgctgtggcagtgactactcgttgtgacggttgtatttccgcacacgtggccgccgccaaaaaagctggtgcaacgaaagatgaaatcggtgctgcagtagggactgcgattgcgcttaacgccggtgctgcttttgtctattcagcacgcgtaatggacgcctacgacgagctgtaa

SEQ ID NO: 193009 - DNA, 552 bp, Klebsiella oxytoca
atgacagagaaagtgaacggtattgatgttgctgcattccagcaattcgccgaaaaagtgacccaaaacacggaaaaagcaaaagccaggtttaacgtagagacccgctgggcaggacagacccgttcagtttctaccatgaagtcatatgaactctttggtgacagcatcgagcgtaccttccatgtcgccgctgatgaaccatcagaaatacttggaagcgatactgcacctaacccacaggaactgctcatggctgcgctgaatgcctgtctgaccgtagcgtatgtggcggtagctgccagcaagggcattaaggttaattccctgaaaatcgaaacgtcaggcgaactggatctgcgtggtttccttgggctggatgaaaatgttaaccccggatacgattcagtccagtacaccgcgtttattgatgctgacgctcagccggcagaaattgaagaaattcatcaggccgtactgaagacgtcaccaaactatgcgaatttctcgcgttccattaagatggagccgaaactcgtcattgcacaataa

SEQ ID NO: 193010 - DNA, 561 bp, Klebsiella oxytoca
atgtctatggatacccgacaatcattaatcaattctgcagagtttatgctgcgttccagaggttatgctgccttcagttacgctgatctggaaaaaatggtcggtatcagaaaggccagtattcaccattatttcccaaaaaaagaagatcttggtgtggaaattgttgaaacctacatcaatcgttcggctgtggatttcgaaaaaatcgatcatgactttccaaatgcttttggtcggctctgtgctttcgctgcattgtttcgggctgcaatggctgatggtatgttaccgctatgcggggcactggcagctgaaatggcagccctgccggagaccatgcaaagccttacgcggaaatactttaccctgcaactgcagtggcttgagaaaaccatagaggaaggtactgcggctggtgaattcgcagcaacaggcacaccccggcagaaagcgtttcagattttaagtctccttgaaggcagcagctttgttcgctgggcaatgaatgacggcacagatctggagccggctgctattggtgctattgttttccattaa

SEQ ID NO: 193011 - DNA, 1239 bp, Klebsiella oxytoca
atgaaccaacaatctttaatcgataataacctgaaactttttaaaataaaatcacccgcagaactcataaaattattaaagacaggaattgacataaacacgctaaattcatcgaaccagaatgcgctgttcggttgcagataccctgagcttatggaagcaatgattaatgccggaataaatattaatcatactgacatgtttagcaggaatgcgcttttctatgcaacttgtccagaaaccctgtgtgtgttgactgaaaacgggattgatatcaaccatacggacacgctgggcaggaatgcgcttttctacaccagtgacgctgaatcagttcagttactggtaaaaaatggtatcagcataaaccaccctgaacttgaagataaaaatgcgcttttctttgcgaccaacgaaagctcagccagagaactcatcgacagtggtattgatattaaccacactgacagctatggaagaaatgcgcttttctacgtctgtgaggctgacgttaagcgtctgctgattaagaaaggtatcaatgttaaccaaagggatatatatggtcataattccattaacattaccggcatagatgctaacttactggatgtttatttcgctgcgggccttgatcctgacatacaggatcgaaatgggaacagcttaatttttcacccttataaaaaaccaattacagacattttaatcaacaatggctgcgatataaaccgtgttaataataatggagaaaccgtctttgaatacatacagaccatgttgttcagcaactatcaacttgaccagtgtctcagcgtgcttacaccttacattaaccttattaaagcaagaccattaattttcaatcgccttacttatggctgcattgagctaattaaatttttgcaaagccagaatatcgattacaaaattaatgaccgttgcgttgttagatacgccaacaaagatattaaaaattttattactgaagcgcagaaagttattgatctcagcaatatcaccctttgctcatggtatgacaccccgctggtcagcgtaaaaaacaaggagatcattaaatggttcataagaaacaatgtaaatgtaaatattaatgacattgaagatcaggacattctcactgaaatccttgcctaccttgcactaagggaacataaaacgcttaaaaccgtaattaaaccggatataaaacgcaccgcctgtaaaagaaggctgtga

SEQ ID NO: 193012 - DNA, 318 bp, Klebsiella oxytoca
gtgattgtctcgccggacggcggaggattcagcgccgcgaccgatagcgcgctggcgaatctcggtctggcgcggcgagttgtcctttccgtgccacatttcctgtttatgctggagacgctgcgcaatagcgggctggtggcggtgctgccggagcggctggtgagcggagctgcgggtctgacggtggtcgaaccgccgctggcggtcgccggatttgatatgttgatgctgtggcacgagcgctggcatcgcgacccggcgcatcggtggctgcgccagcaaatcgtaacgtcattagaggagaagccatgttaa

SEQ ID NO: 193013 - DNA, 2100 bp, Klebsiella oxytoca
atgtctctctggttaactgcgcgggagtgcgtgaatttacctggtcttccaggccgcgaacataatatccgtatcaaactgaacaagtttgctgagggtaactccagccttgtccgtaaacgtaccggcagcaaggcgtttgaattccatattgactgcctcccagaagtggcgcagcaggcgctccgtgctcgtcagattaaagaactgatgaacggttcaccgaaagagctgtctgtcgcccctgttaccgcatcgactgcaccacgcgtcaaaggtgccgaggaaagcaaaatcgcggtgtaccgcaaatgcccggcgctgatggagcagaagctgaacggtctgacagcagcacagcgccagactgcagacgcgcgtatggcgctggtcgttgaagtgctgcgcctcggtgaactgccgggatacagccgggcaaaagctattcgcgagatcgtgcgtcaggctcagagtggtgaactacctgagcggctggccgctgccgtctcaatggcgaacgccaaaaaaggagcgtcacggtcgctgagtgaaatatcactcaagcgctgggtggcggattttaataagacccgctccgcagctgaacgtcttcttttgcttgctcctggcaaacgtcaggttgttaagcctgaagaaatcagatggttgcccgagttcctgagcttttatcgtcggcctgacgggcgcggtattcaggaggcatacgatgattttgctgctgaatgggctgagcggtatcaggatgatgccctgatggccgcagcaatcccttcttacgatcaagtgtgttatgccatgaataaattaccggtagtggttaaacagaaaggccgtatcaccggaagcgagttccgccagtatgagggatttgtccgccgtgactgggagtcacttccggttaattacgtctggattggtgacggccacggcatgaagatgaaagtcgcccatcctgaccacggcaacccgttctcgccggaggtgacgtttatcctggatggtagctgccgttatattgtcggctggagcctggcgttgtctgaaagtgtgatagctgttgccgacgccctgcgccacggcatcagaaaccatggcaagccgttcctgtactattccgataacggtggtggtgagaccaacaataccttcgatgcggagctgaccggtattcttccccgcctcggaattgatcaccggctgggtatccctgaaaacccgcaggggcgaggtattatcgaacgtctcaaccgttctctggccatgcgtatttcgcgccagttcgccacctactacggcactggcgcagaccgcagcaccgttcgccgcatgacaaaagcgctgcagtcggcgacgaatgcagcgaataaagggaaagagctgacggcaaaacagcagcagaccctgcgcgatctgccctcatgggaatcactcattgagcacattgaggccggtgtggagtggtacaacaaccgcccgcatgagtctctgccgcttcgtggtgatggtgagcacttcactccggcgcagttccgccgctataagctggagaaagaagcgacagaaattgagtggctgtcggagctggagctgcgcgagatgttcatgccgcagatagagcgtaccgtcaaccgctgtgaggtccgtttattcaataacctgtattactccgctgagctgaataacgagcacagtaataaagtgctggttaattacgatattcacgacgcaacaaaggttgtaattcgtcgtctggatggttcctttatttgtgaagctgtctgggatggtaataaacagcaggcattcccggtcactgctgaatatcaccaacgtcagcaacgcatcaaagggatgcgccagcgtggagaggagaaagtccgtctggccgaggctgagaacgtccacaccctgccagctccggcagagcaggaatggctgcatggcaacgtctatcgccccacgcgcggtacgacaccggtggcgctggcggaagtggaggatgcggaatacagcgaggatgaatatctgaataactctctggatattctggaatcaaataagcgtaaaaacgcgatttaa

SEQ ID NO: 193014 - DNA, 270 bp, Klebsiella oxytoca
atgatgcagctgttgaagcaagatctgaccaaagtattcatcgagccaggacaggactggtccagtaaggcgatcattgcagcactggacaaaaaaggtgttgatttacaggatattgagaaagaactcggtctgaaaagcggtgctgttcgaaatgctttctatcgtaaatgcgtccgttatcaggaagtgatcgcacaaaaaatcggagttacgccagaggttatctggcctagccgttatgtttctgacaaagaactgaacgactga

SEQ ID NO: 193015 - DNA, 564 bp, Klebsiella oxytoca
atgacttacacagaaaaaaccgaggctagtgcaaaaaaacgagatcggatttttatatcgagtggaataaactgttttggagcacgattaaaaaaggcgatgaatggcatgagcaacagtgagctaggcaggaagagtggcatgtcggaaacaaccataagaaagtacctccgtggtgacatttatcccggtattgatagtgctgcgcttgttgccgaggcatgcggtgtatcacttgtatggttgatttgcggtgtcgaacaaaaggacgagcctggtaatgttgagacgaaggcccatactgattcaattttagaggccattataaaacggttgccagaagagcaaggtcagcagttagcggatgccatcataattcacggagtgtcaggcatcatttctgcaatcaatagcgccaatgacgttagtggcttcttgaagttgccggaaagcgaaagagaacgggttcttaggctttataaccaggtaaaagggggcgatgttgaaactggtgagatcataactacaccatccccatcaaaaaatgacaaaaaggccggatag

SEQ ID NO: 193016 - DNA, 297 bp, Klebsiella oxytoca
atgaaccacccatcccatcttctggaacatatcgtgagcgtaatgctaaaaaagagagtcaatccgttctgctcagcctccactggtatccagagtgttctggctttctcccgcagcgctgccgttaacatcgccattcagcgtatttctctcgcttctctctacgcctgcaaagcatctctttccgccaatgcgtctgccgacagcggcagtgttctatccttactaaatgagaaagtcctgatggatagcccttacggaaacggcgaaagtactctgcgttttttgcgcgtgtga

SEQ ID NO: 193017 - DNA, 564 bp, Klebsiella oxytoca
atgctcaatgataataaaattcgcacggcattaataaattttttactggctaaaaaaccagcgccagaaaggattattgaagaattgcatatcgagaatggaagagcaatagctgatgttgtagcagcatatagttatttgcattgttacgagattaaaggggaaactgattcaattggaagaatccttactcaagctaattattataatacttctttcaacaaaattacacttgtaactacaaaaaatcatttaacatgggcattaaagcgttccccatccttctggggaatcatattagtagaattaaaagataataacattactttcaaatatataaggggggctaaagataatattttcttcagaaaagaaaatgctttcatgatgttatggaaggacgaaatgttgaaggtagcaaatgaagcctctgtaccagttaaaagatcacacacgaggatcgaaatagccgaaatgcttagtagttcacttaagaaaagtgatgctttgcaaactatacaaagcatcatttctaatcgactaaaattaagggatgcagtgtaa

SEQ ID NO: 193018 - DNA, 1089 bp, Klebsiella oxytoca
atgagtaaatatattccatttttaaaagcaaaaagcaacgaaactcaagccctcgaagagctttacaaaaaagatgctacaatcttcacacaaatcactccattcttcgatataccaagagaatcaaataatcaaacaatggaaaatgtcttgaataaagctcattctttcaaaaagagattggataacaaagctttatttaaaaatatggaattttacatagataactatgacttagatgatgaaatattaattgatggagtggagcaatacgaatatatactatctctttttcgtgattatttatatattcctgtgatcggtatcaaccgattagagaaacacaataaaagtgtttacgatagcctatcaattaacggagggaaattagccataaggttagttgctgaagatattgagagctataaaataacaaaaatgcatcttttgaagatgatggtaatcattagaaatctgaaagtagaagaattgcacttaattatagatctacgatacattcagccaactgacataaaacgactaactgacatggctgaatactttattctaaatgtaaacaaagactttcactttgataagtgtattatatcagcctcttcgataccggccaatatttcctcattacttgaaacctatcaaagaaaatcgttcacgagagcggagtggaaaatttgggacacattagttaacgaaaagaaaattggtaatattatatacggggattatggaatcgttagccctgattattctgatatagatttagatccgaagctatttagaaaagtttccgcaccaaaagtattttatacgtataagaataatatgttttgtgttagaggtggatctttccagaatgatgagagaggaaatggtcaatattatgatattgccacaataatccatgaccaaaaattcttcagggcaactacattctcgtatggggaacaatatgtttatgatagaagtagttattcgcctaaaaaaccagataaagcaggtaatccctcatcttggattaaagccatgttgacttcacacattaagtttgttttacactgcatcccttaa

SEQ ID NO: 193019 - DNA, 849 bp, Klebsiella oxytoca
atgccgcatgagaaagatttctttgtatcaaatcagtttagtgagtctgatttggaaattttactaaatttccaaaagataaaaaacagcaaaaaaataaaagatattatttcccgtaaaccagaaatggaaaacgaaaatcaattcctacttgatgtagcaaaaaatttaacatttaacaaaaataaattatttagaaaaagagatgatgctaattctgaactaataaacttatggttgtcattaatagaaaaaaagtcattaaatacctatttaaaaggaaaaacaaaggtcttcacagatctggattttgaaaacctcggcataattgcaagtttgagcagggatgtccaatctcttcattatatttcaagaatccttaaagaagaatatggtattattttaataattgaaaaatcattcaaaggtatgaagttagatggctgtgccttttgtttgccaaataaaacaccagtcataggtctaagtttaagatattcgagatatgattacttttggtttacattgatgcatgaattatcccacattgctctgcactatgataaattagatacgccaatcctagatgatttagacattgacacagaaacagacgtagagattgaagctaacagagccgcagctgatagtctgatacccagagaagcaaatagagctgtctttcggacatttaatgaacctgatagtctaatatctgtctgcgaaagatttaatatacacccaataatcgctgctggtgcggtaagaaataaacacaaaaattatgttatcttctcaagtttagtcaattcaattgatgtcagaagggagcttggtttcaatgagtaa

SEQ ID NO: 193020 - DNA, 648 bp, Klebsiella oxytoca
atggaaatggagcttatggtcgttgaaaattgttcaggaaaatcagttaattaccaaattcacgtagggattgactatgctaaagtggttgacttgcagagcaaatggggtgcctatcgtgctgatttattgtcagctctaattactgctaaccccggtatggccactgataatgagttagcaaggaaaattctggcagataacagcctttctgattggcattgggactggtgccgcaagctattgcaatgtaacggtgatgattatcagtggttttttctgcaaataaacgacgcagttcaaggtgtttgtgttctttaccatccaaaagaaagtcgatttgataataataaaattttctacgtagattatattgcaacagcatactggaatcgtcctcgtcctaactttacccctgaatatagtggagtaggcaaagagcttatccaacatacaattaattatgcctgttcaaactgggggtatagacctggtttttgcctacatgcactcccaagtgcagagggtttctataaccatcttggcatgactgattttggcatcgaccatgaaaaagaaaatctccgattttatgaggcatcacaggttgtcgcatcaactctcggaggaatttcaaatgccgcatga

SEQ ID NO: 193021 - DNA, 603 bp, Klebsiella oxytoca
atgaatttatggcttagttctgtaatttttatgacgatacttactttgttatccggttgttctgatgttagtgataaagaaataagttttaacacggcaaaatcaatgactggatatggttacctcatatttgatttcagagaatctagagaaattaaaaatataaaagataaccgcttgtattataccatccattataccaatgagaataaatctatttttgttacagttaatgatgtgaattttaaagaaagactttttaaagcatatatcccatactacaaaggttataaagtaagaagtatatcatctgctcttctttctttggattgtggagattgccaacgaacaccaatagattattggttaagtgtttacttagtttctgcggttggtggttcacgatgtcaggagacagttcataaaaactttgaaatgtttgattataccgatggatgtaacggtgactggcgtgatgaaaatggaatagatgggagcaagagatttcttggtagtgtgtttatcactccacatttcaatactggttctgtggatacttttacaaaccgatatccaccaggacatagttcggcagggtcttga

SEQ ID NO: 193022 - DNA, 543 bp, Klebsiella oxytoca
gtgctggttggcttttgcctcggcgcgtggatgctgtcgatagcgctggagtggctgggcgaggcgtttttatggcggaacgcctgcgtcagccacagtgaactgatattgcaggctacatggcagtggtggcggaactttgctggcgcactggtgtggttagtagaaggtctggcgattgtcagcgatacattgcagcaagggattgcagcgctgatttcttcgcttaatgggcagagcgggttattctggacggaaaccgtcattacggtaatccgctgcgcgttactgtctgcgtgcaatgtcatcctcacctttctgctgcgcctggcgattttgtggcaggcgctaccactgttttcgctcaccattaccatcggccttatcgacgggctgataagacgcgacttacggcggttcagcgcaggccatgattccgggtttgtttatcaccataccaggcgtatgctcagttccagcctggcggcaacgggggtgatgtggctgactgtatcgatttttttgagccagagtatatgttga

SEQ ID NO: 193023 - DNA, 267 bp, Klebsiella oxytoca
atgataccccggacacaccgccagcttgtgagcgttgaagtgatgtggcctgcgcaaacgctgcctcttcccctgcaacaggcggttgaagcgctgacgcagggagaaacgcccgatcagattatcgcccggatgaatttacagggctttcaggcatggcgcgaacctgcattgcaggaagatgaacacgacatttttcagatacgactggatgaggctcacgaggcacggttcctctgccgctatatcaccctgccgctgcactga

SEQ ID NO: 193024 - DNA, 282 bp, Klebsiella oxytoca
gtgagcagcgtacaggtgccgctactggaacccgcctcactggtccagctccccaaaggtcaggcgttcgctctgctggaaggcggccagctccggaaattgtgcatcccgttaccggataccgcgcacgattcgctgatgcaggaaaacatcgcgcaaatctcccgttatatggaaaagccctcccgtatggaggaaccgtgcggaggcagttgtaacgccgaaaaacgcccctattttatggctgaacgacagcgaaaccacggagaaactgaccgatga

SEQ ID NO: 193025 - DNA, 510 bp, Klebsiella oxytoca
atggtgcaccgcccgcccggcaagcacgtagcgttcgtggaacaacaaacgctgatgcagcgcgggcggtgcaccatcgcgcgtgtgaaaaaacagatccacttcgtcgcgatccgcctgctgaaccagccgcgaaggctgcagctcaaacagcgccagacggctggccggagaggcgatgcgcagcgcgttgagcgccggcagcaaaatcgccgacgccatatagtcggtcgccgccacccgccaggtctgcgccgccgtggccgggtcaaaaggctgaaccggcgccaccgccagctccagcgccagcagcgcatcgcgcagcggcccgcgcagttcatcggcgcgggcggtgggctgcattccgcgtggccccggcagcagcagcgggtcggcgaaaatttcccgcagtctcgccagttggacgctaaccgacggctgcgacaggttgaggcgctgcgccgcccgggtgacgttattttcgctaagcaggacgtgaagcgtgcgtag

SEQ ID NO: 193026 - DNA, 1797 bp, Klebsiella oxytoca
atgttcatactcttcgccgagcgaaaagttggggaacagcacgggccggccgcgcaaggcgtgctggcagccgtgcagaccctgcgtgagatgaacgccgacaacctgcgcaaggtgccggccgatgcacccacggccttcatcaagccgcgctggaagccgctggtgatcaccccggaaggcctcgaccggaaattctacgaaatctgcgccctgtccgagctgaagaacgccctgcgctccggcgacatctgggtcaagggctcgcggcagttccgcgacttcgacgactacctgctgccggccgagaagttcgccgcactcaagcgcgagcaggccctgcccctggcgatcaacccgaacagcgaccagtacctggaagagcgtttgcagctgctggacgagcagttggccaccgtcacccgcctggccaaggacaacgagctgcccgatgccatcctcaccaagtcagggctgaaaatcaccccgctggatgcggcggtgccggatcgggcgcaggcgctgatcgaccaaaccagccagttactgccgcgcatcaagatcaccgaactgctgatggacgtggacgactggacgggcttcagccgccacttcacccacttgaaggacggggccgaggccaaagacaggacgttgctgctgtccgcaatcctcggtgatgcgatcaacctcgggctgaccaagatggccgagtcgagccccggcctgacctacgccaagctgtcctggctgcaagcctggcacatccgcgacgaaacctattcggcggccttggccgagctggtcaaccaccagtatcgccacgcctttgccgcccactggggcgacggcacgacctcatcctccgatggccagcgcttccgcgcgggtggccggggcgagagcaccgggcacgtcaacccgaagtacggtagcgagccgggacggctgttctatacccatatctccgaccagtacgcgccgttcagcacccgcgtggtgaatgtcggcgtccgcgattccacctatgtgctcgacggcctgctgtaccacgagtccgacctgcggatcgaggagcactacaccgacacggccggcttcaccgatcacgcctttgccctgatgcacctgctaggcttccgcttcgcgccgcgcatccgcgacctcggcgaaaccaagctgtacgtgccgcagggcgtgcaagcctacccgacgttgcgcccgctgatcggcggcaccctgaacatcaagcacgtgcgtgcccactgggacgacatcctgcgcctggccagctcgatcaagcagggcaccgtcaccgcctcgctgatgctgcgcaagctcggcagctacccgcgccagaacggactggccgtggccctgcgcgagctgggccggatcgagcgcacgctgttcatcctggactggctgcaaagtgttgaactgcgccgccgcgtgcatgccggcctgaacaaaggtgaggcgcgcaactcgctggccagggcggtgttcttcaaccgccttggggaaatcagggatcggagcttcgagcagcagcgctaccgggccagcggcctcaacctggtgacggcggctatcgtgctgtggaacacggtgtacctggaacgcgccacccaggggttggtcgaggccggcaagccggtggacggcgagctgctgcaattcctgtcgccgctgggctgggagcacatcaacctaaccggcgattacgtctggcggcagagccgcagactggaagacgggaagtttcggcccttacggatgcccggaaaaccttag

SEQ ID NO: 193027 - DNA, 600 bp, Klebsiella oxytoca; identical to SEQ ID NO: 91854

SEQ ID NO: 193028 - DNA, 789 bp, Klebsiella oxytoca; identical to SEQ ID NO: 6025

SEQ ID NO: 193029 - DNA, 1206 bp, Klebsiella oxytoca; identical to SEQ ID NO: 6029

SEQ ID NO: 193030 - DNA, 306 bp, Klebsiella oxytoca; identical to SEQ ID NO: 6030

SEQ ID NO: 193031 - DNA, 585 bp, Klebsiella oxytoca; identical to SEQ ID NO: 6032

SEQ ID NO: 193032 - DNA, 1239 bp, Klebsiella oxytoca; identical to SEQ ID NO: 6033

SEQ ID NO: 193033 - DNA, 906 bp, Klebsiella oxytoca; identical to SEQ ID NO: 6034

SEQ ID NO: 193034 - DNA, 483 bp, Klebsiella oxytoca
ttgcaacagtgcctgactgcctgcctcaagtcattgcgtgacggcgatgtgctggtggtctggaagctcgatcgcctcggacgatcgcttgcccatctggtcaacacggtgaaggagctgtcagaccgcaagatcggcctgcgggttctgactggaaagggcgctcagatcgacaccacgactgcgtccggtcgcatggtgttcggaatcttcgccaccttggccgagttcgagcgggatctgatccgagagcgcaccatggcgggtctcgcctccgcgagagcgcgcggtcgcaagggcggacgaaaattcgcgctcaccaaagctcaggtgcgtctcgcgcaagccgccatggcccagcgcgatacttcagtttccgatctctgcaaggaactcggcatcgagcgcgtcactctctaccgatatgtcggtcccaaaggcgagctcagagaccatggaaagcatgttctcggacttacgtag

SEQ ID NO: 193035 - DNA, 276 bp, Klebsiella oxytoca; identical to SEQ ID NO: 19894

SEQ ID NO: 193036 - DNA, 858 bp, Klebsiella oxytoca; identical to SEQ ID NO: 146957

SEQ ID NO: 193037 - DNA, 417 bp, Klebsiella oxytoca; identical to SEQ ID NO: 15292

SEQ ID NO: 193038 - DNA, 861 bp, Klebsiella oxytoca; identical to SEQ ID NO: 6162

SEQ ID NO: 193039 - DNA, 543 bp, Klebsiella oxytoca; identical to SEQ ID NO: 84324

SEQ ID NO: 193040 - DNA, 228 bp, Klebsiella oxytoca; identical to SEQ ID NO: 6111

SEQ ID NO: 193041 - DNA, 1137 bp, Klebsiella oxytoca; identical to SEQ ID NO: 6112

SEQ ID NO: 193042 - DNA, 1137 bp, Klebsiella oxytoca; identical to SEQ ID NO: 153786

SEQ ID NO: 193043 - DNA, 174 bp, Klebsiella oxytoca
ttgagctttcttgccctattcgtcagcctgcccaccaaggcatcgaccggccgcatgcgcgtctggcgttctgtcaaagcgcagggctgcgcaacgctgcgcgacggggtctatctgctgcccgactcggcggacagtgcggcgacgctgggcgaagttgtgggaggaaaataa

SEQ ID NO: 193044 - DNA, 150 bp, Klebsiella oxytoca
atgccatctgaatatgatgaacaactggattcgactgatacgcagcttcccggcgaatatgacctttttgatttaatggcgcaggttactgaagagaacctgcatgcccctgtggattttgggtcgcctgtcggccgggaagcgttatag

SEQ ID NO: 193045 - DNA, 441 bp, Klebsiella oxytoca; identical to SEQ ID NO: 22297

SEQ ID NO: 193046 - DNA, 141 bp, Klebsiella oxytoca
atgcgccgcccgtgtctggagatcacctgtccgccgactgaactggtgaacagggctaatcatctgattgaacgcggccccaccgggacccgttccgtgtggatggccacccttgaaggctgtcatgttatctggaggtaa

SEQ ID NO: 193047 - DNA, 525 bp, Klebsiella oxytoca
atggcttctaaaccaaaacgtatcaaaaatgctgctgctaattatgtttctcagtcccgcgacgcggtgattattgatattcgcaagattggcgatttgcagcgtgaggctacacgcctggaatcggcgatgaatgatgaaattgccgcaattactgagaaatatgcggggctgattaaaccgctgaaactggatgttgagaccctttcaaaaggcgtacagggctggtgtgaagcgaaccgcgatgagctgaccaatgccggtaaagtgaagagtgctaatctggttacgggtgatattcagtggcgtattcgccctccgtctgtatccgttcgcggccctgatgcggtcatggaaacgctggtacgcctgggtttatcccggtttattcgcaccagacaggaaatcaataaggaagcgattctcaatgaacctctggcggttgcaggcgttgccggtatcacagtgaaatcagggattgaggatttttctattattccgtttgagcagactgctgatatctga

SEQ ID NO: 193048 - DNA, 489 bp, Klebsiella oxytoca
atgaatccgaaaacgaaaggtatttttgaggccgcattcgcaaaatggggatttgaatctcaggtgcttgttctttccgaagaagccagcgaattatcagctgcctgctcacgttttcttaatcacaaaaccgacatcagcaaagtggctgaagaagcggcggatgtcgaaatcatgattgagcaactgcgtcataacggggtgggaaccatgatagacaatgaaaaaaatcgcaagatggcgcgtctggctcaggttgttggtgttgagtcacaacctgtcagcccctttggtccgtccgttctggggctgctggaggaagcgacagagcagatggggctggcagaaaccctctatcgcgacaccaaaaccagcaatcgttatgccgccgcccgcgcccgtatggctgtcagtctgcttatgcaggccgcacagaagatgatgcgcgagcaacagtatgccgaacgtatgcagactgaggtgaaataa

SEQ ID NO: 193049 - DNA, 309 bp, Klebsiella oxytoca
atggcgatagatgagcgtacttacttgcgggcctgcctgatcgccggtggccgcaaagaacaggaagttgatgcagaactggaggaaatcttcggacctggacagttcgattcagagaagttcaaggagctgtccctcagtatgcgtcgggatatcctggaaagaacatccctgccagaagtggttgaggggttgaaccggattatttccggcgcaagtcatagcggggagtatctggccgcagcgatagcagccagcgcattggtcaatttgattacgtctaaatatccaaatcgaggtgacgactga

SEQ ID NO: 193050 - DNA, 402 bp, Klebsiella oxytoca
atgcaaatagacctggatttaatgaaaaaaatgttgaatgttttcatcgaatcaccaaaagcctttatcaccctcgcggaaatagagtctactgttagtgacggagaggcctttatattccatattggcttgatgcttgataataaattaattaccggagtcgattttgaatcaactccagcatccgtcggtttagtggttgctaacacacgaatactcactcgcccgctgcgggtgcgtttatcgcaacaaggccacgatttagctgtaatgctcaaccagcagcccatactcgaaaaactaaaagaacaggcaaaacaggctccaatggacgttttagtcgcaatcgggaaagcatggggacgcaagctcatcagtcgtcacctcgatttggatatttag

SEQ ID NO: 193051 - DNA, 390 bp, Klebsiella oxytoca
atgagtgacgatctctttggtgatgttcgtgatgacagtttgctggatcatctcagcgatgaaactgagaatgtccgtttcccgtcgattcttgctgaactcaattcaatactgagccgggagctggcaagactgggtggcgattcttcgcattctctggagctggtaatcgcgataacccggcatattggtgggatgcaaatctatgttcctcggggacagcggcttgaattcctggtacgcgatatgcaaatctggcgtgattactgtaacagggccagtgttgatacccttgttacgcgctaccacgtcacctacaaaacggtgtataaagccatcaggcgtatgcgcaggctggagcataagaaataccagccgccactattttaa

SEQ ID NO: 193052 - DNA, 489 bp, Klebsiella oxytoca
atggcaaagttattggttttattttcatcattacttctttcttttggtgtggccgcaaagtcgttgccagctattgatgatatgaaaaatggtcttgataaagtgggtttggtaaaaaaatcaacatgggaagatgaaaaaaaagatggtgtatttttaaaatctatgtctgctgtgccgggagtggtagctgtcctcaatgaagatcagatggctatttttatgaaaattcctgcttatgacgacaaagaaaatcgcgtgaagagtattaatcaattattcgagcgttgtagaaagatggctgatgtagtgatgaagggagtaagcgataatcatattgagttaattgatgacattattagttcttcagctaaagtgccgggatttactgtcagtaatcttgttaaaggttttgaatttaacagtatgataaatatgcttggcgatggagtagtggttcagtgtggcgtcaggaacacaaagatttaa

SEQ ID NO: 193053 - DNA, 579 bp, Klebsiella oxytoca
atgacaacatcatttacccccgcattttctcacgcgctcgctttcgttcttgcccgcgaaggtggttatgttaatgaccccaccgacaaaggaggcgaaaccaaatacggcatatccgacaagcgcgatggacttgccgatggcaaaaccgacgtcgatggcgacggcaaacccgatacccgaattaaggacctgaccgaagaacaggccgggcaaatttatttccgcgattactggtatccctcctactgctcacagtggcctgatggcatctccctttttgtgttcgattctgcagtacagcacggcgttaaaaaagcgatccagctcctgcaggatgccgtcggtgtcaccgctgacggcattatcggccccaaaacccgcgccgctgtagcctcaactgatgccgaatggcttctcctgcgctgcttcctgcgccgttcccgctattacgccgacatcatcaaagccaattcctcgcagggtaaatacctcaatggctggtttaaccgtctcgatgaacttgcgaacgcctgtcaggaggtcatcggcggtcaggtatcggttccccggagctga

SEQ ID NO: 193054 - DNA, 525 bp, Klebsiella oxytoca
atgcgtaaaatatttctgggatttttatttattacaacgttctcgtcttatgcgggtcaagcctccatcaaagagcaggccaaaatacttctagaagactacgctcgggtagactcagtagactggtataataagggggatacggcatttgctgaaaatgatggatttattggtgtgtatcgacacttaaaagcgtcagttagtgatagttctgtcaatttgaaaatggattttgtatcaggacctaaacgtcctgacagcgacgaatttactaaaatcacctctgatgtttgcattacagtattttccctgttaattaacccaccgacaaaagatacaaaggaagttacttgggatgatgagccagtagaaacggtaaacaatactcctgacaagtttgcatttatgcgtgcttctgggctagataaagttcacggacagaaaatggaaagcactatcgatggctggcacgtcagcattaaaagaaccgtattgttaacaacctgctcggcgaaaaaaatataa

SEQ ID NO: 193055 - DNA, 1368 bp, Klebsiella oxytoca
atgggaggcagtctcgtcgcttttgcgcctgcagaattaggcgaccaaatcacgacggtaaatcaggctttaagcgcccaggctcccaccatctggcaatatgccaggcatgtcattgaccgccagactgtctttccttccacgtgggattggggacctgcatttcaggccgcacacgataacgataatgtcgggcctctgctaattaacggcgaaacttacaccgtccgaacgcctgtcatttatgaatataccgatgatgattacctcaaatattccagacttccgagatgtcctaccggatttgcgattattgattattccggacttgggaatggtggcactggattcaatgatgctcttgaagtagacgacgctgcgcaacctgcatatgtcccggcgtttaccgtaaagggagcaagcggttatgtcgtcctgcaggaattcgagggaattgtatttcggggaaataaaaatactgcggcgataaagctaattggctgcgacggtgttcgtcctaatcgctgcatatttacttcaaaccgttatggcgtggtgtttaataacgggaatgcatccgggacatatgccgaactgaacgccccggtattctgtcgctggcgtggcggatgcctgacagctatcgcatacgaaaagggaagcggggatacttcttttcatggttgtgggcttggaggagactgtcacgttacggtaaccgctggtcggtcgcctgtgctgattggtgcaggatgccagccatataacgcccccatgaacgccaatttctggatgagcggcgtatctgcacccctcatccagaataagggaatgacagcgcatttccacggcaatctgaaactggaaggctcctttaaaaccgtgctgtctgccggagcaaaggtctatttttatgggcccatttcgacatggtcgggcgtcgataaagggacgctgacacaggctgtgcgcggggggcctacaggccccagagcgggaaatctggatttttctggtattactgaaccgcaaattacccggtgggatatcgcagcagcaggaagcgttgttgcttttgcagggtataacgaagaagccgttgttacagtcagggggagcactctgtcatgcactttcaaaataacaacagggagacacaaaacagacagagctgtttccgctcctgtcgtcgtcatttatggaaatttcaaccccataaccagattcaatataaaaggaaccgtaagcgggttgtcacttacgacagctgaagataataccattatcgttgcaaggcgcgtcggtggtctgccggatgagtcaagcggcaacaattttagtacggcagattactggagaacagaatga

SEQ ID NO: 193056 - DNA, 336 bp, Klebsiella oxytoca
atgatagcattatcaggaatgtcgcccatcaatttagatacagagataactaccgacggagtaactacagaatatgtgctgcccttaacttattttactgatggcgccattctcgatattgcggtttcgctggtaacctccacgactcagcattgcagttaccgcctgacgttacataaacataacaatattggcgcaaaggtgacaataacgagcgagtacacctataactcactatctgtcgctttttcggcaacttatacgcagcttaccttgacgctaagttctgcagttgttggtgttctgaaaatttctcctattcatctcaatgtctaa

SEQ ID NO: 193057 - DNA, 282 bp, Klebsiella oxytoca
atgagcttttctgtcaaaaaaagtgtggctggcgttaaaaattacccctcactcatgggggccgcgattcgtggcgagcgggaaacattgaccgttgtgtatgccgtgacgtcaatcatatctctggccgggagcacaggtttagccgagtacagtgtaacccccgaaggtgctgaactgtcgggggccggacgcatagaattcgaatactccggcaaaggtaatcctctggatgaggcggaggaagcgctgaaggaaagtctgtcggtactggctggatga

SEQ ID NO: 193058 - DNA, 141 bp, Klebsiella oxytoca; identical to SEQ ID NO: 131154

SEQ ID NO: 193059 - DNA, 924 bp, Klebsiella oxytoca
gtggcaaagcaaaagttcaaaataaccaactggcccacctacaataaagccctcatcaaccgtggctccataactttctggctggatgatgaagctattcaggcctggtatgagtcagcaacaccttcttcacgaggcagacctcagcgctattctgaccttgccatcacgactgtgctggtcattaaacgcgtattcaggctgaccctgcgcgctgcgcagggctttattgattccattttttctctgatgaacgttccgctacgctgcccggattacagctgtgtcagcaggcgggcaaagtcggttaacgtcagtttcaaaacgttcacccggggtgaaatcgcgcatctggtgattgattccaccgggctgaaggtctttggtgaaggcgagtggaaagtcaaaaagcatggccaggaacgccgtcgtatatggcgaaagttgcatctggcagttgacagcaacacacatgaaatcatctgtgcagacctgtcgctgaacaatgtgacggactcagaagccttcccgggtcttatccggcagactcacagaaaaatcagggcagcatcggcagacggcgcttacgacacccggctctgtcacgatgaactgcggcgtaagaaaatcagcgcgcttatccctccccgaaaaggtgcgggttactggcccggtgaatatgcagaccgtaaccgtgcagtggctaatcagcgaatgaccgggagtaatgcgcggtggaaatggacaacagattacaaccgtcgctcgatagcggaaacggcgatgtaccgggtaaaacagctgttcgggggttcactgacgctgcgtgactacgatggtcaggttgcggaggctatggccctggtacgagcgctgaacaaaatgacgaaagcaggtatgcctgaaagcgtgcgtattgcctga

SEQ ID NO: 193060 - DNA, 729 bp, Klebsiella oxytoca
atgcacgtcggcctgagatcgcgagctgccgtcgtcggtggtcatggtctgccccagcacggccttactggtctgggcgtcgcaccattccgccatttccttgaacaatgcgccgccaccgttgcggctggcagtttcctgcatctccagctgcatactttgcgggatggcgcagcctgcatcagaggcgatggaggcgatagcatcgatgagggttttaatctgctcatcggtggcattattcccgtacttaccgacgacgatgggtatgccgaacttctcggcaaacgcccaccagtcacggacggtaaaggacttaagcatatacatcaccgctaccagacgggccaggccgttacgcagcggcaggccggacttcagccggggataatgcatcacatactttcccggcgtcagagggatgccatccacaggctgttcatcggtcagcagacggaactcacgcagtgtgtcgctatcgggtttcaggaaccgcgggtcaacccactcataatcgcgcggcatccagccatcgcgggtactccacaggatttcgcagacacccacgcctttacccagaccatcaagcagatcgaacagcagctcagggatttgcggctgctcgacaagatcgcgaacagcatcagccagcagtacgtcatgctcatcgtcgctcgccgcttccactgccggggggataccggccacagtcagcttgcgggtacgtag

SEQ ID NO: 193061 - DNA, 267 bp, Klebsiella oxytoca
atggagtttgtgaaaacgctggcattcgaaacgtcgatgtcactcgctgaagaagaaggcccggttgagccgaaggccctcggccagctggcgctggttgctcagcgtctggaggctgcagcgatggccagccataaacgtgagaaagagatccgccagaccttcgccgaagaagccgccgcgcaggcggagaaaatcaccaaaagtgccgggctgtctgcggaaaccgccgctgatatccgtcgccagattctggggatcgtatga

SEQ ID NO: 193062 - DNA, 1587 bp, Klebsiella oxytoca
atggccggaccattgttagcgcaggaacagttacgtaatcagtccgccagcgccattctggcgggcgagttcgatgcggatcaggtgctgctgccgtatcagcgccggtggattgcggacacgtcccagctcaagattgctgagaaatcccgtcgtaccggcctgacgtgggcggaagccgccgaggcggcgctcagcgggtcaatgtcaccggaagccggaggaaccgacaccttctatgtcggcaccaccaaagacatggcgcgtgagtttatcgacgcctgcgccatgtgggcgaaggcatataatctcgcggcctccgcgattggcgaggaagcgctggaggatgacgacaaggacatactggtttacgtcatcaactttgccagcggcttcaaaatcaaggcgctgtcgtcaaacccctctaacctgcgcggtatgcagggtaacgtcatcattgacgaagcggcattccagaaagacctcgctgccgtgctgaaagcggcgctggcgctcaccatgtgggggtctaaggtccgtttgatctccacccataacggcattgaaaacctgttcaataccatcatcactgacagccgcgcgggcaaaaaacggtactccgttcatcgtattgatatcgagctggccatcagcgaagggctgtatcgtcgtatctgtcaggtgacgaaaaagccgtggtcaccggaagccgaggcggagtggctggcgaacctgctgagcgataccgccaccgaagaagacgcccgagaggaatactactgtgagcctaagaacggcggcggcacctatctggcccgctccatccgtgaacgtgctgcgcggggctccggtcccgttctgcgcttcaccggtacggctgagttcaatgccatgccggaaattatccgggcgctggatatgcaggaatggctggatcaggaggtgctgcccgtgctgaacacgctgccgcaaaaccttcgccactgcctcggcgaggactttgcgcggtcgggccacctgaccgtttttgcgccgatgatcatcaacgatgacaccacccgcaccgtgcctttcctggtcgagctggccaatgtgccctacaagcagcaggagcaggcgctgttctttatctgcgatcggttgccccgccgcgacggtatcaagctcgatggccgggggaacggtaactatctggccgaacaggcggcggagaagtacggcgctgaggtggaggtggtgatgccctccgtcgcccactaccgcgagaacatgccgcgcttcaaggccgcgttcgaagacgatgaactggtactgccgaagcatgaggacgttatcagcgaccttgggcagattgtcgttcagcgcggagtgccgggtattgatgaccgggagaacaccggcagcgatggccacaagcgtcacggcgacagcgcgtatgcgatcttcctcgcctttctcgccagtaaagaggactgccagcgctacgaactgcaccggcttaatactccccaacagcagcgcaacagcgacagtcatcgtcagttgcgtatcacccgtggtcttaaaaatcagcgaggactgctctga

SEQ ID NO: 193063 - DNA, 729 bp, Klebsiella oxytoca
atgcacgtcggcctgagaccgcgaactgccgtcgtcggtggtcatggtctgtcccagcaccgccttgctggtctgggcgtcgcaccattcggccatctctttgaagagagcgccaccgccgttgcggctggccgtctcctgcatctcaagctgcatactctgggggatagcacacccggcgtcggaggctatagaactgatggcgtcaatgaggatcttaatctgctcaggggaggcattattcccgtacttaccgacgacgatgggtatgccaaacttctcggcaaacgcccaccagtcacggacggtaaaggacttgagcatatacatcaccgccaccagtcgggccagtccgttacgaagcggcaggccggacttgagacgggggaagtgaatgacatacttacccggtgtcagcgggataccatcaaccggctgttcatcggtcagcaggcggaactggcgcagggtttcgcggtcagttttgaggaaacgcgggtcaacccattcgtagtcgcggggtttccagccgtcacgggtgtcccagaggatttcgcagacacccacacccttgccgagcccgtcaagcaggtcaaacagcagctcaggtatctgcggctgctcaatcagatcgcgtacggcatcagccagcatcacatcatgttcatcgtcgctcgccgcttccactgccggaggaataccggcgacggtcagcttacgggtacgtaa

SEQ ID NO: 193064 - DNA, 1167 bp, Klebsiella oxytoca
atgtcttatcagtttatacatatagaagactacgggagaaatgccgcaaagaaaactaaaaatgatggcaagaataaaaaatataatgacgaaacaaaggggagatctgttagtcaaatcatatccgaagcaaaaagagaaaatggcttttgtcctcatgtcgaaaaaccggaagatcctattttattatatggcgtagggttagaagaagttgaaaaacttgcaattgaataccatgaaaatacaaaaatagccgataagaacggtaaggtaaaaaaattaagaacggatgcaaatatattacttgctggggttatttctttaaatcgtgaaaatattgaaatatgggatgattacaaaaatgactcaatagcttacttgaaaaataagtacggtaaaaatcttgtatctgttattgaacacactgacgaagaacacccacacatacacttttactgcattcaagatataggtaaaagatttgatttaatgcatgatggtaaaaaagcattatttgaaaacagagacaagaaaaaacacgatcaaaatatagcttacttggactcaatgagagcctttcaggaggattttttcaaagttgtaagctctaactatggcttgtcgaaagacggccccagaagggctagaatgagccgttctgactacttcaagctgggtagagaagtaaagctgattaatcaagtaaagttaaaagcaaaaaaagacggttataaatttgcaatagacgattttgaaaataaaaactggtttaataaactaacggcaagtattacatttaataaagaatcgttaaatgaagctgtttcccgtgggaataaatataaaaaatcgcttagtagtaaaactaaaaaactaaaagaactcgaagatgtagaaactaaatataatgatttgcgaaaagattttaaacttagagttaataaccaaactgaaaacctaagaaataaaaataatactcttgagtctgagaatgaaaatataaaaaacaaaaataaagaactggaagaagaaaataaacaactaaaaaccactcttgaagaaacttccccactctacgagctattaaaaaataagtttggggatcagtttgaagaatggaaaaataacttatttaaatcttttagatccaaaataaaacctaaatag

SEQ ID NO: 193065 - DNA, 972 bp, Klebsiella oxytoca
atgggaagattatataataaaaaagataatgtcaagtttgaaaatttatcagatagatcggaaaaagataaagtatgggatactcacaggaaagactgtgatttagtttctgcattatattttcagtcagcggagtttgaaagatactttgaacgaatggaagattgttccggccgtttagagtttaatcaacttttagatcgtgaaaccggtgaaataaaaataaaactaacaaacgcacatttttgccgagtaagacattgccccgtttgccagtggagaaaatcacttatgtggaaagcaaaattttataaagcacttcccggaatcgaggcagaatataaatctgcccgatggatgtttcttacactgacggttgaaaactgtgaaataatagatctaaaaaatactctttcccatatgaataaatcatttaaaaaaatgattagtaggaaacatttcataaaatataatttgggttttgttaaaacaactgaaataacaagatctaaggatggaaaagcacatccacattttcacatattgcttatgatgaatagtagttattttaaatatggttatttgaaaaccagtgattgggctgaactctggagggattgcttaggtgtatcgtatacaccgatcactgatgtaagaacggttaaggtcaagaacggcggcgatgccagtcgttcggctcttgctgatgctgtagctgaaaccttgaagtatgccgtcaaaccaagcgatatgactaaggatcgtgaatggtttcacgagctgacaaggcaagtttttaaattaaggttcgtatcaactggtggagtattgaaagatttattcaaggaagaaacttccgaagaagatttattattactaacagaagaagaagaaacagacaaagaacttggatcgttatattttaactggtataaaacaaaagcaaaatacagaagaaaaataacagaatga

SEQ ID NO: 193066 - DNA, 447 bp, Klebsiella oxytoca
atgagtgacgcggcctacctgaaccgtctgaacaccgaaccacggatgcaccagttcaccgggaccgacagtattgagcgcagccagcagacggttcatctggtcggtgtagtcgcttccgagcaggatcgcgttaatctgctgctgtgtcagtaccgcgccgtggtcttccgtccagcccacctctttttttgggtaagcgtgagggatagcgcggcggccgccagtgccctcaacgtcgcggaaaaagaaaggtatgccccggaacgaggcatcgcggaggtcttcccatttagtgaccatcagtcctgctccacattgctgacgccagactgggcgctcatggtaacgccaggcgcgttaattttgacgctactgacccgaacgcgattatcttcaacaacaacttttacttcgccctgcaactgctgtggcagaaacgggtag

SEQ ID NO: 193067 - DNA, 1812 bp, Klebsiella oxytoca
atggcaaaccgcctcaccactgaaatactcatcaatctggcaggtaacctgaccgccaaagcccgacagtatggtgccaacatgtccgagttcgcccgcactaaccagcgggcgatgaatgtcgtaaaagcaacttccgccgctgctggccgcgccattgatgctgtaggcaatcgttataccggcatgattgctgggcttggtagtagtgcgatgcttaaaagctacgccacacttgatcgccgtatatccagaatggccgtcagtgcagaggtttcacggaaacaggctcgggacatgtaccgtgaaatagaaaaatatgccaccaaagacggtatacggttcgacgaactggccgatgcatttgaccagattgtggaaaaaacaggcgattacaagcgagcaatggagcagttacctacgttatcggaggcgatagcaggtacagggactgaagggcattacttgggtgatctgtctgtttttctggggcaactgggaatattgagccgcccggacgtacaaaaagctctggatattatgaataagcagggcaaagtcggcgagtttgcctttgcagatgccgcaaccgtgggggctccggtctttgccgctctgtcagggtatggtggtaaaggtattggagcagcaaaagaggctaatgccttgctccagtacggcatgaatgccacggcagataaaagtcaggctgcaaccagcgtgctaagctttatgaccaatgtcatgaacaaacagggactcattaaaaaatacacaggtattgatgtccttgatcaaaatggcgtctttaatcctgccgaattatttgaaaagctcatcaacagggcagcgaaaaatcccaacgggatacgactgtttatgcaggaggatgcaaacaaaaaaatcggtgctcttgggtttgatgaacccgcatttaagctgatggccgcaggtttcagtgactataagaatcacggcggaaaactggtgcagatggagcattacatggacgtagacggcgacggttctattgcggcagatgccagggtcgttgctcaggacttcacctcttcaatgcagcggctgattaacgcattcgaaatattcaaagagaagaacctggctgagcctgtgcagaaggttgccgatgcctttaattcgctaaatagcgatgatgctcaggcatggcttgaggtgggcaaaaatattgccattaccacggcgggtattgtagcagctcgcaaagcgtttcagatcggtaaaggcgcatgggacttgttaggcggcggtaaatctaaaggcatcccaaaaggcgtttcagaggtgtttgggtcaggtgtgatgccggtctatgtggtcaacatgaaagacggtatgcccggtggtagcaacaatgaacttccggggcgtagctatcctccgagtaaatatgataagggcggtttaattggcgcggccatcaacaccgctgcggaaatcagtgaactggtacagttccccgaaaccgatgacgacaaaaaagctcttctgcagcgcgtcaaagaaaacaacgagcgttcaacgatgtggcaggacatcaaggactggctaacctcctcaagtcagccgccagcgggttatcaggacccatcgccgtgggcgtcgatgcagccgcaaaatcagcctggctacccgtttctgccacagcagttgcagggcgaagtaaaagttgttgttgaagataatcgcgttcgggtcagtagcgtcaaaattaacgcgcctggcgttaccatgagcgcccagtctggcgtcagcaatgtggagcaggactga

SEQ ID NO: 193068 - DNA, 1794 bp, Klebsiella oxytoca
atggcaaaccgcctcaccactgaaatactcatcaatctggcaggtaacctgacagccaaagcccgccagtacggggccaacatgtccgagttcgcccgcacaaatcagcgggcaatgtcagttgtcaaggccaccaccgctgcggctggtcgaggtctggatgtactgggaaatcgctataccaccatgattgccggttttgccggtggtgcaatgttaagaaactatcagcagttagatcgtcgccttactcgaatgggaataacagcaggcaaaactcgtgaggaaatcgctggtattttcgatattgcacaggatgtagcaataaaattcggagtagataccagtgagattcaaggagcatttgaagagataaatgctcgttcaggcgatttggatctggctctaaagaataccgaaaatataggtatggcactcgctgcgtcgggcgcagaaggtcaaacccttggcggcctcattgcagaatataagaagcttcaaatagaagataaaaagcaaacactcctggctcttgatgggatgaaccggttaggaaaggaaggtgcttttgaactcaaagatgcagctgaaaagcttccggcgtcgctatctatgtacgctgcagtaggtgggaaaggtgttaaaggggcaatggatgtgatgactgttgctgaatcggcaatggacgtcacagcaaataaggacaaagcagctacagcagtagaaaactttatccgagaccttcaaaaccccaaagttgttaagacattgcaaagaaatggcattaacgtcttcgacagcaatggagcaatgcgtccacttcctgttttgcttcaggagactgctcagcgatcttcacgaggtggaataaaaaaacagcgtgggcgtcttactgaagccgggtttaaccaggacagtatggatttgattgcaggcgcttcaggtgacgcaggctctcaaaagttgaagacttacatgaatatagtcgctgatggtcaaagcatcattgaagatgctgcttacgcttctaaggacttcatgtccgccactcagcgtctttctactgcgtgggaaaagtttactaaccgagaacttgcaggccctgttcaggagttggctgatgccctcaactccgtggataaagagaccgtcaataactggcttgaagttggcaaacaaataaccatcgctgtcggtggcctcatcgccgcccgtaaagcctttcagatagggaaaggtgcatgggacttgttcggcggtgggaaatctaaaggcattcccaaaggcgtttcggaagtgttcggatcaggcgttatgccagtctatgtggtcaatatgggtgcgggtggtatgggcggtcctgatatcggtggtcccggtggggggaagcctcctggtcgtggtggccctggccgcgcttattcggccttgggttcagcctggatggttggcccgatggctgcaactatcccatttcttgatgagaaaccaaacattaccgatgatgacaaagccagcatggtcaaatgggctcaggaccgggccaaagaaccgtctgtctggtcccgcgtcatggactggctccagccgccagcgggttatcaggacccgtcgccgtgggcatcgatgcaaccgcagaatcagcctggctatccgttcctgccccagcagctgaaaggcagtatcgaggtttctgttaaagatgatcgggttcaggtgaccagcgtcaaggtcaatgcccccggcgtcaccctgagcgcccagtctggcgtcagcaatgtggagcaggactga

SEQ ID NO: 193069 - DNA, 1482 bp, Klebsiella oxytoca
atgtcgtcactgggtaatatttctgcagatatccgcgttccgctggtgtacatcgatattgataattcccaggcgctcgacagcgccccggcgcagtcgcgcaaaattatcgttatcggtcagcagagtgcgaccggcaccgccgccgttctgacgcaaaaccgcatcaccagcgacggcaccgcagaccagctttacggcaaaggctccatgctgtccgggatgcttaaaaccctgcgtaaggccaacagttataccgaagtgtgggcgatgggcctggctgatatcgctgccggagctgccgcaaaatcggagctgatcgtcaccggaccggccaccgcagcaggtacgttggccctgctggttaacggtatctcggtacaggtcggtgtcagcgccgacgcgacagctgacaccatcgctgccgctatcgtcaccgccgttaacaaactgcccgacacgcaggttaccgctgcgctgaaagcggattcgaccgacgtcgtcaccctgaccaccaactggaaaggcgcgaccggcaatgcgatggacgtccgtctcaactactacaccggcgagcagacaccggcaggcgtggccgtggccgtgactgctttcaacggcggcaccggcaccccggatattgcggcagttgtcgcggcgctgggcgatgactggtacaccgatattgtgttcccgttcaacgatacgcagagcctgaacaccatccgggatgaactggtcgaacgctgggggccgctcaagatgattgaggcgcagctctggacggccttccggggaacccatgctgaaagcggcacctttggcgaaacccgcaatgactggctgatttcctgcatcgggaccaacatcgcaccgcaaccgcactggctgtgggcggcttcctacggcggcatcgcctcctactatctggccaacgacccggcccgtccgctgcagacgctggtgctgccgggcatcctgccgccgttcaagacagtgcgctgggatatgcaggagcgcaatctgctgctgcatgacggtatcgccacccattacgtcgacgccagcgacaacgtctgcatcgagcgtgaaatcaccatgtaccgcgttaaccagtacggcgacaccgatgaatcgtacctcgatgtgcagtcaccggcgacgctggggcgtatccgctacgtcatcaaaaaccggttcaccaaccgctacccgcgtcacaagctggccggggatgatgtgctcgacctgcttgatccgggtcagccggtgatgacgccgaagattggccgtgccgagctgctggatatcgcgctgaccgagctgatccccgcgggtctgattgaggacttcgacgactacaaagacacgctggaggtctatctcgacggtgacgacaaaaaccgcctgaacttcatctgccacccgaacctggttaatcagctgcgtgtgctggccggtctcatccagttcaaactttaa

SEQ ID NO: 193070 - DNA, 612 bp, Klebsiella oxytoca
ttggatcctgtaacgctttccactattgcctccgtcctgctgaaggcaggaccttctctggttcgcaccgtaggcggctggttcggcagcgacagtaccacagcgaaagccgctgactcggtggccagcattgtcgagacagtcaacggcgcgattaatcccgctgaccagcagcgtgttctggagcagaagctggcgcagctaccacccgagcagcttgtccaactggagggcctcaaggtacagctgcagcagttccagctggagcgggacaaggcgcagatggccgaccagcaggctgcacaccacgaacagcaggaaaccatccgtaacggcgataacgccacggacgaatatgtccgccagacccggccgctgatggcccgcttatccctctacagcagtattgcttacgtgatgatcatgtcgctgggccagcaggctggcgcggtagccggtgcctttggccatgcgttttccatgcccgaaccggactgggatatcgcgctcatgctggcgaccccggcgctgggctatctgggtttcaggacgctggacggtttcgcccggtacagcaaatccagcaaacacaaggtcatggtgggtaaatga

SEQ ID NO: 193071 - DNA, 507 bp, Klebsiella oxytoca
gtgagtggaacgaaagaaaaagcaacgggtaagcaaagcgctaaaagtcgcgctggcaaggtttcagcgcaggaagtggcacaggctgatgcatctgacctgccgggagctgaacggtcagtcacattgccagggcattacgttgcggtgggtgcgtcccccgtcagcgtaaccaccggaactgttgatttgatgctaacgcctgaaggtctggccgcgggtggcggaagtgagaaccttatcaccgtcccccctgcaaccgacgatgttgtggtgctggaggttcgcgccagacatgagcgcgggttctggcgctgtggccgcttctggccgcgtgagccggtgcatgtgtttgtcagcgacgatcccgatggcgataacgaggcgaacgcgctggagggtgatgtggtggtggagtgcttcatcagtcacgaaaccgccgagcgcctgaaagctgagcctcatctggtggtgacggtcctgcagacggtagcggagaaaggctga

SEQ ID NO: 193072 - DNA, 477 bp, Klebsiella oxytoca
atggcgggcggcacctacagcaacattgtgggtgatatcgcaaccgacaaaggtgagccgtggttcctgattgatgaaagtcaggtgcttaaacccatcctttaccagaagcgccgcgcctttaacttccaggcactggatgacctcagcagcgaacacaccttcaagaacaatgagttcctgtatggcgtggatggtcgctgcaacgtcggttttgggttctggcagaccgcctgcgggtcccgcgcaccactaactgtcgccaactatgaagcggcggtgaaggtgctgcagggcatgaagcgcgattccggttcgccgcttgggatccgtccgaccacactggtcgtgggtccgaacaaccgcgccgccgcgaagaagatcatcgacgcaatgctggtcgatggcggtaactccaacatctattacaaggatgtggaaatcgtcgacagcccgtttatcaccaccccggcgtaa

SEQ ID NO: 193073 - DNA, 1089 bp, Klebsiella oxytoca
atgactgaagagttaaccctgaacgttgacggcaaggtctggggcggctggacggatatgaccatcaaccgctcgctggagtctgtggcgggcgagttcgacctgaccgtcaccgcccaatggtcatctgccgcgccgcgctccatcaaacccggacagtcctgcacggtttccatcggcagcgaccgcgtcatgaccggatacatcgacgattttattcccagctatgactcagagaatgtctccctgcgcgtcatgggacgcgacaagaccggcgatctggtggacagctcggtggtcgataagtccggccagtggaaaggtctgaagcttgagcagcttgcggccaccatctgcaaaccctacggcatcgaggtagtcaacgagaccgacaccggcgacgcctttggcagcatcaccctggaacagggtgaaaccggctttgaactgctcgaccggctggccaaacaacgcggcgttctggtgacctcagacgcttacggtcggctggttatcacccgcgcatccacccaacgggccggtgtgtcgctgaccctcggcgacaatattctggctgcgcgtggacgcttcagctggcgcgagcgtgccagccagtacatcgtcaaaggttccgccagtgcgggcggcgtaacgtgggatgaccagccggtgaagatgatcggcggccgtcagacggtagtcagcgacccggagatcacccgctatcgtccgaagattctggtcaatgaagacagtctgacggtcggcggtgccagcgctcgcggtgagtggtacaagacacggatgctgggcgaagccaacaccactgaaatcaccgtcgcgggctggcgcgagaacggcatcagcggtccgctgtggcagactaaccggctggtcaggataaccgatgccatccagcagctcgatgtcacctggctgataaagtctgtttccttcatggagagcgatcagggacggctgacagtgctggcacttgtgccacctgagtcgctggatatgccagcgcagaaggcaaaaggaaaaggcggtaagggtaaagcaaaaagtacggtggatctgacatggtaa

SEQ ID NO: 193074 - DNA, 447 bp, Klebsiella oxytoca
atggccttcctgatgataaataacaacgtcgccttcttcgccgccacgggggcgactccctttatcctcgacagcgatggccaccatgccgccgcgacggccaccgacagcaacaacaatcgcctcggagcctgctggcggaacgctggaaaagccgtagttctggaagcgctcgacgtcgtcgttggtctcatcggccagcgactgcacctgcaggttctgccgaccgaggctgtccgtcacaatgcgcaccagcgcccggtccaccatcaggcgcaggcgtcggccgatggcggcgatagagcgggaaaaattggattctttcattaccatgttagatccaccgtattctttcctttacccttgccgccttttccttttgccttctgcgctggcatatccagcgattcaggcggaaccagtgacagcacggtcagacgcccctga

SEQ ID NO: 193075 - DNA, 972 bp, Klebsiella oxytoca
atgccaaagcctgcaacacaactcgaatttctggccctgtgctttgagcttcccgacctgtcggatgccagcacaccgctgccggaatggttgccgatgatccctgcgggcacattcacaggccgggatggacgtacgtggattaacgacaatcctgcggcggtcatcgcggcttcattcagtcatccaaagttaccggttgatatcgaacacgctaccgagctgcttggtccgaagggtgaagaagccccggcctatgcctggattgatgccatgcgtgtcaacgctgatggcggtattgaggcgcacgttgagtggacgcctgacggtgaagcgcgtgtcaggggcaagaagtacctctattacagcccggccttccgttatctcgcaacaggtcaggtgacgctgctatccagcgtcggactgaccaacaaacccaacctgtatttacccgctctaaactcggagaacaccatgactgtacctttgcagatcgtcactgcgctgggtctggctgctgctgcgtcagttgacgatgccgtagccgctatccagaccatcaagaacagcgaacagaccgcgctgaaccgtgctcaaaacccggacctgtcgaagtttattccgctggagacccatcaactggcgctcaatcgcgctcagacagcggaagaacgcctgaagactctggatgagaaaacggctaccgcgctggttgacgatgccgtgaccgccgggaaagtcgcgcccgctaaccgcgatatgtatctggccctttgccgcagtgaagaaggtcgcaagcagttttcagagttcgtgaaaactgcgcagccactggttaatcaggacccgtccaaaggcaaagagaacaacggtcagcagaccacgcttaccgaaactgagctggcgatgtgccgcagcatgggtatctcgcaggaagagtttctcgccgctaaaccgaaacaggagcaataa

SEQ ID NO: 193076 - DNA, 249 bp, Klebsiella oxytoca
gtgggttcgccactcagctacagcggcgttcaccaggacggttttgctggtagcgtcccggtcagcgctcataagcgtctcattcatcaggcgtttggccgggcgctgaagcatccggtctggcagaccgtgggctctcatacccgccagatgaatattccgcagcgcgagtacctcgggctgtccaccgcaaacagtgatgagctgatgcatgtcatcggcgatttctggagtgaggtattaccgtga

SEQ ID NO: 193077 - DNA, 354 bp, Klebsiella oxytoca
atgagcattctgggtatggcggccatccgtattaatggccgcgaaattaaaaccgaggggaaatctaccctcaatccgggcggtaaaacgcgcacccagcatatggggggcggcaaggtctggggcacctccggcaagatggcgggaccctcgatccagatgacgatcgcggcggcgcaggatatggacgttatcgaaatcagcaactgggaggacgtgacggtgatgttcgaaggcgacaacggtctgacctacatgatgaccggtgcggccaccgacaacccggcgacgctggatgaagacgctggcaccatcagcgccaactttatcggcaccaaactggtgaaggtataa

SEQ ID NO: 193078 - DNA, 381 bp, Klebsiella oxytoca
atggcgcagatgacattgacgttaattcacggctacgtcaccggtaaaggtactggcgatgagatgcggcataaagaggtgacctttcgcgagctgacctcagaggatgtgattaactcccagctggcagcagaacgtgtagttatcggggaaaacggtaaggccgtcgcgtactgctctgaagtcctgatgggggtggaattgctgcgccggcaaatccttaaagtgggtgaaattcctggcccgctgtccctgaaacaaatttacaacttccacccggaagaccttgaaatgctgtccagcaaagccagcgcaatggatgatttgctcgcggggacggctggccgggggcgatctgatgccgatggcgacggcgcttag

SEQ ID NO: 193079 - DNA, 354 bp, Klebsiella oxytoca
atgagcattctgggtatggcggccatccgtattaatggtcgcgaaatcaaaaccgagggtaaatccaccctcaatccggggggctacgcccgcacccagcatatgggcggcggcaaggtctgggggaactcccgcaagatggcgggcccctcgatccagatgactatcgcggctgcgcaggatatggacgttatcgaaatcagcaactgggaagacgtgacggtgatgtttgagggtgacaacggcctgacctacatgatgaccggcgcggccaccgacaacccggcgacgctggatgaagacgctggcaccatcagcgccaactttatcggcaccaaactggtgaaggtataa

SEQ ID NO: 193080 - DNA, 384 bp, Klebsiella oxytoca
atggcacagatgacactgacgttaattcacggctacgtcaccggtaaaggtactgacgatgagatgcggcataaagaggtcacctttcgcgagctgacctcggaggatgtgattaactcccagctggcagcagaacgtgtagttatcggggaaaacggcaaggccgtcgcgtactgctctgaagtcctgatgggggtggaactgctgcgccggcaaatccttaaagtgggtgaaattcccggcccactgtccctgaaacagatttacaacttccacccggaagaccttgagctgctgtccagcaaagccagtgcaatggatgatttgctcacggggacggctggccgggggcgacctgatgccgatggcgacggcgctcagtaa

SEQ ID NO: 193081 - DNA, 156 bp, Klebsiella oxytoca
atgttgcttcctcagctgctctgtcaggcgcagcagctgccggagaggcaactgctgcaggtaggacacattaaaacgttgggacaaattgacgatgagattactgagcgccgtcgccatcggcatcaggtcgcccccggccagccgtccccgtga

SEQ ID NO: 193082 - DNA, 408 bp, Klebsiella oxytoca
atgtttaaatcgttgaataccgactggctgaagctggcattactccgggtatttcagtccggctggacggtggtgattctggtgggattgtcgctgctgttctgcagcttcactggccgtcaggcgtttattgtctggtggctgacattcgccggtgtgctgttaatcggtgcgagcgtatggctcggcaatctcccgtatcgtctgctgcagccgggtaattccgttcgccggtggtcaggtgctctgtcctggattatctggggcgcaggtttcctgttgctggccgtcgctcccgcgaatgcaaaagacccgtggatcctgctgtttaatccgctggctggactgactgccttccttctctggttatgggcttcacataaggagccccttaaatggatccgataa

SEQ ID NO: 193083 - DNA, 435 bp, Klebsiella oxytoca
atggctgagcaacttataacaaaagccctatgggaacaggtcgctgatgagctgaaaagctacttctgccacgttcagttccggtatcaggatacggtgatcactgtcgcacgtcagcgggatggcgagagtcgcacgcttctcgctgtttatttcaatgacacaatgtgtaccggatgggggcgtgaagacagtgaggtatttaatccgctgacgcgccttttctggtgcgaaaagaaaaagcgtcattatccctcaaaaacagtggctgaaattgagagagcgctgggtaagcgacaggcgaaaaaaacatttcccaaactgaatgattcgttcatctatcgtctgccgttcttcaccagttcatcgaccctagttcgtcagttcaaaaaggcggatggcctgatgtttatcactaagcaggaggatatgtga

SEQ ID NO: 193084 - DNA, 519 bp, Klebsiella oxytoca
gtgctgccgggcatcctgccgccggtcaagacagtgcgctgggatatgccggagcgcaacctgctgctgcatgacggcatcgccacccattacgttgacgccagcgacaacgtctgcatcgagcgtgaaatcaccatgtaccgcgtcaaccagtatggtgacgccgatacgtcgtacctcgacgtacagtcaccggcgacgctggggcgtatccgctacgtcatcaaaaaccgcttcaccaaccgctatccgcgtcacaagctggccggggatgatgtgctcgacctgcttgatccgggccagccggtgatgacaccgaagattgcccgcgccgagctgctggatatcgctctgactgagctaattccggcgggtctggttgaggacttcgacgactacaaagacacactggatgtgtatctcgacggcgacgataaaaaccgcctgaacttcatctgccacccgaatctggtcaaccagctgcgtgtgctggccggtcttatccagttcaaactttaa

SEQ ID NO: 193085 - DNA, 288 bp, Klebsiella oxytoca
atgcgtgacattctcgaccaggaccagcgcctggttattctgcgatcccttgtcgaatgcggcgacagcgccaacgagtcgattctgcagacctgcctgcagacgtatggccatcgcgtttcccgcgatacggtgcgcacgcatctggcgtggctgcgtgagcagggtctggtcagtctggcggatgtttccggctgttatgtggctgaaatcaccggtcgcggtgatgacgtcgccagcggtctggctacggttccgggggtgaaaaagccccgcgcgagggggtaa

SEQ ID NO: 193086 - DNA, 375 bp, Klebsiella oxytoca
ttgcaggaagctacccgcgtcggactggtgctgatgggtaaccaccgcgtatacagcaacatgaccggcggtaaccgtaccgttgagttcgcccgtctgttctcccgtatcgccaaacgtgtcgctattaacaaaaccaaaaaagccgatgtggccgcgattgccgacgcctggcatatcaccggtgaaaaagagcgcgatttgctccagcagatcgcacagaagcccggcgcactacgtatcctgagccactccctgcggctggcggcgatgacggctcacggtgcgggtgaagctgtcagcgaaagctacattcgcaaggcactgcgtgatctggatctggatgttgatgtttcaacgttactgaggggttaa

SEQ ID NO: 193087 - DNA, 129 bp, Klebsiella oxytoca
atgctctctttaatcatctccgtcaccggcacccggacgctggcgagcgacggcaccatgtacggcgccagcacaatatcgtcaaaccccaccaccgagacctgctccggcaccttaacgcccagctga

SEQ ID NO: 193088 - DNA, 456 bp, Klebsiella oxytoca
atgctgatgctgggtcagagcttcgataaaaccgcctatccgcgccttgctgtcgcttacccatccggcgttctgccggatatgcgcggccagactatcaagtttttgcctgcctccgggcgtgcgctgctgtccttagaagccgatggtatcaaggtccatgcgcatggtgtcaccattgacagcactgacctcggcacgaaacagaccagcgacgataacgagcacttccaccagggcggaatgctcgcaccgggggcggtgtgggatgataactatgttgtcggttcagacaacgactcccgtcgtacccgtaacaacaccagtaccgccccggctcaccatcacacggtctacatcggtccacatgcgcacacggccacggtggccagcaccgggaataccgaaaataccgtcaagaatatcgcctttaacgccatcgtgaggttagcgtaa

SEQ ID NO: 193089 - DNA, 945 bp, Klebsiella oxytoca
atgtgtgctaaagatataaaatatgtccggaatagacattttgattatattttatccccttgtgtaatgactacctgcgggttgcttggtatgcttgataatccgagggatgttactatattagatgtagaaaaccagaatgatgcacaattattagaaattggtaaggatgagcgcatagtcgtatttattcctgatgaaccctatttgatgctatcaactttaaaatatttagtgtctctaatgaataactccaggtatatgttttgggttctgattcttagccggattccatcattctggatttggaatgtgatcaaatcgcaagtggtgaaaagtaaaatatcacattcttctatccatattgcaccatcggatctctcatgtgaaaagctctctgagattttactgcccgaaaggactctgtgtccactcatacaagatgttgccgttttcgaagacctttttcttggaaaagatgaggggatattaaatcaaagtaagaaatatggattatctaaaaaagagttacaagttatgtctagtgcttttaatggcgatagcgttacctcacaggctgatctgcttggagtaagtaaaaaaacagtctataaccagagattatctgggataaagaaaatggtggggatagtcccctttctgttttggagttttcgtgaaaaatctgagatgcagatcgagggtatcaaaatgttgaacgcactgacgccatttgagcgagagtttgcgcatgcattatattgcaatgagttatttgttgtattacagcctataactaagggcacggatgaattagagggatttgaggttctgataagatggtatagtaacggtcaggttctgatgccagtcgattttctcccaaaattgcactctacttatgtttggataatactcacggcttttttaatacaaaaacggtga

SEQ ID NO: 193090 - DNA, 540 bp, Klebsiella oxytoca
gtgagctatattaacttttatgaagggaaatattttttctccattaatgttgcatccagtaccatcgataatgaggggctcgtacgcatgctggaaaaggcaaaaaagaagttgctctctccagactggacagaaaaattcgtattggaaattaatgaaaagaacgatctataccaaaatgaacaagctattaaaaacctgtcttatttacaaaaactaggatttttcattatccttgatgattgtttttcatctaatagcgttattttcccagttcggaaatttcaatttaatggttacaaactggatatgagtgttgttgacgctatgagtcaggatgtggaagctattgctttagtgaaaagcctctcatattactgcaagttgaccaaccggtattgtgttgctgaaggggtcgacgaggcggggaaggttacgattttgagtgatgccggtatatcctgctatcagggaaacctgatatctgaacctattaatgaaaacgatttacaggatttcattagcagatttaatcgataa

SEQ ID NO: 193091 - DNA, 576 bp, Klebsiella oxytoca
atggctacggggcaaatgatggttggtctggtagcccggctaaggcgcagcgctccgcaagccgggattcagacgaaggattacgccagagaggtagtccggacaggtgcgcagcaccgcctccggaactgtggagagctggattacgccagctgcgcctgcgcccagaattatcctgcgctctttccccgggggcggcgcccgacgcgccttgcccgggctacgggttcgtgcagtttgcggatttggttgaatggctccggggcaaatgatggttggtctggtagcccggctaaggcacagcgcgccgcaagccgggattctggcggaggattatgccagagaggtagcccggacaggtgcgcagcaccgcctccgggactgtggagagctggattacgccagctgcgcctgcgcccagaatacaccgctggcgtattccggcggcagcagcggcttcagcgcttccagcgtcgcgctcaggcgatcggtatcgctgtcggtcaggttcaggtggccgactttacgtcccggacgcacctctttgtcgtaccagtgcagatgcaccagcggtag

SEQ ID NO: 193092 - DNA, 723 bp, Klebsiella oxytoca
atgaatagttttcaaacttggttgttaaatgatccttctcataacatcaatatttacgattattttgacaaagaaaaggtctggatttttgaagaaggggaaaatatggaggatgtcaccctgaccgttcataatggtgacttaagaataaatactgtcgcagacttacccaaaaatacacaagttttaatggttaaaggtaatttaactatcaatgatacgttgactctggtgggttactatcccgagccttttactctgggaggcttgattgtctgtggtgatttaaaatgtaaaagcatgcatttatcttggggtgatattgttgttatggggaatgcctatattgaagagtatattttttcttactctcccgaatttgagcaaggttcggtccatattcgaggtgaaatttcaatcccttatatattccgcggtaatcaatctaacccgcattattattttgataaaaactcaaaattaggtcattaccttgatatcaatttcaaaacaaatgaaaccacatcaaatccccgaatgcatataattgagcatatccgtataaatgaatctaatcctgaaattaaatttacagcaacaacggtagaaggtaagagagttaaatttacactggattctttttatctgtattgcaaagaaaataaattcaccacaaatcaagggtatccagtgtggaaagaggaagcctcactaatgctataa

SEQ ID NO: 193093 - DNA, 327 bp, Klebsiella oxytoca
atgagcaatgattataaaatttatttttccgataatctcatcactgactgtgctattggcgagaacggtgcagtaggtttcactttacatattgatgatagagattgggatcaggatgagattgatgaaaaaggttcaattcaatacgccttgcggatttatacagataaaccagaaaagcaacaaattaaaaaaagcaagctaactaactggtatcgtctttattgtgcatacagtcaattgccgaacgatcttttcgtgtacgttgatgagagtggttatgtataccaggcagggacagaaaaaggtcaacgagaaaaaacatag

SEQ ID NO: 193094 - DNA, 1059 bp, Klebsiella oxytoca
atgatgcttatagatcaagcaatgtgggaaaaattcttcaaaggtttctacatatatgatgcgacatatggttttaatcacggaagaatagggcttttattaaatgaggaagtggatgaagatcatgaagagtacgatgacccctggtacatcccacataaaaaattaatatcgatagtcattgataacccaccagaaacacgtattttctccatgcacttaggtcaccgaccattaacaaccatatcttctggctgggccccatcacagtcagaattagtcatagccgccaatgattgtcaggtcataagttataaaacacgagaatataaagggcctgagaataaaattgacacttcaatccctggcttcaaaaatgtacgagtagcaattagtaaattagtgagagtagggacaagtgtttattctatctgcaccggactaagaatatataaaagaattaatcatcaaatctggaaagaatgtactcaagatttaccaataccagatgaatatatcaaatgcacagcagatggaatcattaataatatattatatgatctagctggattttctgaatcagatatgtatgccgtcgggggaatgggaagcatttatcactttaatggcattaactggagaaaaattcctttctactcaaataaaaatttacataccgtatgttgcgcgggtgataaatttgtctatatttccgattctgatggttcaatctggaaagggcgtaataatgaatggacacgaattatagatcacggaacgcttctctggccttttgatagtatggtttggtttgatgatcgcctctggtgcgccaaccaccaggatatcaaagtgctggaagagaacaggttgatcttcgctacccaagcgaaatataaaccacttcctgacgaggttgattcattaggggaatacgttcatgataaaagtattgaggtttcaccagatggaaccatcatgatggtttgtggctcacgcggggttgccctatataatggtaatgaatggaatgtactattcaacttatggaagttttaa

SEQ ID NO: 193095 - DNA, 483 bp, Klebsiella oxytoca
atgtacacaatcaccccaaccccgcaaaaccacccggatctgatggccttaattgccgaactggacgcgtatcagcagacgctctacccggctgagagcaaccatttgatcgacctgagcgcgttaccggcggagtcggttattgcgcttcttattcgcgatacgcagcgccacgccgtcggctgcggggcgatcgtactcggcgaagagggggttggcgagatgaaaagggtgtttattcacccggcccatcgcgggcagcagctgggagaacgactgctggccgcgctggaggaagaggcgataaatcgcgaatgccataccgtgcgcctggaaacgggcgtccatcagcacgccgccgttgcgttatatacgcgcaatggttaccagacccgcagcgcctttgcgccgtatcagccggatccgttaagcatctttatggagaagatgctgcttgccgatcttcgttcagcagcgctataa

SEQ ID NO: 193096 - DNA, 567 bp, Klebsiella oxytoca
atgagcaaatcgcataccgaagtcagtaaatttttaagctatattctgcgccaccagcctgagagcgttggtctgacgctggatcatgaaggctgggcagatatcaacgcgttgattgccggagcggaaaaaaaacgcatctcgctcgacaggcaactcattcaatccgttgtcacgagcagtgataaaaaacgttttgccctctctgccgacggcctgcgcatccgcgctgttcaagggcactcttcgcggcaggttgatatcgactttatcgctgcggccccacctgagtttttatttcacggtacagccacgcgatttatcgatacgattcgtgaacagggattgattccaggcgccaggcaatacgtgcatttatcagacaatgcaagcaccgcgactgaagtgggcaaacgctacggtaagcccgtggtactgaaagtgaacgccttattgatgcaccagaataacattgcgttttatcaggcggagaatggagtttggttaacggcagcggtgcccgcaaggtttatcgcgtcatgggaccatcccggagtcggcgcctga

SEQ ID NO: 193097 - DNA, 528 bp, Klebsiella oxytoca; identical to SEQ ID NO: 172017

SEQ ID NO: 193098 - DNA, 1107 bp, Klebsiella oxytoca
atgtcaatttcattcgaattacaaaaaatagcagaaaaattagcgcccttcgaagatgaagaaaatgaagggcttgatgaattaacaggcgttattgaagatgtatcgaaatcattttctggttcatggcttggataccattcctgtgtatattaccgaggattcaatcgccctcctgccggtgctgttttcagtcctgaatggggtttgatggatgtaatgagcatggggagtattggtgattgggtcacataccaatatgattatgtcattgattatatttacaatgaagctaataacattgatttggatgattatagtacatcgtcccaaaaagcagaggcggtatttgaaacctgcaaaagcgatgctctatcacttatatactccaataaagaaaacataaaggaagataagtttctcactgacctgattgaaaaaatagaaaaaacagtagtaattcaagaaagccaatttttaagtttatgtagacctcatgggaaattcatgagtagagacatgaatgctgttacgaatggaataaaaacaccacctcacattgctattctatgtgatgttatggcaataaaatcaccttacacatcatgtaaagagctaaaaagcgacttagccaagctcgctaaccacctaaaaaacaaggaaaaaatagtggcaattgaagagcggagaggcgttaatgtttttattggccatggtcgctctcatatgtggcgagagttaaaagactttgtccaagataaacttagattaccatatgatgaattcaatagagttccagtggcaggtgttactaatataacaaggcttgcacaaatgttagatcaagcctgtattgcattcttggtgatgactgctgaggatgaaatgatggatggaaataaacaagccagaatgaatgttattcatgaggttggtttatttcaaggccgtttaggatttgaaagagcgatagtactattagaagaaggttgtgaggaattcactaatataaatggacttggacaaataaggttccctaaaggaaatatttctgctgttttccaagacattagagaagtgctggaaagagaaaatattattcaataa

SEQ ID NO: 193099 - DNA, 477 bp, Klebsiella oxytoca
gtggcagaatatcccggaggcgatgctgcgcatctgtccgggctacgcgtcctcagcggtctgcggtccggtagcccgggcaggcgctgtgcgccgcccccgggagagattgcggagtggcagaatatcccgaaggcgatgctgcgcgtctgtccgggctacgcgttctcagtggtctgctatccggtagcccgggcaggcgctgtgtgccgccccgggagagagtgcggagtggcagaatatcccggaggcgatgctgcgcatctgtcagggctacgcgtcctcagcggtctgcgtcgctgtagcccgggcaggtgctgtgcgccgctcccgggagagagtgcggagtggcagaatatcccggaggcgatgctgcgcatctgtcagggctatgcgtcctcagcggtctgtggtccggtagcccgggcaggcgctgtgcgccgcccccgggaagaggtgccagggctgatgtattaa

SEQ ID NO: 193100 - DNA, 537 bp, Klebsiella oxytoca
gtggcagaatatcccggaggcgatgctgcgcatctgtcagggctacgcgtcctcagcggtctgcgtcgctgtagcccgggcaggtgctgtgcgccgctcccgggagagattgcggagtggcagaatatcccgaaggcgatgctgcgcgtctgtccgggctacgcgttctcagtggtctgctatccggtagcccgggcaggcgctgtgtgccgccccgggagagagtgcggagtggcagaatatcccggaggcgatgctgcgcatctgtcagggctatgcgtcctcagcggtctgtggtccggtagcccgggcaggcgctgtgcgccgcccccgggagagagtgcggagtggcagaatatcccggaggcgatgctgcgcatctgtcagggctatgcgtcctcagcggtctgtggtccggtagcccgggcaggcgctgtgcgccgcccccgggagagagtgcggagtggcagaatatcccggaggcgatgctgcgcatctgtcagggctatgcgtcctcagcggtctgtggtccggtag

SEQ ID NO: 193101 - DNA, 1665 bp, Klebsiella oxytoca
atgaatcagtcacaacaaggggcatggtggaaggaagcggtcatttatcaggtgtatccaaaaagcttctatgacagcaataacgatggcactggcgatatccaggggataatcgcgaaactgccgtatctgaaaacgctgggcatcaccatgatttgggtctcgccgttctacctctcgccgggtgcggacaacggctacgatatcgccgactactatgcagtgaaccccgatttaggtcagctgcaggatgttgacgacctgattaagcaggcaggcgaactggggattgggatcatggtggatctggtggttaatcataccagcgatgaacaccgctggttccaggccgcactggcggaccctgcctcaaaataccgtgattactatatctttaagcccgccgttgctggtgccgcgcctaataactggcgttcgatttttggcggcagcgcgtgggaaaaagtggctggcgaagagtgctactatttgcacgtttttcataaaaaacagcccgacctgaactgggaaaacccgcagctgcgccaggaaatctacgccatgattaactggtggctggataaaggcatcgccggttttcgcatcgatgcgattacgtttattaaaaaagatcaggattacgcctccctgcccgccgacggcgtcgatggactggcctccattaaaacgaaatcgcgcaaccgtccgggaattgaatgttttctgaacgagctgaaagaacacaccttcaaccgccatcgctgcgtgacggtgggcgaagcgcccggcgtgcctctgcaggagtacgacagctatatcgggccggacggctatttcaatatgatcttcgattttcacgctgccgatatcgatgtcgagaacggctcggagtggtttaagcagcgcaactggcgcgtgagcgaattcaaagaagcgctttttgccagccagcgcgctttttgtcaggccggctgggggacgacgtttattgaaaaccacgaccagccccgggcgctgtccaagctcatccgcgacgcggattaccaaaatgacatcggtgccaaagcgctggccgcgatgtacttctttatggccggaacgccgtttatttaccagggccaggagctgggaatgaaaaatttctgccggcagtcaattgcggaatttgacgatatttccagtctggataactatcaccgctccctcgcggaaggtttctctgaacagcaggcgttaggctttattaatcagcgctcccgggacaactcgcgaacgcccttcccgtggtcgaatagcgtcaacggcggatttaatcagggtgcgcagccctggctggcgttttcttcaaccgactttagcgtcaatgcgcaaagccagataaacgatgcgcattcggtgttcgcgttttaccagaagatgatcgccttgcggaataagcactatccgcaagcgctgatttatgggtcattcgccgccgtggaggacgttgacgagcgtatcgttgcctaccagcgcgcaacacacaacgaacgttttatctctatcaccaacttaagcgcgcagcatctgccttacacgctcccggcaggagagattgtactcaataattatgccgacgccgacgccaccctgaaaccttatcaaaccattctcgttaaggaatga

SEQ ID NO: 193102 - DNA, 255 bp, Klebsiella oxytoca
atggcgttaattcaggatacggtgattaaaggcctgaaagtcgaaaattgttatatcgccgtggggagcattacccttgccgcagacagaacggagatatatttcaacctgaatttctcagtaacaaaagagcacccgcctttattcacggattatttcacctgctcatacgacattgatggcggagaaatcgttgagcaggcctatacctatctgaaaagcctttcccggttttccggcgctgctgacgtatag

SEQ ID NO: 193103 - DNA, 177 bp, Klebsiella oxytoca
atggagttatcagaaggcagtaccgtaatttgctataacaatgccgatatgaaagatattctgacggcaggaaaggagtaccaggttgagaaaatactggatgcggatttgattacgcttgtcggcgtgtcagagccggtatttatctggcgttttgtctctccttccctgttttga

SEQ ID NO: 193104 - DNA, 2010 bp, Klebsiella oxytoca
atgccattttatttaacgcgggacccggtcccgtcggcagacatgcgcaacgtattcgataatgcgcagaatttagacctttttctgaacgacataacatcggcattctggacggatcgacttggccgtagtcgcatgtcatggtttgggatggaatctgcattcacagtaaaacttacggattttgaatctcactttgccacccaacttacagctcaggaaactgaatttgatgctgcgcaggctgacaaagaggctcgctttgttcatttccttgatagctctggctatgtgttcctgggtgactatgaagacggcccattccagttcagtgcccgcaaccaatatattcgctttcaggggcaatttttccgactgagtaaagagaccgatacaggttttaccactaccgggactgatgaaacaagctttgctaacgatgtcacccatctggttttgatggatggggacacgcttcgccaaaacctgggttcagacgaagaaggtatgggcagtgcattgctcatgcaccataccgggaaaagcgtcgctgaatatttagatctttaccttgcaaccgtattctttattacccctgagcagtacggtgcaaagggggatactgttcaggatgattctgacgctctggaagatgcgataaacaaagcggtagcgaccagtcttatgtccggtggcgtttatactccggtggtcgtacaactcaacaagccgtaccggataaccagaaccataacgattgatgcttcccgagtgaggcttaacgctatatcgggttgtggagtgtatgttgaccctgatggaacgtatacagataacaaagtattcaacattacgggcagcgggccgaatgccgccgtggcggccagcaaggtgggagcgttgtttgatggtgttttgtttctcaccaatggtgaaaagaaacttgacctttttcatgcagtgcgtgacagcacagccagtaatgataacggtgcgtgtctccataacgtaagcaacatagccgcccgtgggttcagaacgattttcacacacggcgcagggggctggggctggaatttcaccgggtgcctgttcagcgggaatattaacctgatggatatcatcaccgcaggcgacacttacgaaaggcatacgtttgtcggctgtctgtggggtaacggtggttatgcattcaaaatgaataaccccaacgggaaaatttactggattggcggctcagttgattattgtgatggtctggcacaaatcacatccgggcatatggaagttaacggacataacgaatggactggcagaacgaagcccctggtagaaatcaccggctcgaatgcatcgctgaccgtctccggggcaatttttgtgcggggtaatactgatactcaatactatatgtttcagcaatatcagaaacggcaggtgacactgaaagacacggtttttattactgacggtgtgaatgtaagtaagggtttgatatctaatcttgaggtggtgaaaagcaatctgacattccctaacgatgcagccaaaagcattgcttataattcatctgatgaaagcctgctgaccagcaataatgccgttgttgatttctcgttatcggcagcggcaaaccatacggtatcaatgacagatggtaaactgacagtgacggctgttaccggcggcaccacttcacatctgtatatcgatatacccgttatgggtaatacaaaggttggtttcaaattagttgcgtcaaatacatcctcactgggtgctatatccctgaacaaatcgctgcttactttgagcaaaaggcagatatccgacctctcggcgtcaggtacggcatcatggccagccagcgctgccagtatagcgggtgggtcggtgacgctctttgatatccccagacaggccgcttttctcaggctcgattttaacgtggcaaatctgaccacgggtacgagcttcattattgaatcgctgaaaatgttcacatattaa

SEQ ID NO: 193105 - DNA, 939 bp, Klebsiella oxytoca
atggcggaaaataattttaaaccgttcgcaacagctgctggtgcaaatgttgcgactcaggctgaatgggaagcgctcattgctttagctacaggattcacagcaggcatagcaagatccagccagataaataaggccctgcgccaggctacagtcatagcgagtgttctggctcagttcattgcagataaaacagaaacggatgtgctggacgatggtgatacatcgaagttattaattcagttaactcaggcgctgaataaaagtggtgacgaacggtatcttaaggttgcaagctatctgtctgaaatatcgaatgctggtgatgaggctaaagcatcttctcgcaataatttagggttgggtagcgcgtctacacgcgatacgggaactaagggagaggtaattccattactctctggcgctaacgcatggtcttcagcccagtattttattggttcgggctcatccagtggcggagaggttcgatcttcagccaatattttttatccatatggtaccaatgggaccatgtgggctgagttttacagttctgacatttctgatgaccattttgagcatcgtgtcgttgtttataaaagcggaacacgaaaatatttccgtttcaaagaaagcggagagtttgctactgatggagatattaagtcaggttcgggtatttacgatactggccaacgtgtttacagcccttcaaacaagcaaccccccgcattaataaatgaggttggcgcgtatgcgtttgcctggtatgacggtgctgcagagtacaacgctaccgttagtggatccgcattatatccagccactggcgatggtaatcactcatcaaccgcgcttagtggaacgtggcgttgcatggggcgaacggaaacgattaacgatcagcacagaataacgctatggcaaagaatcaattga

SEQ ID NO: 193106 - DNA, 774 bp, Klebsiella oxytoca
atgagcaaatacaccgacctgataaccaattaccacgccggaaagccaaaatttgttgctcacgtggacttgtccacccggccacttattgatgtgtcgactgcaacttctgggctggtcgccgcttttgatgtggacacggcggtaggaaatcagcttgatattcttggtaaatggattggcgtcgaccgcacagtcgctgcgcccatatccggtgtctttctggaatgggataaagagcgagtcggatgggatcaaggtgtgtggttgggaccctaccagtctaccgacgaattaacctatttgagcgacgacgtttaccgaattgttctgaaagcaagaattggcatcaataactggaacggccagaacggtacgctaccgaatatcctggagactgcgcttgcaggtacgggaataaaaatgattattctggataatcaggatatgactatttcagtgcttattgttatcgatgaagaatatcttatgtcggtaacggacaggctgatattcgattcaggcatgaaccgggggccgttcattacacttcctgccgattatgtcccttcaagatacgatattaatcccattgataagttaccagctgaatttgttttcgttatacgcgccggtcttttgacggttaaggctgctggcgtcagggtcagagaaaccgtaaccccctcaaacgggtataaattttttggatttgatgttgataatgactatatcgctggctttgaaactggcgcatggggagaaaacttctga

SEQ ID NO: 193107 - DNA, 528 bp, Klebsiella oxytoca
atgaggattatagtcgctagtgtgatacttggtgcttcagcaatattctcagctgcaatgctttcaggaaatctagactttaaaaataaaaatattttaaataatgataatggtcacgtttcacttgggaagatctatagcgaaaatgcttatgttgatgtgacttttaaagtagatgatgacaattcaacgatcatggagctgaaagacttatcgatcggttcatacaaggatggtattgaaaaagaggtccaaggcattgttgatggttataataaagacaagccagacaataaaaaaacagataaagacagcttgtcattgaaggtgcctggtactttgacgcttaaagcgcatacagcgtatagaactgaaaacatgccaatgtataacttaataattgattccagagttatacatttcgataaagatacacttattaataaatcagtatcagatgcagtcgaaaaattcgtaacagataataagagtgcttatcaagaaacattctttatcaaaggcaattga

SEQ ID NO: 193108 - DNA, 501 bp, Klebsiella oxytoca
atgaaaagcgggctcacgatacgctcagacaatttcgccgatgttctggatgcgctgaataagctttccggtactgatgtgctggtgggtattccggccgggccaccgcgtgaagattcgccgctgagcaacgctgaaattggctacctgcaatctactggcgcgaccgtggagattgacggcgaaaccgtgactcttccgccaaggccgtttctcgacatgggtatagaagattcacgggacaaaaccacagagcggttaaagcttgcggctcagtcagcccttgagggtaacgcagcaatggcggagcagcaccttgaagccgcaggccagattgcccgcgatgcggcaaaggcggttattggtgacggtgagcggctggaacccttatctgaaaagacgctccagcgacgtcgtgctgctggtttgcgaggcaataagcctctctatgctcatggcttcctgttgcgtgcgattcaatacgtcgtgaggaaaaaataa

SEQ ID NO: 193109 - DNA, 261 bp, Klebsiella oxytoca
atgaagaaaatctatgtactgaccgcgttcaactttaacgacggcgacaaaatcactccgtttgcggctggatttcacgaagttgatgacgaagtggctgcgcactggtttgtaaaagcacattgctcacctgatggtgaggccccggcagtgactgaagacccgcgcattgctgagtacgaagcgcgaatagcggaacttgaagcgaagctggcggagactaccaccaatggcaagaaatcaaagtctaccgacgcctga

SEQ ID NO: 193110 - DNA, 228 bp, Klebsiella oxytoca
atgaacgaacaagagctactgacagaattattgcgtatgcatgaagcgggggaatctctgtcgaaagaatttgcaactgaaaattacgaagggcttagtggtttatggaataaacgcctaatttgttacagtgttgcaaaaatgactgctggtaatgtcaggttaagaagagtttactccggggttttaacgcccgcaggcgtcgaaaaagccaaagccattaattaa

SEQ ID NO: 193111 - DNA, 1620 bp, Klebsiella oxytoca
atgccgctgccctttacattcgacttcaaaaatcctgactacaacatggtttttgaatggaggatggagcgcctgctgcgcatcaggcaaaaccctgatgtacttcctgcgctgaggcagttttaccgtaacgacccggcacagttcatcattgactggggcatgactaccgacccacgcaacctcgattatggtttgccagctaccattccatttctgctgttcccccgccaggaggaatggattaactggatcatggaacgtcgtagccagctagagcacgggctaacggaaaagagccgtgagatggggttgagttggacctctataggcctggcctgctctctgtgcctgttcaacaaagaaatggtgattggcttcggctcccgcaaagaggagtacgttgacagcaccggtgacccgaaggcgcttttctggaaggcccgaaagtttgttgaaatgctacccgttgagttccgcggctcctggacagagaaaaagcacgctccgtatatgcgtgttgaattcccggaaactggggcggtaatcaagggggaagcaggcgataacatcggacgtggtgaccgtacaacactttatttcgtggatgaggctgcatttcttcagcgcccattactgattgatgctgctctttcgcaaaccacgcgctgtcgcatcgatctctcatcggttaacggtatgagcaacccgttcgcgcagaagcggcatagcgggaaaatacctgtatttaccttccactggcgcagtgacccacgcaaggatgatgaatggtaccggaaagagtgcgagaaaattgataacccggtcatcgttgctcaggagttggacctcaactatcaggcatcagcagaaggcattctgattccttctgaatgggttcaggccgctgtagatgcgcatatcaagctgggtattcagcctaccggtaaacggctcggagcaatggacgttgcagacgaagggcgagataaaaacgccttttctacccgtcacggcttcctgctggagaacgttcgcgagtggtcaggcgtcggcagcgacatctaccagtcggttgagaaggttttcgggttctgcgacgcggacaatatcgatgagtaccgtttcgatgaggacggattgggggcaggtgttcgcggcgacgcccgcgccatcaacgagctgcgtaaagctgcccgccggccaattattctggctaccccattcagggggagcggcgcggtattcgatcccgacgatgaagctgtacgcggcgacaacggccagcaggctcgactaaacaaagatttctttgccaatgccaaagcgcagagctggtggcatctccgtaagttgttccaaaacacctaccgcgcggtagtcgaaaaaatgcagtacaaccccgatgaaatcatttctatcagcagcacaatggaaagcaaagacaaactcatcatcgaactttcacagccgacctactcaatcaacggggtggggaaaatcgttgtggacaaacagcctgatggcactaaatcgcccaacctggccgactcggtgatgatcagttacgcgccaatgaattcagccctgaatatctgggagctgttaggtagcagttaa

SEQ ID NO: 193112 - DNA, 1356 bp, Klebsiella oxytoca
atgagttatcagtggcgaaatgatgaacttgagggggcaacgcttggcgcaatgtttttacgtggagccgatccagagacgctggaggtaatttctcgcctgcccgccagcgcattcaacgttaagcagtaccaggatatctacgctggtatctgtacacaagcccgcaccagtggcgtcattgacccggttctgctgtgcgacagcatgccccattatgccgccataatcaccgagactgggcgcagggcttgggccaaatcttcacttatttcttacgccaataaactgatgcaaaacgccgcaatccgcgatggtgaagccgcggtgatgaaggtgctggaggatattcgatcctcgaacacccctgaggcggcagtggcggcattgagcgcagcccgccagacactgatggcaatcgagactggtcaggatggcgtccaggctgtgccaattgacgagctattgcctgaggtggttgctcgtgttgaagagacgctggcgaacggcggagcggggcgattcttgcgtacagggattgaggaactggacgaaatgaccggaggaatcgatttaaccgatctggtttttgttgcagctcgcccgtcgatggggaaaaccgagctggcgctggatatcatcgacaaggtgacagagcagggccatggcgtgttgttcttcagcatggaaatggcgggcatccagatcacggaacgaatggtgtcagcggctggcggactgccagtatcccgtctcaaggccgtgcatcagtttgaggatgaagactgggcgcgattgagtgccggcgtagctcgccttgccaaccggcccatctggattgcagatgcaaccaacctcaatgttgagcagatctgccagaccgccacgcgcatgcagcttgcccaccctgagattgctctggtggttgtagactatcttgggctaatcaaaactacaggctccgcacgccatgatttggccgttggcgatatttccaaaggacttaagcgcctggctaaatcgaataaaacgccagttctggcgctgagtcaattgtcgcgcggtgtagagcagcgcccgaacaaacgccccatgaactcggatctaaaaaactcaggtgagattgaggccgatgctgacctgattctgatgctgtatcgcgatgaggtatacaacccggaatctccagcaaggtcaatagctgaaatctctgttaccaagcagcgtaacggtgcgctgggtaccatctatcgccgcttttataacggccattttttgcccatcaatcaggaagaagctcgacagaaaagcacccctacacctaaaccacaacagcgccgatatgcaaaatcctga

SEQ ID NO: 193113 - DNA, 882 bp, Klebsiella oxytoca
atgttaaatttaatgaatcaacacaaagaacgagcagacctgaaggccgcacaggagcgcctgagcgaagagttaaacttcgcaattgagcggaaacttccgtgggggtactcgggttgggatgccggagaaattgagactgtcacctgcgaaaaacacggtgtttatgaacgtttaaccctggtgggtaaggcttttcgcggcggggagaatttcaagcattcccagtgccccggatgcctgcatgaacagattgcagagattgacgcaaagctgcgtgcgttgcgtgttgctgagttgatggatcgggctggtattgcgcgtcgcttcgaaagctgcgagttcgataactaccagaccgtaaatccggatgcagcgaaaaacctctccgcatgccaacgctatgccgataactgggagcattgctttgatgccgggctgggtctgctgatggttgggaagtgcggtaccggaaaaaatcaccttgtcgtcgctatggccaaaaatatcattcgcacccacctggcccatgttgaaattaccgatgtgatgcgtgtgatgcgtgccgtgaaaagcacctggcggcataacgccgaagcgacggaagacagcgtgctggatcattacacgtcgctggacctgctgattattgatgaggttggcgtgcagttcggtagcgcatcagagcttgcaatccttcaggagattgtcaacgcgcgttacgaaagcgtacttcccaccattctgatcagcaacctgacctttgagcagcttaaggattccattggtgagcgtatcgttgaccgcgttaccaacggtggcagaaacaggctggcgttcaactgggaaagctaccgtgggaacgggagtgcagcagaatga

SEQ ID NO: 193114 - DNA, 846 bp, Klebsiella oxytoca
atgagcatgttatttaatttccgaccactggttattaaccctgagcttgccacgcgcatcggtctcaacgaagcgatagtcttgcaacaggttaactactggattaacgacaaagagcagggtgtgaattttgagggccgccgttgggtattcaacagctatgagtcgtgggtaaaacaattcccgttctggtcagcagataccgttaaacgcgcttttacatcactcgtcaagcagggatgcctcgatgttgagcagctcaataagtcccagcatgaccggacaaattactacaccatcaaccatgattgcgagctgcttaatgatgcggaacaggtgccctcatcgaacggggcaaattgccctgatcgacaagtgcaggatgcaccgatggatgaaggcaaaaacgcccgatctctaacggttattacaacaaagactactacagagactaaatctattggcgcatcggctaaagcctctgcaccggctcgttctgcaaaacaggattattcacctgaattcgaaacagcctggcaggcctaccccaaacgtgctggtggtaattctaagcccggggctttcaaagcctggaaagctcgcctgaaagacggggttaaacctgaagacatgctggcgggtgttaagcgctatgcagcctacgcccgtgcaacaggcagcgtcggcacacagttcgtcaagcaggcaactactttcttcggccctgatcgccacttcgaggaagcctggcaggcccctgtcgctccgggaggtgggcgctctggcgtactgccggtatccggctttagcgatcaagattatggcgaatcagggtgtcagtggtaa

SEQ ID NO: 193115 - DNA, 300 bp, Klebsiella oxytoca
atgagtaatacaaattttgttcatcactacccgttcgccagcccgctacagcgcctgattatgatccgcatcttaatggcggggtcactggatggcgaaggcgagcgcatccttgagcatgatgccttggcaaatttctgttgctgttcaaagcaaatgatcttcaaagaagtgaaaaaccttgagcaagctggtcatcttaccgttcgccgaataggggggcttacaacaggattaaaggtacgccttgagccggcgcgaggatacaccattacgccgattactggtgatgcaaaatga

SEQ ID NO: 193116 - DNA, 135 bp, Klebsiella oxytoca
atgtcacaacagtcaaccgcaatgccagatccgcgctacttccagaaactgctgccacgcagcatccggtacgacccgatcagcggggtttattacctcatagcgaggccggggagaaagcgtgaacccaactga

SEQ ID NO: 193117 - DNA, 456 bp, Klebsiella oxytoca
atggaaatcaaagacattcgcttaaaaaatctacaaacggtaatccaacgcagcggcttaacccagacagatctggcgttaaaatgtgagatatcaccctcacttataagccaaataatgactaagcgcaggaatatgggaacggctctcgccagaaaacttgaggggcgactgagcctttcagaaggatggtttgacatccctcactcattgctagattccccatggcatctggctaaaatgagtgaaaagactggagcggtcgctattgatgaacagcaattaaccaaaagagagactcgacttattgagttattcagacaaatgcctgaaagtgaaaaagacaggataataagtgacttatctgaaaagaaacgtaattttgacaaactacttgatgaactaatggctgttaaagcatcaagaatgcctatcgacaaaaacgaaaatgaataa

SEQ ID NO: 193118 - DNA, 438 bp, Klebsiella oxytoca
atgttaaatgataaacatggctcttattccgtaaactctctgttgatttgtgctcaagcggcactattagacggtaccgcttcaaaccatgacgtcatcaaccttttagatgttgcacaagacctcatctcatcaaatattaattcctttactgatagtgtcgctcccggtgctagtattgatttattagccaaagaatttggcgctagcaacctcccgatattatctatcggccagcgtattcgacaggcacgcaagtcagcgaatcttcagcaacaccatattgctagcgctacaggggtgaccattcaggctgtttcattatgggaaaacgacttaacaatcccgacctgtgacaaaattatcccgatagctaacgccctcaaatgcgatccgttatggctgctgactgggaacagtccggaggtcgtggaatga

SEQ ID NO: 193119 - DNA, 207 bp, Klebsiella oxytoca
atgaaagctaataccccccgtcacccgaacctcattagcgcgatggaatacactaataacgtatgcgccctgctcgtagcacttgagttaagcgctgaacagcttgatgcggacacaattaaagacgcatctaacggcattcggtacctggcttcgcgagcatatgaagaactcgaacgcgtaaagaatttcgaggtaagtaaatga

SEQ ID NO: 193120 - DNA, 195 bp, Klebsiella oxytoca
atgagtgcctatatccgcttcgttttatcgctggtaatagcctccagcgtctatgggctgttcgttcctatcctcgtttcgatgaaggacacgacagcagtgatatccggtattgctctggcgattctggccccgccgtgcatctacgccatctgtaagggtcttgttgttaccgttaccaaggaaaagaaatga

SEQ ID NO: 193121 - DNA, 828 bp, Klebsiella oxytoca
atgaaaaaagtaatcttagcctcgctgatttctgtctccgccattagcctggttggttgtgatcgtgttgagcccggcaatgtgggtatcaaggtaaacaagctcggcgacgacaaaggtgttggcgaagtggtcggcgtcggccgctactggaccggctggaataccgaggtttatatcttcccgaccttcaagcagatgaaaacgtatgaagacgctttcaacttccagatgagcgacggcaccaccatcggctaccacatcggcgtggcgtacaaggttgatccgaccaaagtcacaaccgttttccagacctaccgcaaaggggtagacgatatcaccgacaccgatctgcgccagaaaatcgcggactcccttaatcgcctgtccagccgtatgagcacagaccgttttattgatggtggcaaggccgatctgctgaccaacgcacttaaggagattcaggaggaaatgggcccggttggtattcaggtcgttagtctgtcgtacgttggcaaacctgaatacccgccgacggtgatcgacagcattaacgccaaggtgacggccaaccagaaaacgctgcagcgcgagcaggaagttaaacaacgtgaagcggaagcgaacatgctgcgcgccgaagctgatggccaggcagatgcaaagctcaaactggcggaggcagaagcaaaatccatccgtattcgcggtgatgcgcttcgccagaatccggaggttatgcagctggaagccatcaacaaatggaacggcaccctgccccagtatatgaccagcggcgccggcactccatttatccaggttaaataa

SEQ ID NO: 193122 - DNA, 1293 bp, Klebsiella oxytoca
atgagtaaagcatcatacccaacgggcgttgagaaccatggcggaacactccgcatatggttcatttataacggcaagcgtgtcagggaaaacctcggtgtccctgacaccgctaaaaaccgcaaggttgccggggaactgcgtacttctgtctgtttcgctatccgcatgggtagctttgactatgctgcgcagttcccgaattcaccaaaccttaaaaactttggtattgagaagaaggatatcgcggtggaaaccctcgctgataaatggctggagctaaaaagcatggaaatcagtgcaaacgcattaagccgttatcagtcggtggtgagagtaatgcttccccatattggtggtaaaagactgatctcgacgatcacaaaggaagatttgttgggtatcaggaaagaactgctgacgggatactgtgtgcctcgaccgaaccgcaagaccgtgaaaaaggggcgctcggccccaacggtaaactattacatgggaatcatatcttcttttttccagtttgctcatgagaacggctatgcagagcaaaatccctgcgccagcattggagtactgaagaaagcaagagctaagccagatccgcttagcagggatgagttttcccggttaatagacgcttgccaccagcagcagactaaaaatctttggtcgctggctgtgtatacaggcgttagacacggcgagttagtttctctggcgtgggaagatgttgatttgaaggcgggaaccatgatcgtgaggcgcaatctcacgaccatgggagactttactttacccaaaacagaagccggcactgacagggttatatatctcacgaagccggcgattgaagtactaaaaaaccaggctgaaatgacgcggctaggaaagcagcaccggatagaagttaaactacgggaatatggcagaagcacccatcattcctgcacgtttatctttgttcctcagcctacaagacatcataacaaacctgatgggtattatgcagtaggttctctcgggccaagttggacctcagcgatgaaaagagctggcttacgttcacggaaggcttatcagtcgcgccatacatacgcatgctggtccttgtctgctggagcaaatccaacttttattgcatcacaaatggggcacgcaaacgcactgatggtgtacagggtttatggtgcatggatgccggagtccagcgcttcacaggtggccatactaaatcagtccctgcgagaaaatgtcccaacgatgccccaaagagaaaaagttacagcataa

SEQ ID NO: 193123 - DNA, 453 bp, Klebsiella oxytoca
atgtttattatgattgaaacctcgctgattgccggcaccgggtttaatccactcattacggtttgcgcgatgtacggttttgccaacgccgccgtatgtctggctatttcactgaaggcgaaaaatatcgcgtttaaaaccgccggaatttccgcgaccattactcagctattaggcgtctcggaaccggctttattcggtatcgtgatgcaatccgggcttcgggcgataatggtgatgctcaccagctcggcgctggggggcatgattctgtcgctgctgtcgataaaagcgaactcatacggtctggcggtcctgctgtcgccgctaatgtatctctacgatcgctatcagtttgtcacctatattaccgtgggactcgcggtgtttatttttgcttttattattacattcctttttgtcaaaaccgctaacacccgcaaagagagctga

SEQ ID NO: 193124 - DNA, 420 bp, Klebsiella oxytoca
gtggcccgggcggttgaactgcgccgccagggttttctccgcaatcgccatacccaccgcattcgcaataccctgccccagcggaccggtggtggtttccacgcccgcggtgtagccgacttccgggtgacccggggttttagagtgcagctgacggaagttcttcagctcttcaatcggcagatcgtagccggtgaggtgcagcaggctgtagatcagcatcgagccgtgaccgttggacagcacgaagcggtcgcgatcggcccaggacgggttctgcgggttatggttcaggaaatcacgccacaggacttcggcaatgtcagccatacccatcggggcacccgggtggccggatttggctttctgtactgcgtccatgctcagcgcacgaatagcgttagcaagctctttacgtga

SEQ ID NO: 193125 - DNA, 318 bp, Klebsiella oxytoca
atgagttatgctctgcgccagtccggatactcgttgtgcagtacgacaccggcgaaccaggtgccgtacaaccaaaagttgcctgctgtgcattatcaactggagccaatgcgcctgagtcaggcattacagatcctggccggatcggcctggcagcttgaggttgattatgttcaatggatcgtctgccattcattacgtgatggatatcgtttgccgccggaagcggtgaaatcgtcggtcacttcggtctcggtgctgctaaccactcaacccgtcaacttcaacgctctggcttcgctgatgatgctgaaatga

SEQ ID NO: 193126 - DNA, 969 bp, Klebsiella oxytoca
atggatacacctatgaccgatacgaaaaactctacctctctgagtgataaaattgctgcagacatcgttcgtaagatgctggatatgggggctccacaacaatttcatctcgtaaaacaaccattagctgaagagttcaatgtgtcccgttcaccggtacaagttgcacttgagcggctttctaaagatgggatccttgcgtggttacctcggcggggattctttctgcaagctgatatacctgaattaaataaatggttatcacaatttgcaacatcttctacggaaccatctttggctttcaaaatattgtctgatcatgttaacaatcgcctaaatactgaatttagcgagaaagagctggcccgtcagtacaatctgacccgaggccaggtatcagccacattaagagagttgcttctggaggggtgggttgagcgtaagcagggttatggttgggcatttcttcctatagtcaattcacttcactctagagcacaaagttatcgtttcagacagacgattgaatgtgctgcacttttagatgaagaatacgagccaaatcttagtcttcttggccaattaaaaaacgagcaggaacgcttacttgatggaatgctatatcgattggataacgctgctatttttcaaataggatcggcgttccatgagtcgatagccagttgttgcaaaaacccattctactatgactctctggtacggataaacaaactcagaaagttatacgaaaaatactctcatattgatatggttaattttgaagagaattgccgtgagcatatttcacttattgatttattagaaaaagatgacaggattgcagcttcatcttttctaagacagcatttaggtaatgtacttacaatgaaacaatctcgcatttctcatgttttagatgatgacgatgagggaataccgggcgtggatgatattttactacacttctga

SEQ ID NO: 193127 - DNA, 1077 bp, Klebsiella oxytoca
atggacaattctatcgaaccgttgaagcttaaaaaattcgttagtgcagtatatcagcaagccggagtgcctgaggacgatgcaggcattattgctgatacgcttgttcaagctgatttatggggacaccagtctcacggtgtacttcgcctgtcatggtatcttgagcgtttacgctcgggtgtgatgacaccagtgacaagaccaaaacatttagtcgatacaccttctgtaagcgtaatcgatggtctggatggtgtagggcaggttctggcaactcgtggtatgcaggaggccattgtaaaggcaaagcgcaatggaacggctgcgatagcaattcgcaactctaatcacttcggtactgtaatgtattatactcgtatggcggcagaggcgggttgtgtcgcatttatgacatgcaatggcggaccggccatggctccctggggagggtatcgcgataaaattatcggaacaaatccatggtcactggccgcgccagctggtaatgctgccccattaatgttggatattgcaaatactggtgttgcgcgaggtaaaatatatctggcacgtaacagaggtgagaaaatccctgaaggttgggcattaaatagtgatggcgagccaacaacagaccccaccgaagccattaacggtattatcttacccatggcggcccataagggttacgctattggcgtcatgatggatattttcgctggtgtactgagtggtagtcagttccttagctcagtgaatggcccctaccattacgataaaaagagtggggttgggcatttcatctcggtttataatatcgaaacctttatgccactcgagcagtacaacgcgcgtattgaagaatttttacatcaactcaaacaacccccggtggctgcgggacatgaaggcattttttatccaggagagcttgaagcgagaaatgatacgcgtaatcgcgagtctggtttatctcttgcaaatggtacgctcctcgacttacaacgaatcgccaaagagtgcaggcttgagcatctgttgccagagtttacagtcgaaaattcggcccactaa

SEQ ID NO: 193128 - DNA, 819 bp, Klebsiella oxytoca
atgattgagtttggtgcacatcttggttatcaatttaatgaagtgccatttaaagatagatttgagcttgcccatttacatggttataaaaatgtcgaatttcctaatccctatattatagagaaagaagagctcgctgacctacttaagatgtattccttgaacctggttcagttcgcaactccacaggggaaagaaggggagaaggggtttgcggctatccccggacggagtgttgagtttcgcgagagtcttgataaagccatagattatgcgaaatttcttgactgtaagatggttcatccaatgtcgggttgcgagagtatatcatgccgaggcgattgggatacttaccttaaaaatatacagctatgtgccgaaatttttacggacaacaaccttgttgtcctgcttgaagtcatgagcctgcctacaattaaaggctattttttgcatagttatgaactttactctgctttgatgagcaaaattcctgatggtagcattggtcttttattcgatacatggcatgcgaaagttatttatgatgatgtaatgcatccgttggttaaattttataacagcattaaacatattcatatttctgattatccaggaagacacgaacccggaaccggaaatcttgattttgatagtatattccagtttttgaatgacaataactatgccggcgttgtggggtgcgaatatgaacctttaacttcgactgaggcaagtatcgaatttattaaacgagttaagcataagtttttgggacgtaaagaggaaagtattttgggtggcgttataaacccataa

SEQ ID NO: 193129 - DNA, 639 bp, Klebsiella oxytoca
atggatgaggtacaacttcgtagagatctggtccattatgcgagatctctttttgaacgtgggtatagtagtggaggagcaggaaacatcagcttgagattacctgatggtaacatccttgcgacaccgaccaattcgagctttggggaactggaaccagacgcccttagtaaggtatctatttcaggtgatttattatcaggggagaaagcctcaaaagagattcaatttcatctcgctatttaccgaaagcgcccacagtgtggtggtattgttcacttacattccccttggttaaccgcgctgtcttgtctacccggaattgatattaacaatgctctaccaccaattacgccgtattatgtaatgcgagtaggtaagcttcccgttgttcgctatattcgtcccggctctccattaatagctgaagaagtggaaaaacttgccgttgagcataattcatttcttctggcaaatcatggtcctatcatctcaggtaagaatatacgggaagctgtttttaatgctgaggagttagaagagactgcgagactttattttatgctaaaaccttttgggatgaatttgttaacaaaagagaatcttgaggaattagaacaaactttcagtatgaaatga

SEQ ID NO: 193130 - DNA, 1260 bp, Klebsiella oxytoca
atgaccaagctaggtgtcatcgctgatgacttcactggagccacagatatagccagctttatggcaaatgcaggctggaaggtggttctctttaacggtgtaccggatgaagcctacgatgatgacagtcacgatgccattgtcattgctttaaaaagtcgctccattccggcaagcgaagccattacccagtctttggccgcttctgagtggtttaaagcgcatggttgcgaacggcagttctttaaatattgttcaactttcgattcgacggattcgggcaatatcggtccagtgacggatgcattaatggcgagtcttaatacgtcgatgactattttgtgtccggcagtaccggataatggtcgtactattgtgcatggtcatttatttgtaaaaggacaacttctgaatgagtgcggtatgcagcatcatccagtcactcctatgaataatgcttgcctgaaggttttaatggaggcacagtccaatggtatttgtggtttgatatctcttgatgatgtgcaaaattacaaggaaacgttacctgaaatattgcattctttgcgttcagaaaaagtaaactatgttattttcgatgtgctaaataatgatgatttgctaacagcggctcgtataacaagtgatttcccattcgtgacaggtggagcggggcttggatgggcaatcgctaaacttgatactgaaagccgggaagaatgggataatcagataaatattgaatcggcgggttacagcgttattctttccggtagctgttcttctatgactaaccagcaggtcgatttttataagcaacgagcttcatcattagcgcttgaggtggagaaaatcattcaacaagatgattatcttcaggaggtggctgagtgggttattaaccattcaggaaatgcattagcgcctttagtttatgcaactcagccttcttatataactgaagctattcagaagcaatatggttctgaatatgtgagtgaaagaattgaacggtttttttcagatcttgcgcgatgcctgagcaatagaggatttaataaatttattgttgcaggaggcgaaacttccggtgcggtgatacaaggactgaatgttcgtggcatgattataggtcatgatgtcgccccaggtgtcccctggacccaggttcttgatcaacagaaatgggtaatactgaaatcaggtaattttggcagttccgactttttcctcaaagcacaggagtcatttcatggatga

SEQ ID NO: 193131 - DNA, 672 bp, Klebsiella oxytoca
atgaatcaaagaattgtattaattcatgccacaccattagctatagcgcctattaatgaagcattcagcactcaatggccagaaatgaaaatcaataatcttctcgacgatgctctttctattgatcgtgctaaagccccggaattaactcagcaattaaattcccgaattaatgcccttgtagattatgctgtaagtatagatgcaacggcagtattattcacctgctcggcctttggcagtgctattaatagcagcgccgcaaaacatactttaccgatcctgaagcccaatgaggccatgtttgaagccgcattgaaattggggggaaacattgtgatgctggcaactttcgccccagcggtagcaggaatggaggaggaattttatgagatggcgaaaacatactcatcaaacgctaagcttatcagctatgttgtgtcgggtgcccgtgaggcactcaatgcaggtaatactaaagaacataatatgctgattgttgctgcagcccagcaacataaaaacgccgatgcaattattcttgctcacttttcaatggaaatagcctactcgcaggtcagtgcctcagtaaaatgcaaagttttaagcagtccccaaacagccgtagaaaaactaaaacgcgttcttgccaatcagcatcctgcaggttaa

SEQ ID NO: 193132 - DNA, 1203 bp, Klebsiella oxytoca
gtgacgcaatcatacaacagttactggcagcgtaatctacttgtctgttttataggctctttctcaactgttttcgccatgaccctgatgcttccatttttgccactttatgttgaagaacttggcgttcaagggcatgcagccatcgtccagtggtccggtgtggccttcagcgccacgtttattaccgccggtctgattgctccagtatgggggaaacttggcgatcgttttggccgcaaatcgatgttagtaagagccagtctgggaatggccgtgaccgtttcgctgatggggctggtcacgaatatctggcagctcgtcggtttgagattgctggttggccttgctggcggttactcctcaggagcaatgatccttattgccgttcaggccccccgggaacgtgctgcctgggcattggggattgtttcttcaggtgtcatggctggaaaccttgtcgggcctctcgcaggaggatggttgcctaatctgatagggatccgtgcaacgtttcttttcgccggggcgctgattttcctggcctttgtgatgactaccactattatccgtgaagacgtgcagccaacccaaaacgccaataaaaaaggccgaattgtctggtctcagttaccaggtcgttccgtcattatctgtatgctttgtaccggaatgctgctgatgttcgccaatatgtcaattgaacccattattaccgtttatgttcgtacgcttgtcagcgaaccttctcaggttacgaagatggcgggctatgtcatggcggcggcggctctgggaagcattatttcggcatcctggctgggcaaacttgccgacagggtcggccacttgcgtattatgacattagcgctatccgttgctggtttactccttattcctcaggccttcgtcacttctggctggcaacttattttgctccgcttcgttatgggtctggcactgggcgggctcctgccgtgtattgccgctgttatccgacaccgggttccggaaggtatggttggcagcatcctcggttattcagttgccgcgcagtttgcaggccaattcgctgggccgcttattggtggtttcgtcggtggtcatatcggaatgcgcgccgtgtttctggcaaccagtttaatcctgctggctggcgccgcctggaacctaaaaatacatcgccagtcagtgactcactga

SEQ ID NO: 193133 - DNA, 606 bp, Klebsiella oxytoca
atgacaactcaactcaataacattagtaaaaacagcgccctgttggtaatggactttcaggaaattatccttaacaactatctgtcgaaagagagcgctgaaggcgttcttcgcaatacagcatcactcatatccggtgcacgtgcagttggcgtaccggttatttatattagcgtcggattccgcaaggggtaccctgaggtcagcaaaaacaataccgttttctcaacggttaaagaatatgggatttttattaacggtagtgacggtgccgcgattcatactgatgtcgctccaactgatgatgaaccggtcattattaaacacagagttggagcatttacttttactgacctggagatggttcttcgctcacaaggcattgaaacgctgattcttaccggcatcaccacaagcggtgtggtgctttccacaattagacaggcttttgatctcgattaccgtctggtggttgccaaagattgctgcgctgacccagatgatgacagccatctgcttttgctagataaaatattcacccagcacgcgtgtgttgtactttcatccgagatcaaaaaagcctggatggaagctcaatcaaaataa

SEQ ID NO: 193134 - DNA, 1158 bp, Klebsiella oxytoca
atgaagtggtttgtttttatgttcgttgccatcgcagcgacgctgatggtcacccctgaggccaatagcggatcgtttgatccggtaaccggcgcttatactacggatccgataaccgtcacgctgacgccaaggaccgttacggccagcgcgtcggtaatcgcaaatggcgaaaaagtttactgggccaccagtacctggacccaacaaggaggctcgttttactggggaccgcacacctacaccatggggagtgccgctatcgccacaacagcagccaccgccattaatgccagcggagcctgtactgcaaccgccagcggtacatctcttaccataaacggctgtttctcctttatggaaatgtactcgatctacatgggcaaaagcgcctcttgtaaatcctttcttagtgcagagagcaatataagttggttaacaaattttggcgagtttgttgaacttacttttggccctgctccaatacgcactgcgcggttgaacaggacaactatgacagatgtcaatacgacttctattacctatccaggtcaaaccgtcttaccacctcaaaactgggctacctacgatacagctctgaaggcgacaatgtctgccaaaacgccaccttatacctatcttttttgcagcgtatcgcaaggtgctatcacttcactgaccaatggaatttcattttccacttcttttacgatggtgcctgcggccagtaaacccgcctatgccccgacgattagttactcgccggcgcttcctataaccaatactattaccgttaatattcgcaacattgctgccatggaaattctccccagcacggtattcaacaccggaactatctccgcctggcgcacaacctatatggaacaaccgcttaccgtaaccgggcagggcaatataacccgcaattttggcgcatcgcagaactttaacgttcttgaatcctggacctgcgcgacaacagggcaaatcgattttcgaataatgcgcgacaataccaacgccaacgtctgttcgggggcgacctatacccaccccgtgcagacgccacagtcgttgacggcgcagtggaaagcgcaaagctcgaacgcctcaggcgcctggagcgccagggcaacggtcacctttacgctgccctag

SEQ ID NO: 193135 - DNA, 123 bp, Klebsiella oxytoca
atgatgaaggccgcgtggcgcctcgtcgtctggtggttgaataccctgcctgagcgctttccttgcgataaaaggctgctgcgagtagaatatcgccgcttaacgtccgccaaagtgttttaa

SEQ ID NO: 193136 - DNA, 216 bp, Klebsiella oxytoca
atgagtgcaattgaatatcgcgaaaaaaataacaacctgcgtgaaggcatggtgtattctcagacatccttgcatcgcataaaaaaacctgaagaaaactccctgtataaaacagaggcgattttcttcaggttttgcccgcacggcggtaacaatcccattcatttactgcgggtggattatttggcaaaaaaaaacctgacatcacccggttaa

SEQ ID NO: 193137 - DNA, 3762 bp, Klebsiella oxytoca
atgcgcgtcaccgcaactcatctagtccaatggtcagacaagcgtgaagcacaaggaatgcttccgatcctggtaaggcggcttatatctgttacatcacgtattacagcaattaccatgccaggtggtgattcggtgaatgttcctggctgggatggtgttgtcgatgttgcgcaaggaaatccctgggttccagatgggctcagctactgggagctaggcacctcaaaagatccggcatctaaagccaacagcgattttgagaaacgtctggaacagatttcagctgctcaaaaagcacaagcaacctttgtttttgtcactcctcgtcgctggccaggcaaaagtacttggcaggaacaggcaaggaaaaaaaatgcctgggcggatgtactagtttgggatgctgacgatctggaagcatggctggaaacctctccagcgaccagtttgtggctaggcatgcaacttgatattgctggtcatggcattgaagcagtagaaaactactgggagcactggaaaaatcaatcctgccccgcaattactgcacctgcgctatttcatggtagagagcagtcaaagcttacgctacaaaacaatattaatcagcatgacccattgataactgtaatggctgacagtcagtccgaagcagttgctttcgtttgcgcattgttgattgaagaaggccatttcttacgtgctgcctgtataacttcagaacaaggatggcagttcattgatgctaatcccggcattgaattggtggtcattaccaataaccagttgagcaagcgacgagccccacgcgaaggtatgagcttaatagtaccgatggcatttggagaccaggccttcaatctcatgggaattgggtgccaagcaatagatcagaaaatagtggaacttagacgtccgcaacctgaagagtttgaaaaatccctttgcgagcttgggatcgcatcctctgatgccgcacggtatacccactcactgggaaggtcatggacggtttttcgtcgatggcatgcgcaaaatcctgtgttcaaaaaaccagattggattgaaggtgccgacgccaaaaatttgttgctacttaccctcgtgggtgcctggaatagcgactccgaaggggacagggcttgtgttgagcagattgccaaccgcacctacgaagacattgaaaatgagctattaagtttagctgcgcttgatgatgcaccagtcgtaaaaataggttctctctggaaagcaaaagcgccaatggagctattacatctaatggcccccaaactaacgaacaccattctggcaagattctttcaggtagctcgagctgtattcgaacaaccggatcctgtgctggaactggaagaggacaaacgatggatggcctcaatctatggcaaagttcgcgaacaatccggtgttgttttggaggctatggcggaatcaattgccaaactcggctatttttcagacaattttcagcatgttgttatcggcaattctgtacgaggctttattactcaactcctggaagatgccaatgaagaacgttggctctccgtttcatcctttcttcgagcgctagcagaagcggctcctgatgagtttctgaacgctgttcaaaacagtttgcatagccctgataaaccagtcactcgcctgattacggaaacaacatcatcagggatatcaggccgctgctggcatgccaacctactttgggctttggaattgctggcatggtatcccgcccgactcggacgagttgcgaatatccttgcagaactatcaaatatagaaataaaggggaattggggtaatacgccatttaataccctggtttccttttttcgctcttggtatccacaaacagccgcgtccgtcgatataagactccgagcactcaggaatgtcgtcgataaatatcccgaagtagcctggaaacttttgatggccctactacccaaccaacttgatatggtttcacccaatgcaaaacctcgctggcgtgacgatgatgcgggtactaacgagggtatcacctatggtgagattcaacgattcatactacctgttgcagatttattgttaaagaaagctcaggataatgcccattatatcgctgatcttgtcccgaaaataaatgatatggataccactttcaaagaaaagataatcgaactggtagataaagctacaactttacccgatgagcagcgagaaacagttcgcactgccgtcagacaatttctgaactgggaaaattcttttaaccaagatggtgataaacgcgatcgatattcagctgatgcgttgagaccattttttgacagactagctgcggatgatctggtcgtcaggcattcatggattttctccaatggatgggttgaactcccagacgggtatgaagaagatcatgaaaaagcgaacaagacaagaaatgcattgcgcaccctcgcccttcgagaaatcttccaagcactgggttggtctggtattcatagattagccaaacgttgtggagatccgcgacttgttggctgggagcttattaaagaaccattcgaacgtgaagagatggcggaatggctgtgtcaatggtatctggaggcatcacagggttcgtcgttatatgattcactgaccagcggtgtacttcatgcgctacctcaagcagaactccttgatttcctcgatacatgcttatctcaactcgagcaaaaatccgcctcttccgaaaagatggctggtttcatggtaaatgctccgcaaggaatgaacttgtggcaacttattgaaaatcaatatcaaatgcttctcgatcatttctggttgaatgttcgaccgtcttatttccagtcgaataaggagcaattgctcttttgcatcgaaaaactacttgccgcaggaaggccgcgaacagctataaatgctatgggagatcgttctagtgacttaccaggggagtcgctaatcctgattctaaaaggcatcgctgctggccaagaagaagatgtcgaattccctcgttcatggcacatttctcgtatattcaaggcgcttactgacgcaggaaacaatcctgcagaaatggtaagtctggagttcatttactatccactacttaaaagagacaaatacggtgcaccacatttgatggcagaaatattaggtaaaccagattcttttatggagctcatctgtctcgcctacaaacctcataatacagcacgtgaacctctacctgagcatctacaaacagctgctcggacagccagtagtctactccacgaagaacacggcgttcctggtacgaaccacgctggagaaataaatagcgagttgtttttctcgtggatcaacagagttcgagagttggcaaaagataatgatcgagaggccgtcacggacctgactataggagcttggctttctgactggcctttaaataaaaatgtggaatgttggccacacccaatcattgccgatctattggatcaggatgactgcaaagacattaggcgaggtttcaaaaacggagttcataacactcgtggtgtcactacccgtatgccatatgacggcggaacgcaagagcgacaaatttccataaaattcagatatttagctaaccactggaagaatactaaacctaacgttgccatcatgatcgaagctcttgcaaaagcttacgagtctgaagcgaagatgcacgatgaagatggtttatggaatcaagaatcatga

SEQ ID NO: 193138 - DNA, 936 bp, Klebsiella oxytoca
gtggacatattacagcatatttcagacttactattaaccaagaaaagtgaaatcatttctttttcattgacggcaccttatcgctataaaatatatagaattgcaaaaagaaactcagacaagaagagaactattgcacatccgtcgaaagagctaaaatttatacaacgtgcaattactgagtatttatccgataaattacccgttcatgaatgcgcatttgcatataaaaagggtagtagcattaagaccaatgctcaaattcatcttcatactaaatacttattgaagatggattttgagaattttttccctagcataacaccacgtttatttttctcaaagttacgacttgcaaatattgatttaactgcagatgataaagtaatacttgagaatatattattcttcaaatccaagagaaatagtaatttaagattaagcattggagcaccaagctcacctttaatatcaaattttgtgatgtacttttgggatattgaggttcaaaaaatatgctctaaaattggcgttaactatactcgttatgctgatgacttaaccttttcaacaaataataaagatgttttgtttgatatacctgacatgcttgaaaacatactaccaaaatattctttaggtaagattagaatcaatcatgagaaaacagtattttcttcaaaagggcataaccgtcacgttacgggtataactctaacaaacgataataaattatccataggtagagaaaggaaaagaaaaatctctgctatgatccatcactttataaatgggaagttacctgctgacgaatacaataaattgattgggctacttgcattcgctaaaaacatagagccatcgttttataaaagcatggttattaaatatggacctgataatattcacaaattacaaaaacaaaaagacaaataa

SEQ ID NO: 193139 - DNA, 963 bp, Klebsiella oxytoca
atgtttgaagaaactattaaaaaacaatttgaattgttaaacataagtaacttcaatgttgatatatctcatcgtctccttttcgtatgtggtggcaaagtcgatgtacgtgcaccaattccacccagttttagggatagactacttacttacacagcaaaacatgcccctgaacttcacgaacatttcattctagctgagacattcaaggattattttaaagagaatgcctatccggaccttctagtgtttgaagatgatattgccagtatttcatctcttattatcatttttttagaaagtccaggatcattagttgagctaggtatattttgcaacaaatcagaactatttaaaaaaatactgatcgttgcttcagaggaagaagtatccggtgaggactcattcatttatttaggcccacttgagtatattaagaagaaagtttcatcctctgttgtaatctatccttggccggatcctgaagttttaaaatacgatgatgattttcttgatgatttatgtgtaaatataaaagaaaaactttcatcaatcccaaaaacagaacaattcagtaaggataattctgggcatatagcacttctaattactgaaattatatctctttgcttcccaatacaacttagtgaaatagaattagctctaaattcattaggtattaatgtttcaacaaaaattattaacagatcaatttatttacttcagaaagttggttttatagacgttttatcatatagctcaaacaaatattattttccattaaaagagcgcaaatgggtaaaatttggtaaaactaaagaaaataaactcatagataatccacaattaacaatgaagtttagacaatcttttgtaacattaaccgatccattatcaaaacgaagaattacagcgctacgtcaaataatagcaaaaaaagaaatggctgaggagataaaatag

SEQ ID NO: 193140 - DNA, 252 bp, Klebsiella oxytoca
atgaaaaaaacgagcaatgtagctttgctcgttttttactctttactagaggaggcgctagaaagttttctaccgatcctagagacttctaggatcggtagaaaactttctagcgcaaccctaaaagtactcaataagttagtgtctggcgaaacgctcgacaaggctataaatcaaagcctaacgctaaagagtgatgttattatggttgaggagtgcatttttttcaaccgcttagatagtatattctaa

SEQ ID NO: 193141 - DNA, 846 bp, Klebsiella oxytoca
atgagttttaaattacctgattttctcaactggtcatcactggatgccttgcggcagaagatgaatgcgccgttaacaaccaatttttcattggtgtccatacagtcagatggctcttttgctgaaaaattgctttcaggtggtatcgaaatcaacctcgatgaagttaaggctcataatgatggaacattgatctgtaatggtaaacgcgtattgcttcatatacgggacatttcatccattgcaggagaggtccggatgccaaaatatcatttggctaattgtcgggttctcgaaaaaatgcgtaggaattctcggtttgatcggtatgttgtcgcaaacagagatacgggggagtttcaggtcaacatcataggtaatagcaaagaaaaccaaaccgtaagattaaatatttgccagaattgtcttgacaggattcgctggcatgggtttagcctgcaaaacatgtctggcggtgaacgttggagtagagtatttaatttttcgctaactgaatttttcaaagagtatcctcgtgacctgatcggcgcaaaacccttgcacacgtcaatgaccgcaccacttaacgactaccctaaaaactgggctgagttatcgaaaagcatcaggcaaaggcgcgggtacctgtgtgaatcctgcaaggagtctttcagcccgaatgattctcgatttgttcatgttcaccatcgcaatggtctgaagaatgacaatagaagctcaaatctggctgtgctttgtattgcctgccatgcacagcaacctgagcatgggcatcttaaagagcatcctgattacaaactatttatgacaaattacaagtgctga

SEQ ID NO: 193142 - DNA, 681 bp, Klebsiella oxytoca
atgaatttagaacaaagtaatcaatcttactggatacctcttgcggacctgatgacgggcttaatgatggtatttatgctgctaactgccgcatttatgctccgcgtagagcagacgacgacgctggtagtaaaagagtatgaagtcacgaagcgtgatatgcagttggccctccagaaagaatttgcgaaagacctgaagcaatggaacgccgaaattctgggggatatgactatccgctttaacgatccttccgttcttttcgccactggctcgtcggaattacgtcctcgtttcagagaagtgctcggtgagtttttcccgcgttatatcgctctgttgacatcagataaatacagaagcgcagtcaaagaaatacgtatagaagggcataccagtgctttctggagcggcgctgaaaatgaaaaagaggcttacttcaaaaatatggaactctcccaggcaagaacccgcagcacactcgaatatctgatgtcattatcaaaagtgcaaggtaatgaaaaatggctgattcagcatgttactgcgaatggactgtcatcctcccatcctctctctcatgagtcatcgcaagcggcaaaccagcgcgttgagttccgtattgtcactaacgccagcgagaagatggatttgatcgcagggaaattaactaaaaaatga

SEQ ID NO: 193143 - DNA, 1275 bp, Klebsiella oxytoca
atgccttgcatgtcatacgccgcagcatctgtaacattcagcactgttacatccgatcccattaccaacggcttcgtattagttaaccttgccctggcaatatttttcgccttcatacgcttcgacaggttcgcagttgttcatggccctgaaatactcacgaccgttggcatcctcggttgtttcgcgggaattgcaacttcgctactgcactttgattcgaccaacgtagcagaaagcgttccacatttacttgaaggcgttaagacagcattcctcgcttcattaagtggtgttttcggttcactagtgatcagagcaagacactatttccagaataagcccatacctcaaacttctggtactcctaaagcagcaagtctggatgatgtcgttgcggccactcatgcacttcagcaaagtctcgccggcaacgaagacagcagcctcctgacacagcttaaattaatgcgccaggaacaggcggacgaattacgtgccttacgcagctcctttgatacattttctcagaaaatggcagaggatggctccaaagcacttattaatgcactgaaagacgtcatcaatgattttaattcgcaaattaacgagcagtttggcgaaaatttcaaacatctgaacgcaagtgtggaaaagcttgtcatctggcagcagcagtataaggacgaactggatacgttgcaggctgtacaaaaatcctcagccgaggatctcagagaagcctccttgggccttgcttcattcatcggacaggcatccagtttcgcccagaccgcaagcgtgctggaaacaacgcttgaacatctggttcagcagcatcaggacatcgatcagtctcagcgttccatgagtgaagttctggcgcagatgaaagaggtcactcctcagttctcacgcaaaattgatgaaatgatggcatcaatgtccctgggcgtgacaaaactgcaggacaacgtcggtgatatcatcatagattttggtacccaagcacaatctttctcctctgacattaaacgttttttgactgagacacttagccagtctcagtcggaagtcagttcaggactcactcagtccatggaaaagatccatcagagtgttgtcgcgctggatactggactgcaggaggagctgacaaaaagcctcgaaaccctgggccgacagcttgcttctctttccgagaaatttgtcgctgattatacccctctcaccgagcgccttagagaggttgtgcggatcgcttctgcgacgtga

SEQ ID NO: 193144 - DNA, 954 bp, Klebsiella oxytoca
atggataaaacgaaaattgccgtcatcgccgttggcggcaacgcgctgatccggcaccccggagagaacgcgcttgagcagcagtatgaagcggtgaaagccactgcggaaaacgtggttgacctgattgccgcaggctggcgcgtggtgttgacgcacggcaatggcccacaggttggatttatcctgcgccgtagcgaaatcgccaaaaatgccgttcccggcgtgccgctggagtatgcggtcggcgatacccagggcgccattggctttatgtttcagaacgccctcaacaacgccctgaccgcccgcggaattgacagcacgcccgttgtcgcgctggtgacgcagacgctgattgatccccatgatcccgccttcgatcgtcccgataagcctatcggcgactacatggcgcaggaggtagcggaaacgctggcaggtgctcagggctgggacatcgtcgaggattcaggccgcggctggcgccgcgtcgtcgcgtcgcccgcaccgaaagaggtcattgaaacaccgattattcgcaccctgctcgaacgaaatgttctggtgattgcctgcggcggcggcggaattcctgtttggcgcgatgcgtcaggcaagcttatcgccgctcaggcagtcatcgataaggaccgggcttcggcgttactggcctgcgaattgcaggcggatatgctgctcatcccaaccggcgtcgagcaggtggccatcaactttggcacccctgagcagcgctggctcgacagcttgacgctaacagaagcagagtcgctactggagagcggtcagttcggcgcgggaagtatggcgccaaaagtcgaagccatgctgacttacctcaaaggcaacccggcaggcgtcggactaataaccagcccggaggcgattggccgcgccattagcggcaacggcggaacccgatttatcggttaa

SEQ ID NO: 193145 - DNA, 1548 bp, Klebsiella oxytoca
atgactctgcattaccaatgtttccccaacctgtataaagactctgtttcgctaatgcaggtttccgcaaaacttaatgccatggagggggttgaacaagcttccgtcgccatggcgacggcggccaatatcgaacgcatgcgcgatgcaggaatgcccgttgagcttgaagcccgccctaacgatctactcattgcgctgttggccgatgatgagacagcaaaacgggcgctggcgctggcggatgagctgctgagcccacccacctcagtggaaaacagtgaaggagcggtacgccgcccggcggccagtatcgctgaaggcgtagaagccgctactcaggcaaatctggcgctaatatcggttcccggcagctacgccgccgcggaggcgctgaaagcgctctctgcgggcctgcacgtgatgctattcagcgacaacgtcccggaataccaggaagcagcgattaaacagtttgccagcgaacgtcatctgctggtgatggggccggactgcggtaccgccatcatcaatgggatgccattaggatttgccaacgtggtgcgccggggggcgattggcctcgtcgcggcttccggcaccggtttacaggaagtgagctgccgcattcaccagctcggcgaaggcatttcgcaagccatcggtaccggcggtcgcgatctgcatgaagagatcggcggcctgagcatgctacaggggatcgctatgctggcggacgatccggagacaaaacttattgcgctggtctctaaaccgccatcaccggccattatggataaggtgctggaagctgcttgccaatgcggcaaacctgttatcgctcattttctcggcgcaagcgatgaagcgttactggcttacggcattattccggcccacagtctgcagcacgctgcggatattgcggtcgccacgctgagggaagcccccgttgccagcccgacgctatctgcagttttacaacaacgggcaatgcaatctattagcgagatgagtgcagaacagaccgatatccgcggcgtatttgctggcggaaccttctgctatgaggcccagctcgcgctccaggcggcaggattagcctgtgaatccaatgctccaatagcgggcgcacaaacattacgggacaacaaacgcggccacgggcacagcctggtggatatgggagatgatgaattcacccagggacgtccacacccgatgatcgatcctgcgctgcgaaacgcgcgtctgttgtcggaagcgctggacccgcgcaccgccgtcctgctgttcgatatcgtgctgggctatggcgccagcatcgaaccgtgcagcgccctgcttcccgtcatcgaagaaattcagcgtattgaagccgccgagcagcgtcatatcgtcttgcttgcccacgtctgcggtacagatgccgacccgcaggacagagcgcagcagatagcgctgctgcaaaacgccggcgtactggtcgccgacagcaatattgaggccgctcgcctggcggcatttatcgcgcaacaacggacataa

SEQ ID NO: 193146 - DNA, 777 bp, Klebsiella oxytoca
atgacgctccatgcgcttaaacattgctccaggctcgctttcgggcaggtggggcgcgtgcattctgtttttgctcgcgcctgtaatctggcgatggcgaacggtgaactttgggtattgcaaacgcgcgggatgccgctggcgcccaacggtattattgtcgacgttgatgatttgcggcactgttttcgcgccggtatgagcgtggcctgtttgcttcacgggggggatgtggtgatgtctgtttcaaaacccgtctccacgcagcttgtccctgaaggagatgaggccagttttcgctctttcgccagcgcgttgtcggctttcctcgtagagcagccatacagtggtttcaggctggcactgcgacaagaacccgcgctgactgagatctatcaacgttttacgcactggctggcagggggggctgatgatgtggtggttctcctgcgttttttgattggccgcggagaggggttgacgccttccggcgatgatttcctggctggcgtcatgctggtggcggagaactggcgacatccccggttggatctgctgcgagaatctcttcctccactgttgtccgccactacggatattagccgggaaatgctggcgcacgcctgctgtggacgctatagccagcatttattatccctggtgacctcctccccggcagacttttatgcggttgcaaattacggacatacttcagggctggatatgcttgccggtatggcggccgtcagcggtagtcacctctcacggcttagctga

SEQ ID NO: 193147 - DNA, 537 bp, Klebsiella oxytoca
atggtcaggcaaaagtgtagcggtattaggcgcagctatttagagaaacgcgcggatatcgccattggcgcgcctaaccaggtggttcgtaacggcgaagttctttgtgcagaaatgcctgccgttgagtgggttttcgccattgcgcccgatcacccgctggctaccgtgcatcggccgctacaggcagaagatttacgccgctatcccgccatttgtatccaggatacctcagtgcagctggagccgaaggtcgcctggcagttacgcgggcaaaaggccctggtggccgccgattatcacagtaaaattgcgatgcatcgtcacggtctgggaatcggctttctcccacgccatttttgccagcgctacattgatgacggcagcctggttagcgtgccggtggacgtcagcaaacccgcgaccccgcttttcctggcctggcaaaatgagcctcctcgcccctgctgccactggtggctcactcagcttcagcgggcggatattcttcagggatttttaaccgatctcagctaa

SEQ ID NO: 193148 - DNA, 639 bp, Klebsiella oxytoca
atgcgctcggcgttctggcgtaaggagaagagcatgatgacaccacgtcaacgccggctgcagcgcgctggattagaaacagtggccgcagcgcctcgcaaaagctggttgggccggtttacgcccctgaatggtattcagtctgcctggattaaatcgctacttacaatatggggagagaacatgcgcgggggaacagctccccgcaatcccacaggccactcctgctggcgaggtttgaaaggggaccgctggtcagataaagcgctggagcgattgaccgcagcgatagaacaggcgagggaggagggatatcgaggccagcaagccttaaaccgagcacatgtgattttatggcctcagcctgtcatcggcctgatagattccgctattcatgatgatgatgctgaattcgtagaacgttgtgttctcgacgcatttgaagcgggggatccggtttatttggtaggagttagttattacaccacacgcaaaaaaatctctgacataacccgggaattacagctggtggccccgtggctaacagatggtgaagcccgcaaacgcgtgcgatggtgcttggaaatattcagagcaaaaacatttctgtcggtacgaaagggaattcatgctgattaa

SEQ ID NO: 193149 - DNA, 1032 bp, Klebsiella oxytoca
atgcgcgcattactaaatgttgatgttgcccggcacttgggaattgtgttgcttaaaccctgtagagagttgatgtctttattcagcggtgggcgcgtgctggtggagactctgccagaaaaaatgaaggctctcccaagcgggcgcattcctgacgccgggcaacctttacgagatgatcccgacattcgcccattctttatgaaagagcgggtagtgagggcagcaggtggtgtgaatagtctcgaatcctggttgcttaagagggtcaagcattgccagtggccacattccgattatcaccattcagagctggtaacattccgccattcaacaggggcaatcgtcgcatgctggcattgtgataacgagctgaagcaccagaccgatcaaatccttgatagcctggtcggtatcaataacgcggatctgataattgatgctgcccgtatcgcactgggatttgatgctgaacgttccctgtcacttgctgaattgtgctggtgggctgtcagcgttggaataggggacgaaatcacagaagagatggcgcgccgttctcttcggcttaaagaagaggttttccagtcagtctacaaagaaagcgaaatcttcccatcggtaccggccaccagcattctttccccgcttgtctctaaggttgccaggcatactgaactaccagccccgataaaaccagaagtgccagtggttgttgatcccgttgcaccagccactttattcaccagacctaagcggatccgctgggtatcagatggctttatttcctgggtaaagactcagccatgtatgtgctgcggtcaggcggccgacgatgcgcatcaccttatcggatgggggcagggcggcgttggtaccaaggcacacgatatttttacgatccccctttgccgcaagcatcaccggacgcttcatcacgatccagttgctttcgagcgtgagtacggcactcagccggaatttattattaaattgctggaccgggcctatgcgctcggcgttctggcgtaa

SEQ ID NO: 193150 - DNA, 204 bp, Klebsiella oxytoca
atgaagaaaagttggtttctctatgaacaactttcagagtctcaggctctggagctggcggaacgctaccggaaaaagaattgtccggttgagaaaagcctgtcgagcgactttgtctactgggaactccgtgtgctgttgccggaatccagcaagccaccgcgcgttaacagaacctatacacaaaaaatgtggagggactga

SEQ ID NO: 193151 - DNA, 393 bp, Klebsiella oxytoca
atgacgcaaacccccgaagtatcaaaatcccatcagactggtgctccttcatcgagcgccggtttaatttcgtcttcaaaactaacttttcgccagcaggaagtattcgatctgctggtgacctacatcaatcagcatggctacccaccgacgctatctgaactggccgatatgctcggcgttagctcgtctaatgctgttctgttgcatttgcgtgcgttagagaaaaaaaaatacataaaaatatctcgccgtgtctcccgcggaatttctatcgtcgggcgaaaggagcccatgctcgccgtgcagctgctgcaggaaatgatcgctgacgaacctggtgcgcgtgaaagagcgattgagtttttgcgactattcggtgagcagccatga

SEQ ID NO: 193152 - DNA, 258 bp, Klebsiella oxytoca
atggacagaaaacaagaaatgccgaacaacggctatgcgataatcagatgtgacgatggagtgattgttgcccgtctgacatcatttcctttgtgcgagcgtgctctgatgtatcgtcgtggcgatactatttcgttcatgcctctaaagccagatgagatcgtggggactctctcgctattttcacagatgattgaaaaatcgaggtccggtagtggttaccaggtccctcctggttctgttacactcccgacatag

SEQ ID NO: 193153 - DNA, 234 bp, Klebsiella oxytoca
atgaaagttgaaatcgcaatcgaccgcaaaaagccattgcctgacggtgcagttccggccttagaaaaggagctactgcggaggctgaaccagaattttaacagctgccgtttgatcattcgccgaactggcactgatggtttgagtttgtttggtgggatggatggggataaaaagcgggtggagcaaatccctcaggacacttgggaaagtactgacgactggttcttttga

SEQ ID NO: 193154 - DNA, 1086 bp, Klebsiella oxytoca
atgacatcagcagatatcccaattaaaacagagcgtctacacactgtagccccgtacattgggaagatgcgacccgaaatcgctggctgggccatcgagaccgtatccaagcctggtgatttggtgtatgacccattctgtgggtcaggtactgtactccttgaaggttggctcaaaggccggcacactattggtactgatctaaatccttacgcctgtctagtatcacgcgccaagctaaatccgtatgaacataacggtgttgaagcggttaataaacttctaaataaatattctgcttctgtagatgagataaaattaacgttcaatcttgaaacaattccttgttgggtaaaggatttttataaccccgaaacattaattgagttgttggcttgggttaaagttttaaaagcaaataacgatgaatttgcacttgcctgcctgctttccatagctcaccatcaacgtccgggctttctttcttatccatcaagccatactgtgccttatctcagaacaaaaaaattccctccgagtgagttcccagagctttacgaatacagagcagtacgtcctcgactcgaaaagaaaattttaagagtgtataactcactaccctcagtcgatccctcattgactcgaaacgtatatcagcaagatgcttcgacattgaatttagatcgcaaaatcgatgctataattaccagcccaccatatatggggcaacttgattatgctcgtgataatagattaagactttatctcatgggtattgaggaatggtctacccttaataaaaccatatcaccaagcgctactcgatttgtcgagcaatttagtatatgtctcaattcatggcgaaaaaatttacgtcacggcgggaaattggcaatttttgtcggaacaacaacaaacaccactaaaaaaagactcgacgatattgttgttgatttaatcaataataattggcctgactacgaattaactgacagaatatcaagcgagataccagaagccaggcgtgcaagaaaaaattgcaaaggaagtgttgctgaatctcttttgatatttgagtataaataa

SEQ ID NO: 193155 - DNA, 1044 bp, Klebsiella oxytoca
ttgaaatcagtggctatgtttaacaataaaggaggagtgggcaagactaccttgacttgcaatttagcctcttttatagctatgaactttaaaaaacgagtgctagtggttgattgcgatccacaatgtaactctactcaacttatcatgggtgtagagcaatcagcagaattatatatttctcaaaataataaaattagcactatcaaagatgttcttcaacctattgaagatggtgattccacaataaatacaaatttaacgttcctcaaatcaagtgaaaatagatttggcgttgatttgctacctggacatccttatttcgctataatcgaagacagacttggcacggcttggggacagcttagagctagagacaggcaaggttttagacaaacaaattggaatacactgctttgtaaccacctagaagataagtatgatttagttatgtttgatttaggacccagcttaggttctatcaatagatcggttttaatgggttgtcagcatttcttaacccctctcggttctgatgtatttagtataattggcgtaaaaaacatagcctcatggttaaataattggattgatgattataaccattcttggtctgcgctcgctcctgaagaaaaagaggatctgcagaacagattttctgtattagatgccccaagaattaaaaaaggtttcattggatatacagttcaactatacataaccaagtcatatggtaaagaacgaagagctacaaaggcttatgaagcaattattggcaatgtcgataatgaaattagaaattctttaaaagatttttattgcgacaatttactccaaacaccacaaaactctaaacttggagatattcaacatttatatagccttgttccattagcgcaaaaacaatcggttccaattcatgcgctcacaagcactgatggattagtaggttcacaattttcagcagtcagagaattttctaataagattaggccaattgctgaaaatttacttagaaatcttgggatgcaatttaagggttag

SEQ ID NO: 193156 - DNA, 870 bp, Klebsiella oxytoca
atgatacattggccagattccttaatagatgaactagctgcccgcagatgcgtaatatttctaggctctggagcatcagcacccgcaactaaacaagtcggtgaagagttagtgcgccctccaacttgggctggcttgcttaaaattcttttagataaatgcccgaatgatccccagggttccaagaataatgctgaaactttgctaagtaaagaaaattacttggattgcgctgagataattagaaaaacatgtttatcaaccgcagagtacaatagatgcattagccaaacattttccggatatgaagcaactgatattcataaagctgttgagatattagaccaaaaggttgtgattacaacaaactttgattgcttatatgaaaatcattgtagacaaggcgaaggaagggacggctatgctatattacgctactacgatggtggattaatagcacgtatgcgctccccaacaaggttgataattaaagcacacggttgcacaagtgaaccggagagaacaatactgaccaagtctgatttctttaatgcccgaagtgaccacaaaggtttttttgatgcattagaaagtatatttctaacgcatactattttatttatagggtatagtattaatgacccggaaatacaattaatcttagaaaacaacatcattacttatccaagctcaaatcctcattatgccacaatgcctaaaggttcgcatgcatccatactctctgcattcaagaacactaataacattgatattctagaatatgacagcgcgaataatcatgcccagttattggaatgtttaaacaacttatgttcccaggtagaggaaagaagatcactcatagcctaa

SEQ ID NO: 193157 - DNA, 213 bp, Klebsiella oxytoca
atggataagactaatccaacgtcatgcccacactgtggaggtgataacggattccacacgaaagaaattgtggatttcaaacagttttattcctgggatggttcatttcttgaggggcagcataccaatggcattcgcggcgggaaagcattctactgctgcgactgtggtcggaatattactccgcacatcattaagccggaggagaagtag

SEQ ID NO: 193158 - DNA, 396 bp, Klebsiella oxytoca
atgactgatatcaccgaactggcgcagctgcgtgctgagctttcaaatccggcaattggcagtaaagaccatctgcgaaaactcgcgttatcgctggtagaggcgctggagcttaaggaagagcagcgcgctaactggttccagatggcgcaaaaattaggggaagacttggatgcggctgaaaagcgcaacgccgagctggagcgcgaacatgagaatcttcgcccggtcggtgtgatgagtgagaaagcgtatcaccgccttgaaaacagagaatcacgctttattgcactctggccccgcccggagatctatttaccgcgcaagcgccccgaggatggagtaatcgtctatgcacgcacgacggttgccgctgccgccaaggaggctgattag

SEQ ID NO: 193159 - DNA, 984 bp, Klebsiella oxytoca
atggcccgcatcagaacagttaaacctgaattctggacagatgagaaggtggtggaatgttcaattccagcgcgtctcctgtttatcgggttgttcaacttcgccaacgatatgggatgccttgagcgttcgccaaaaaggttgaagatgcaaatcttccctgcggacgcgctcgattgcgaaccactaatacaggaactgattactcatggattactcactgagtattcagtgaatgatgtctgctatttgcagattaaaggtttccttaagcatcaaaaaataaacaggccttcggcctcaaaaatacctcttccgccagaattcactgagtctaaggcaggaaaggaagaaaagagagctcctaatcaaggagggctcagtgaggactcagtgaatcctcatggaggactcactgacggaaaaggaagggaagggaagggaaaaggatcaaaccccactctctatgcgcacaagggaaatgtttttcaggaacctcagtatctgcctggagtggatattcctatcgggaaattcgccatgcacgacctttggctaccgtcacaggactggccgcgactggctgctacctggggaatagcgcttcccgaaccggcatacctgccgacagagctggcagagttcaccgcgtactggaaatccgaggggaaagtgttcactcaggttcagtgggagcagaaatttgcccgcagcgtgataaatgccagagccaaatccaaaccacaaccagcaaccggaggtaacggcaatgcaggaattcaaccagttaacaccgcatcccgggcagttcaggagattcaggcagccagagaacgctgggagcagaaacacggacttactggcggcggatacggcatggaggctctggactgtcatgggggagattttttcgaaccgctggacccagaagaacggggcggcgccatcggatatgtggatagctcagatcggttcgatgactga

SEQ ID NO: 193160 - DNA, 315 bp, Klebsiella oxytoca
atgtctcgtagccctatacctgtcttctggtacgaaaatcccgctcactatgaagaattccaaaaaatcctttcagatgcttacgtccttccctttgactaccacgactggcgtatccgcaccgatagcatggtggagcgctacgaaaacagcggtatccaggctgtgaaggtggtagccagcacttacgatttcatcacctggtgccaggcccatggacgtgatatcagtaccaaaagctgcaatgattacgcggtctccgaatcgggcctccaaatcctgcgcgacagagagtttgattggggagacgagtaa

SEQ ID NO: 193161 - DNA, 2091 bp, Klebsiella oxytoca
atgaacaactatgcgtacctaattaaagccaaagcaaaggcgacagaagcaaaaagctatttttgctggttttctgcaaaatccgattctcgcgctgaacgtgaaatcctcaatattctcgaagacgcaggaatcaacgttggccgtggtgctgaccaccagctgccgatccgcactcactggtttatcgttgatgatttaccagaagaaagcgttctcgatgatacatggtgtgaccgctacgaactcagcggcgaggatggaatcacctggcagaaaataacccaacccccggttgaagaaaaatctcctgttgctgaaaatggtgcaataacaaattctgaagagatttattctaatgatgaaaatgctctattcagtcttgcagaaatgccgttccgcactcaattgctcgcgcagtatatggaacgtgaccgccatgtttaccatatcagcattccactgcgtgaccgcctgtcagctcttgaaatggataccgacaacaacgctattcaagatttgatactggcagcagaaaacgtaccagatattaaaaaatatgatatgccaggcatctggaaattcaccagcgcgttcaaaaaagtatttcctgaaggcaagcgctacgaactcggaaagaaagtccagtttgcaaagttatggttcgaaaccaaagccattgatcgcggcattctcgttaaagaatggactgcaggacatcaggttaccgaaattatccattcaggcgatactgccacgactgaacgctatacacgtgccataactcaaaatatggctaacctggctattgagatcgccattgctcaactttatccaaatgcagagcccgggaaaattacacgccctcaactcattggcgccaaggagcttgtggatcgcgaagagaatgttcacgcaaaagccatgaaagttttgggcaaaattaatgacatactcgactacgatgcccatagcatattcggcgttacccgagccattaaatggaatggcgaagaaagcgcttcagaactacgggcaatggtccgtaactggctcgcggctaatggcatttatgaaaacggcgaacgctcaaaaggctatccggagtgggaggaagatccacgtgctggccgtcactcaaacactacagatttaacccgggaggatgtcgacaggaaacttgctgctgaccgcggtgagtacgtcgaaggcatcagcgacccaaacgatccaaaatgggtacatgaagacctgacccaaaaaaggcagcctgaaattgccaaagttagtcccggcatgtactcagttgaaagcctgattgacccccccactccgaaaatcgccgacgaagaggccagcagtaatgtgcaggtggaagaaaatggcagtaatgaagtcgcggattctgatgaaatatcagagagcgaaaaggcaaatgagcacgctacgggcaacgctgagtctggtgtcgcgccagatgccgtaaaaattgaatccggtcatcataatattgaagaatctcgtgttgattatgttcacgtcatggtggatctggaaaccatgggaaaaaaatctgatgcccctatcgtctccattggcgccgtaatattcgatccggcaacagggattctcggcgaaaaattttacaaagtagtcagccttgaatctgcggtttcttggggcgctgagattgacccatcaacggttatatggtggatgaaacagtcgtcagaagcccgttcagaaattgccaacgataatgccattcaactggatgacgccctgctccagttcagcgatttcgttctcgaaaatattcccggaggtcgtaaaacggcacaaatctggggtaatggtgcaactttcgacaacaccattttacgctcttcatatgaactggcatgtattgactgcccgtgggactactggaatgaccgcgacgtcagaacgatggttgaacttggcaaagctattggcttcgatcctaaaacttctatcccattcgagggtgaacagcataacgcgctggcggatgctcaacaccaggcccggtacgtttctgcaatatggcaacgtttgattaaaaattga

SEQ ID NO: 193162 - DNA, 624 bp, Klebsiella oxytoca
gtggaaagcggctctttctggctgctgtttaaaggccagatgctgcggcgcacgctggtggcaatcaccgtgctaatcgccatgaatatttcgctctataccattacggtgtggatcccgacaattttcgtcaattcgggcatcgacgtgacgaagtcaatcttgatgaccgcgattattatgattggcgcgccggtgggaatatttatcgccgcgctgattatcgaccgttttccgcggcggttatttggctcatcgctgctgattattattgcggtgctcggctacttctattcgattcaaaccgcagagtgggccatcttaagctatggcctggtgatgatctttttcctgtatatgtacgtctgctttgcctcggcggtgtacgtgccggagctgtggccaacgcatctccggctgcgcggttcaggctttgtcaacgcggtagggcgaattgtcgccgtctttactccctacggcgtcgctgtcctgctgacccgctacggcgcgattacggtttttatggtgctcggggtgatgctggtactctgtgcgctgatcctgttctgctttggcatcgaaacgcgcaagatatcgctggaggagatttcaacgctggcctga

SEQ ID NO: 193163 - DNA, 1245 bp, Klebsiella oxytoca
atgtttaaaaaacaaaattatgacaaggaagtgagaaaaataacagagcggagtaatgggaaatgcatcataaaaaattgcactaaaaaaaacatatattcacacattatttccaaatcaatatccattgataagattgccaagaacaatcatttaactgttttttctcctggccggcatggggatgataaaataccaagattcattcctgctggtgttaatgacaacccagcatttaatggtttttgtaaagatcatgacaatatgtttgagttaattgataattcagaaatagagagttttttgggggtgtatttacaaatttacagaacaataagtagtgaggtttattatttaaggttagggggtatattgcatccggatattgatattgatgcagcctctgatttaattttaaaaagcacaagagatgagttgaaaaaaacgcaaagtcaaatagatgaaaaaaggctcataaaaataatagaagataacaagcaggaacttattaaggcaaacaatgagaaaaattacgagttaaagaaatcaatagaagccattgaagtaattcaagaacatttcttcaatgaaattaaaaaaaacaaagcaaaactagaaaattccaaattaaataaaaaaatattacaggtggtggaaattaaagaattgaattatcaaatttttgtttacttaacagactttcaaatacctatcgcaatcagcacattacatacatttccttgcaatggagatagtgaagataattcttattcgttttacattgtagtgccatacgaaaattcaaatgttattattggtgtaataggaggaacagctcaccctcaatttttcaacaaaataattgaagtggtcaattcatcttttagcgattctttttctgtattgaatttcgttgaaagcctagtgatatcatcacctgatgatagttttttctctccaacagtcatcgaggaaatgagcagtgaaaagcttctagttttcacagatgattgtatgtgccttaatgaattccagaacagttctaagtatctatcagagtatgatatgtccatctttgataatgtaaggcgccaacttattgataaagtatctactaatacagatagcgaaaccctcaagcttgccaggatcccaacaagggatgattacgataaaagaattataaaaacgaaagagaaaatattccatgaaaatatcatattaaaaaaaattaattccctctaa

SEQ ID NO: 193164 - DNA, 1098 bp, Klebsiella oxytoca
atggcaacaggactgacactcacaacggcaggcgccgccgaaattgaggccgcatatcaggccggcgaagtcgttcatattatggccgtcttgattggggatggcggaggggcgattttgccaaccgatcccgatgacctggcggcagtaacggccctttttggtcagtttggccgtgaaagttttgactctgattccagctatgaggggtttatcagcggtcagatcgtcatcaactgtcgggattatcctgataaaacgctcaaagaggtggggctggtcagtgctaaggggacgctcatcgcttacggcgcatacccggcgacctacctgccggcgcaatctgattctatcatcaaagaaatcatcctgactctggtgctgactctcacacacaccgccagcgtgcagctcgttatcgatccgacgcttgccaccataacccaggagtcaggcgataaacgttatcttcgccggtcgctgaatctgtcggatctgtcagatgcagaaaaggcgcgggataatcttgaactgggcgattcagccacgcgtgacgttggcaccacggcgggaacggtagcggcaggggatgattcacgcatcactggcgcactgcaaaaagagcaaaacctgtccgaactgagcaatccatcagaggcgctaaagtcgctggggctggacagcgaaggcgccggatacaaggctattgttgacgccattttttacgtcgggatcgtcatcttaggagaacaaagcccggcgactcgtttcccctggcagacatgggctgacttaagcgaaacctttgctggcagggttgtacggattggctctcaatacggtgcgatcggcggcagcaataacgtgaaaattgaggctgataacctgccaccgcactggcaccgctctggtgacaggtcacctggaacagcctgggatcctgatgccacacatggcacggataaccagaaaaacggtccgcttgcgctgactgagggaacctacactgatgcggcaggccagaaaacgtctacaaacaaagcgatagatgtgaccaacgagtatgtctcactgatcatgtggaagagaacagcataa

SEQ ID NO: 193165 - DNA, 2151 bp, Klebsiella oxytoca
atgaaaacaaatagttacttcagagctaactcccatcttctcaagcttttgggtgacgagttgattggagacgatcgcttagctgtatttgaactagtcaaaaatgcctatgatgcagacgccgaaagtgtggatgtagaactaaaccttagccaagatcatcccagcattatcgtctatgatcattttggtgttggtatgacaaaagatgatttcataaacaaatggatggaaatagggacaaaaagtaaacgagctgaaaacaggacaaaaacagttaaatttcaacgattgcctcttggagaaaaaggtgttggcagactcgctgtacacaaactaggaagaaagcttagaataaactctaaggcgctagatagtaacgaaatcgaagttaatattgactggtctaatttattggaagcagcacaatatattgaagatactgtagttgaaatcgatgagttagatgaacctgttttttttgataatacaaagactggtacccgaattgaaatcagtggtttgaataatgaggagtggagtagaggggacgttagaagtctaaaacgtatgctaactagtctggtatctccttttaaaacaaactctgattttaaagttaatttcagtgttcctggccttgagaaatatctagatggaatgcctgacgcagatgatattttaaattcagccatctggaaatatcaatttcagatcgataatgacggaagattttcctatcaaattaattttcagcctccaaaaaccttcaaaacattaaccgcacaagagaaaaaagaagcaaatacacaactccaacttcttgttccaacaaagcatgaaataattagtcgagatgacgatcttaaaaataatcttttacttaattcccgagatcttttaggaataggtcctattaagggggttttgtatgtctttttacaacagcaagatgttttaaatgctctggggaatgctcagttaatcaagaactatctgaaagaacagtcggggattcggatttatagagactcgattagagttttcaactatggtgaaccgtacgatgattggttaggtcttaatactggaagaattaatcgacctggtaaaaaaattcataacgggatgattattggttcaattgatcttgaccttgagtcaagtaatgaacttaaagaaaaaacaaacagagaaggtttcgatgataataaaaggtaccgtatctttaggtggataatatctagcataatcgaaaagtttcatattgagcatgctgatcagcgagattcaataacccaatttttaaaaggcaatcaaaataacaaaagattggtaacgaataggtttgaggaaaatataagtgatttaaagaaaacaatacaaaaacatggcctcgaaaaggagatgtctggaaaacttacacttattgaacaagattttctacaaatgagggaggttactatcaactccggtattgctggagtaaaccttgcggtaatctttcatgaagtagagagaggggttgatgagctaaatcaatcaattaaacggtcagaagattatgagttaattaaaaagagagctgagaacttgtctcaattactggaaggttttgctcctctccttagaagaaacgaccagaagttattttcaatgaaatcactcgttgaaagagttcacaatcttactaagcatagatttagttatcataatgtaatcttttcctgcccattacttacagatcctgagcaagattttaaaataaaagctccttttggtctagtacaagctgcattaaacaatattattgataacgcaatacattggactcgctttaaatacgaaagcatagaagataagacttacaaaccagcaattagaattcaagggcttccaaattttttctctgatggtcctgctttggtgatattagataatggtatcggatttaatatttctcctgaggaagcgattcaacctttcaaaacaacaagaccaagtggaatggggttagggctttattacgcagacaaagtcatggaagctttgaatggtaagttgattatctgcaaacccgaagatctcgaactttctgaatcatacgatggggcagtagtggttttaatttttcataaaggaaatgaatga

SEQ ID NO: 193166 - DNA, 1383 bp, Klebsiella oxytoca
atgatctcattacccggaattattataattgatgataatcaagaacaattagacaatattaatagggcatttatcaaaataggattaccctgcctgcccattttatatgaaaataatgctgaaaatgaaagtggaattagtcatgttgaacttaacaacattactccaagaattgtaatcactgacctaaacttgactgaagcaaccgcagttgaagttacgaacttagtaggcccaatattattacttatagaaaaaataaatatcaaagggccatacatattaattttctggtctaaaaacaaaagcctcgttgatgaggttattaaaaaaatcattgaaagaacttctaataaaaaaacattgcctttatgctggggactacttgacaaaactgaactcctcgataaccaagaagcgctgagaagtgaaattgaaagaattttaaatagtaactctttactaaattctctcttcaactgggagaatagaataggcaccgcagcgcaagaaactataaattcattatatgaactaacttttcctgatgatacagagaaagattacgcaggtgctcatatattaaaacttcaagaggttattgcattaatagcgaatgaatctttaggggcgaaaaatgcagacaaactcccctccttagcagtagaccaaggtttgttacctgtcctaagtgacaggctgcaaaaccttgaaatttctcacatagattggaaagaatcagtaccaaagattggtcaaaaagtttctgttaatgatgaaatgaaagctaagttaaatacattttaccatattgaaatgactgataaagaattcccaaaggaccacagaggtatatttataccaatctccaatgcatatataagcgatgaaaaaaacagagctaaaatgtgttcaaaacttggcgttagtgattttagagaaattctaaacactgaattcattgatctagataaagtatatgcacagggtaagcagaaactaatcgataatatcactatcggttttgttgaactatctgctgaatgtgatcatgcgcaaaaaaaatcaaaattgcatcgatacatcatttctgcattaattcctgataccttgcaagaatattgtatattcgctaaaagaaacactaaacacgatggaatttacagactacctccaatttttataaataaacaaagtcatattttaaagctatctttcaaatatcaaattggcacaatagataaattcctaattgacgagaaatcagtcaaccacaaatggtttggcgaccccacatttaggttaagagaacaaatattgtcagacatatcattcaaatgctctcagtattcgtcaagacctggaattgtaagtttttattaa

SEQ ID NO: 193167 - DNA, 2139 bp, Klebsiella oxytoca
atggccgattcattcgcatgggaatggaatgtaccacgtcaggctattgacccgaattcattcgggcaggaaatgacgcccgaaacgtccctgtcccgactgatagcgcgatatgcccgtgaagaagaagcgaaagccatccgggagtccgcaaaacagccatcccctctagttatgaaggccataggcgcaggggagcaggccgaatttctccagcagcagatcaagcgccttgcactaaaccgaacggacaaagacgacagggaggcgcgaaaggaactcgaccccctggcgcagcttcgcgtactgccgcattacatgcgggaacctttacaacagcatctggaatttttacgcagtaaggaaaagaaagctcgagatgtcggaagtactgcccgcccggcccgccgttttatccgggggaacctgacgcgtattttgcagcgtatcgagcaactcgacgcgcgatttttgacgcacgggtatcagctcattgtggcccgtgagcgtctggatgcgttgctgtatttaccgcagctcaacaagcgagaggtacagaccgccgccacgctgacagctggtgcgctcaaaggtgaatatgacaggctttgcaccgagtacggcgaggagatgacgctgaatgatgcattggctgtttaccagaaactggcgcacatggcgatcctgttgaatatcacgccgcccgcatggtctgcattgcaaatggacacaagacgccggacgcccccggatgtggagaagctccccggctcattcctgcggctgacttgcgcggaatggtggcggggacaactatggcgacagcggcggatctggcgcgaggagcagttacgtgcggcctgtctggtatcccgtaaaacgtattcatatatcagcaaagatgcgcttggggagttccgggagcagcgccgccggatgaaagcttttctcaagtcttacgagttggtaaatgacgacggtttcacaatcgatctagaggaagcttactactcaggaaacagcaacccgaagcaccgacgctttgagatgatggcgaatatgaaaggtctagagcttattgcagaggcgcgcggcgatgaggctgtcttcataaccgttaccgcaccctcacgataccatgcgaccacagccagcggtcaccccaacccgaagtgggacggctccaccatccgcgacagcagtaattatctggtcaacacgttctttgccgctgtacgtaaaaaacttaaccgcgatggccttcgctggtacgggatccgcgtggctgagcctcaccatgatggcactgtccattggcacatgatgatttttgctcacccggaagagcgagaaatcatcgagaatattgtccgtgatattgcgattcgtgatgatcgccacgaactgggcgatgacattatcccgcgctttaagagcgagcttatcaccgcagataaaggctctccgactggttatatcgccacctacattggtaaaaacctcgacggcggagcggtaaacggcaatgaccccaaaacaggcaagccgcgtgtagatgatgaaagtggccttgcgatggcggaaagcgtcgaacgggccataggctgggctggcttacatggagtacgacaatttcagtttttcggtattccctcccggcaggtatggcgcgagttgcgccgcctcgcgcttcagatggaacgcacacccgatggcccgcgccgtctgccagaaccagtgatggatgatgtactggttgccgcagatgctgggtgctttgcctcctacattatgaagcagggaggggtgcttatcccacgcaaggattacgtgatccgcaccgcctacgatctggcggacaagccgaatgactacggcgaaatcgccacgcagatttatggtatctggtcgccatcacttggtgatgaatccaggatttgtacgcaccctgataactggacattggtcaaaaaacaaccagttcaaaaagacggctccacagctcaggctgttgattttgaggttcatggcggcaacgccgccccttggactcgtggcaataactgtccccagtcctcaaaatatgcaggaaaaagagcaaggaattacacagggagatcggaaaagtgcgctcagtaa

SEQ ID NO: 193168 - DNA, 405 bp, Klebsiella oxytoca
atgactgattttaccgcgtttaatgaatggctttggtcatgcgatccacgcctcgccgtccgcgtacagcaatggcatgacacctggcaaaataaaatccttggtcagcatcagatacatgccacgcaaggtgtggaatttatcgttgataatcggtaccgcgttatttctgcagatgcagcacataacctgcctggtgggctggcgctctacagcctgcaggatcgccatgattcgtcaccgatcgcaatttaccagtccccgtccgtgttgttcagcgatctgattgctcatagcatccgccattctgtcccgatgtcgcttagtgaaatgactcgagaaactaaccgattgttagccgaatgctgccgtgcctgggcgtcagtgtcgggcgaggtgctgtaa

SEQ ID NO: 193169 - DNA, 243 bp, Klebsiella oxytoca
atggttaatgaaattcatgctgtggttactcaggttattgagtactggccgattaacgatttctggatggtggaagtggaggtgatggctgacgggcagtatttccgtactgatatttccgcatgcacagagctagaggcttgcgcaattcagcctggcgacacagtgctgataccggtcgtgagtttggtattgcgcgctgggctggttgcgcggcaatgccatgactgcgcatgcctgtaa

SEQ ID NO: 193170 - DNA, 207 bp, Klebsiella oxytoca
atggctatcaacaaaacccatacaggtacggtcataaccaaagacggaccgaagcgtaaaaagctgcatgaaaccgaaaaaatgtgggtggttggccctaacgagttttaccacaaagaaacgggtcgcaggcacttcgcagaaaacacccgccgcaggttacttctcgaatctattcgtccaatccagggggctaatcatggttaa

SEQ ID NO: 193171 - DNA, 183 bp, Klebsiella oxytoca
atgattaagtcaccgattcaatggtcaggtggtaaagcacgcatgatgccggaactgcttaagcacctgtcgaaagccaattgcctgattaaaccattcgttggcggcgactgttgcgtgggctgtggggtggtgatggggcaatccacctgcaacgcaatggcgaaagcgagggctttttga

SEQ ID NO: 193172 - DNA, 228 bp, Klebsiella oxytoca
atgcattcgcgtctctccattgtatgcaacgcaccgctacccgtctgtaacagggcgctggctgctcttaaatgctttgtccacggacagcacaatttctcccgtgtaaagccgcattcctatctcgtgatccgcatcggtcgtcgctggcgcctgcttagtaaaaacggcggccagcaatggcgactcatgacccacgaaacctacaaccaggaataccgaaaatga

SEQ ID NO: 193173 - DNA, 660 bp, Klebsiella oxytoca
atggcaatcttgaccgacaccaaagctcggcatatcaagcccggcgacaaagccctgcctcacggtggagtgattgggcttacacttaatcccacaagagcaaacaaaggccggggttattggatctttcgttacgttagccctgtgacacaaaaacggcgccaggccagtctcgggacttatccagaaatcagcatcgcggaggtaggaaaaatagcctcagcaatgcgtgagcagttggcaaaaaacatcgcccctcttgaagagaagagtatccgacaacaaaatgagaaacggaaagcatctatcccaacatttcagtcagccgcagaaacacttcaccctactctgcttccgggatggaaaaacattaagcatggaaaacagtggataaccacattacaaactcacgcttttcccattcttggagtcaaaacattagataccattaatgctgctgatattgctgaaattctctctcctatttggctctctcatccggcaacggcgaaaagagttaaacagcggatttataccgtgatggaatgggggctagcgcaaggttactgtaaaataaatcccgttgatgtggttgcccatttgctgccgcagcaaaacaaactgctaacacgagccaggcactttcctgctatgccatag

SEQ ID NO: 193174 - DNA, 615 bp, Klebsiella oxytoca
atgaaagaacacaaatttaaaggagaagacgatttttacgctcttcatccaaatggctacataccctttcttgagttggatgatggtaactgtctaactgaaggacctacgattattcaattttttgcagacctgaaacctgaggctgccctggcacctgcgaatggtaccctgacaagggcacaactccagcaaagcctccgttttctatcgagcgaaattcatcaggtttttcgcgcagtaatccatgctgataaatcagaccggtattttgaagcatcgacgcaaaaactggctcgtcactatgggtggatcgacaaccagcttgcctctaacccctatttacagggtgagagatttaccgtggcagatgcttatctttttgctctaaccggatgggctaatgcatcctggcttaccacctatatcgattccggtttttcggtagaaaatcttggtaacttgcgggcatggtaccagcgtatgagacaacgtcctgctgtacaaaaatccttggaggaagaaggacttaattattatttatattgtttatcacgaatcagtatgtacatacgttatccctcattttctaagtggaaggttacttacaattga

SEQ ID NO: 193175 - DNA, 381 bp, Klebsiella oxytoca
atgacagcagcccgctccgaaggactgggtattgtccctattggggggatccgatggacgccgtctgacatgattgagctattgcaactgcctgaccatacattcccggttgcgggagtggcaatgggctttgttgacaaaccctcccatatcaaacccaggttgcccgtcagcaccttccgccaccaggaaacatatcaccagggtgaattacgcggcactattcattcctacaatgaagaactggttcaacactggcaaaaagtaggtcgctctgatggaagcaactggagtgaaagtatcagcgaatattacgggcaagtctattatccccaggtattgcccgctttgttaaagcggggctttggtaaagataagtaa

SEQ ID NO: 193176 - DNA, 759 bp, Klebsiella oxytoca
atgtcgctgtcccggttgaatccaactgaacgaaaaatcgtagaatggctaatcattaaaggaaacatttcccaaaaaaccagtttgcatgaagtcgctaagaagctaaatatttcagagcctatgctggtcaaggtagccaaaaagatagggttttctggttttcgggaactgcgaagttctctcgtcagctatttcaggtcattaccttatgagaaagaggaagaagtcacagagcacaacagccttgatgccgtgctagatgacgttttttcaaacagcattcaggcactcaaagaagctcgttctgtggccgaccctgtgaccataagtcaggcagctcatctggttttcaacgccaacagaatcatcatttatggtgtcggggggtcggcctcggtcgcactggattttgaacataaattgttgggtctgggaattataagtcatgcctacagcgatgttcatttaatgttaatggtcgccaaccagcttaatgaaaatgacgtagtcattgcgatttcacagactgggattactgaggaaacgctaaatgcagtgactactgctcgaattcacaaagcaaaaattatctgtatcaccaatgataatggctctcctctttcgcaatgttccgatttgtccattttcagtccagccacgagcggtcctctacttggacaaaatgctgtggccagaattgcccaattaaatctgctggacagtttgtacattgctattcttctggagaagaattaa

SEQ ID NO: 193177 - DNA, 1107 bp, Klebsiella oxytoca
atgaatataaaagaaatgtggaaagcagcaaaccctaaaggtcatctgctgactgccatctcattcttgattccgattgtctgtggtgctgggtttattattgccatcggtatgggttttggggggacggttcaggacactttagtatcaggtcaatttgatctgtggcaggccttcgctaccatgggggctaaggcgctcggactattacccgtcgttattgctatcgggatttccggttcgatcgcgggtaagcccggtattgccccaggttttgtggtaggtctggcagctaatgctattggtgcgggttttatcggtggcatgatcggcgggtacatttctgggtatattgctcttgctatcattaaaaatgtgaaggttcctggctgggcccggggtttaatgcctacattggtcgtgccattttttgcatccattctcagtgcgctgatcatggtctatatcatcggtacgccaattggtatttttaccgatgctctcacatcgttcctgagaagtatgggaacctcatctaatttactattaggtgctgttattggggcattgtgtatcattgactttggtgggccgatcaataaaacatgcttcgcattcgtcttaactctccaggcgcagggtataaatgagccgattacggcccttcagttagttaacacagcaacaccaattggttttgggcttgcattttttatcgctaaacttcttcgtaaaaatatctataataacgaagaaatcgaaatgttaaaatcggcggttcctatgggggtagtgaatattgttgaaggatctatacctatagtgatgaatgatatcgttcgcggtattgcagcagcggcaatcggcggtgcttgtggtggcgcaatcaccatggtatatggtgctgatgcaacggtaccttttggtggtgtattgatgctcccaacaatgtcaaatcccatggccggtattatggcgttgatagttaatatattggtaacagcaaccatctatgccgtcatcaaaaaagatgttcctcgtgatgttgttataagcaatgatcaagaagaggaagatattaaccttgatgatattaagattagttaa

SEQ ID NO: 193178 - DNA, 312 bp, Klebsiella oxytoca
atgaatattgttggaattacagcttgcaccgtaggcattgcacacacctatattgcacaaaagaaaattgaaatagcagcaaaaaaggccgggcacaatgtcaaaattgaaacgcaaggcactataggtatcgagaatgccttaactgctgaagaaattgcacaagccgacatcgtcctgttagccgccgatgttcaagtttccggtgaagaaaggttcgctggaaagaaagtcgtcaaagtaccaacggaaatggcggttaaatcaccaaataagcttatcgaaaaactcggtgaattagtaaattcataa

SEQ ID NO: 193179 - DNA, 465 bp, Klebsiella oxytoca
atggacatttcgagtgtacttaatgtaaaaaatatcaaattgaacatgatggctaagagtaaagaagaggcaattgaagaattagctgacttattagtacgtgatggggctgtcgttaataaagatgtttttctgaaagatgtctggctacgcgaagaacagggctctactggattcgaaaatcatattgcgatcccgcatggtaaatcctcaggagtaacccgtacggcattggccattgcacgaacccaacatcaaatcccatgggaaacgatggatggtagcgacgttcgctgtattattttatttgctgtatgcctggtggaccaaaatgccacccacatccgattattatcacaagtttcaggttcacttgccgatgaagagatagtggagaaattactgaaggaagattcccctcagaaaattattgatctgttgaacgctgaaggtgcctgcgcttaa

SEQ ID NO: 193180 - DNA, 1779 bp, Klebsiella oxytoca
atgtttaaattcaaggtttcctatgttgcgctggcggcagcgataagctcatccgttgtttatgccgacccgtcaagctatacgcataaatcaggagcaaatgttattgatattgaagcgcctaatgccgcaggcgtctcgcataacttatatcgcgaattcaacgtcggccctaacggcactattttaaacaacagcgccagcgacgttaaacacagcacgcacggtaatatcgctaagaataataatctgaccaacggcagcgcttccgttattttgaatgaagtcacctccaatcaaatgagtaacctgcagggctttatcgaggtgaacggacaaaaagccgatgtcgtgatcgccaaccccaacggcatcacctgctccgggtgcagttttatcaacaccaacaacgcaatacttaccacaggccaggccaacctgagcgataccggcgcgattgagagctatacggtcacgcaagggaaaatcaccatcggtgataaaggtatggatgcctctactaactatgccgccctgcttgcggatgccattgcgattaacggcaccgtgaccgcggccaacgcagcactcggcgcgggcaacttcacgtttaacaacaataccggggagataaccagtcttggtaaaacggcaacggtgatgcagatgcttgcaccggaatacagtattgatatcagcaatctgggcggtataaaggccaatagcattagcatggtgggcaatactttaggtctcggcgtccgcaataaaggtaccattacctctaaaaacatgttcgccatgaccagctatggttcgctgattaatgaaggttccatcaatacggacggtattatggcttctatggtatccgctggcggaataaaaaatacgggtacgattaatagcacagcttacataacgcagctcaacagcctgggcgccctgaccaatgaaggcacgattgccagcagtaaacagattgccatcagcgcgaccggcgatcttgttaacgccggcacgatgaagggaacgcaattgttatccgtagccagcgggggcaatctcaccacccgtaagggctcaaataccgtttccgatggtcagttagcagtttccgccaacaatattgacaacgccggttcaatgcgcggcaatataaccaatgtcgcattcagcggcgataagctcaaagtcaccggcgaactccggggtaattccactctgaccgtggaatctaaaaaggatgacaaagtcaatacaggagaaatatataactcaggaagtattgtcggcaataatgttacacttatcaccgacggaattctgaaccaggagggtaaccttattgggcaaaattcgttgacgctcaaaactaaagtcatagacaacacttattatatttacggccgctctctgaatatagagagtgattaccttcgcaacagggcaacaattgatggggataattcaaacatcaccgcagtcaacggcattcttaatgaaggccaactttctgcaagcggcgatatgacgctgtatacccaaacgaatgctgacatcactaactacaataccattaaagctaatggcaccctgacgatgagcaccaggaatgtcaaaaatggcggctaccgctgcggctttttctatctgtcaacctgcggtaaaggatctatttcctctaacaaactggtcctcaactcttatcataactacgcctcggaaatgggcggtaatcagcaatataaaagtgccgaaataaatactatccgttaa

SEQ ID NO: 193181 - DNA, 897 bp, Klebsiella oxytoca
atgatgacgctcaatctgggaaatctggcgacgttccgcctggtcatacagcgcgggagcttctccgctgcggcagacgtactgggattgtcgcagcctgcggtcagcctgcaggtacgtcagctggaacagtttctacaaaccaggctgcttgagcgcaccgggcggggaattaaagcgacggcggccggtatcgccctgctggcccacagcgatcggattgaacaggcggtgggcgcggcggtgcaatcggtgagtgaattcaatcgtgaaatcagcggctcggtaacgctgggatccggagcaaccgcctgtatccatcttttacccccgctgttgctgaaactgcgtgagcagcatccactgctgaccgttggcgtcaccaccggcaatatgctggatattgtgcgggctgttgaagaaaatcggcttgatttagggctggttacgctccctgcaatcgggcgtaatctggcggtgacgccggttatagacgaagagtttgtctgtattcttgccagcaaccaggaggcattaccgccagccgtgaccccagaggttttgcaaactctgccgttaattgcatttgaatcgggaagcggaacccgggatcagatcgatggctggtttcttgccgatgggcgggcggtagcgccagtcatgcagttaggcagcattgaggcgattaagcgcatggtacgtgcggggttggggttcagcattgtgccgagaatggcggtagagcatccgcaggatcgtattggcttaaatgttcaatcactgactccgctgctgcatcgtcagttaggcataatcatgcggcaggataaaattatcagcaaaggtattgctgagatcctgcgtttactgcagaagttggagaatggtcaggcgtag

SEQ ID NO: 193182 - DNA, 963 bp, Klebsiella oxytoca
atggcagatcctaataaatcaaagagcttctttcaagaatactccgcactattaactatgggggttatcgggggagctatattaacactccttatttggcaaatatctttttattctgccaatatctcttcatggcttagtacaaatgtttttactggtccgaagtttagagcatatgctatatatttcttgagtatttttttatttacattaatcatacatcaaatattatgtagaaaataccctgagttaaaaaagagccttacatttattgcttgctatttttgctttctcggaataattgtgacaggagtgttattgagcgagtctggaaagaattaccagacatcactgacggttttaatcagttcgattgtcttaggtactgggtggtggattcagtcagtagttacggcttcttctgccagaaaatcacatactctcaatacaataatgaatcaaaggcatagtgctcattacttcgcaaaattagataatgtttataagacttttggattacagtcctgcattaatgaagaaatagcctcagaatattataatggacataaagcaggtcctaaaattaaacctgaattgattcaaggctgccgagatgcttcatatatcttgaactattatgaatttattgcagcaggtgtcatcagaaaggattttgatgaagcattaatcaaagagtgtttctttgagccgatgagagcttttgaaaaacgcacttaccacctaattgaagtgtttagaagagaagacgctgatgaatctaagatttatgataacttcattgctgtattagatagatggcttactgaaaaatcgttaactaccagaaagaaaaagaatcccaatattgcattacctgataattctattatgaactcaagtgatatgtatgaatcgtcagctactgtcactccaattgaaccagataaacaaaacaagtcttaa

SEQ ID NO: 193183 - DNA, 735 bp, Klebsiella oxytoca
atgagcattataattatagatagtgactggggggatatctcaacaagtgatatccagtgtctaattaattccgcaatagatttaatggacccattttatggtaaaccaattccctataacattgaaatcagtaacaccccaaatattgagtcaccaatggtatataacagcaggggagtatctgggcaatatcatattaacttgaccactaaggggcatgattattcacaattttattaccaattttttcatgaatattgccacatcaggacaaactatttggctgtcgataataaatatagttggttcgaagagtccgtgtgtgaattagcttcgatgtttggagttaaaaggatggcatttgtttggaaaaaagaaaaagttttgcctaatgcaaaaaacaattttggctatagcatagagaaatatatacaaagagttatatttaacccaaggaaaaaccttcccaaacaacaactattcaaaacatggtttgatgaaaacagagagtatttagaatgtgaaagatatgatagggataaaaatggaattgtagcaaatcaacttttatctctattcgagagagagccaacgttatgggagttaatgacctattggaataaatgggagattagccataatgattcaatctatgaagcttttgataaatggttatctattcttcccgaagaaaaaaaagcagtggctcaaaaattaattaatgtattcttatag

SEQ ID NO: 193184 - DNA, 381 bp, Klebsiella oxytoca
atgagtaatacaataaccttatcctatacagatgattttaaaccaatcaacaatcatatcccccctgctcaatcgttacgaatacactgtgtcagtgttcgattcaatcaagccgaattagagcttctgaatgctaatcgtggaaacaaaagtaaaggagaatggctcagattaacctctcttgataggcttcctcctgttgttcctgccatcaatgttgaagcatggaaatcactttctgacatatcccaaaagctaaacaaactaataaatcatcttgacgccaaaagcagcaatagtgagttaaccaaaacagagatcttcgcagtcaagaaacagatcaaagagcttcgttcgtgtctgatagcttctactgagtag

SEQ ID NO: 193185 - DNA, 1206 bp, Klebsiella oxytoca
atgaaaggaatgcaacggataaagagacataagaactttatcaatgttgtgaagtatgtgttgaagcctgggtctcaccataaaagtgatcctgttgttatcggcggtaacatgacaagtgattgtgccaatgaactgatagcagagttcaacacagcaagtatccttagaaccgacatagcaaaaccagcctggcataactcgcttcgccttcctaagaaggatgaacttacaaatgctcaatggataaagatcgctgacgattacatgaatcaaatggggtttagtgatactcaccttcgttgttatgtattacacgatgacagtgtgggccagcatatacacatcattgctaaccgaatagattcagtctcaggaagggttaacttaggaagacatgaaagccttaggagcggtcgtataatccaggaacttgaaattaagtacgacctaacgataacaaaaggatcagtaccattaaaacctgagaatacgggaaaagacaaaaataatgtaataccaacaaaagccaagaggctttctagaaatgaaaccatgtatgaaaaacgaacaggtgagatctgcaataagaagcaattacagatgattcttgacaagagtttggcagatacacctgaccttttaacttttatcaagaggctggaagaagcagaagtaggctggacggcgaatgtcgcaagcacaggtaaaatgaacggtttctcttttgaatacacaggaatagctttcaaagcttcccagttaggcaagagctattcatgggcaaatcttcaaaagcagcttaactacaacccggatcacttagaagctctgcgaaagggtatacagaccaaggaagttcctgttcctgttcctgttcctgttcctgttcctgttcctgttcctgttcctgcagaaccgatagcaagaacggtcgcccagagcgaaagcataagtgaaaaaattgcagaactggaattacggctcagagaagacaaacgaaacgaaatcgtaggaaagattcttcaaaaaaatgcagtacaacggcaaaagcatctccgcttcgtaaagtggcttgcttccttaaagcaatacattgagcttctgagagtctatggaaagagcattcttcacaacaaccctgcgggattctcaaaagtatatgcaactcaacatctaacccagaaaagaaaaatccgtttatag

SEQ ID NO: 193186 - DNA, 363 bp, Klebsiella oxytoca
atgaaaacgactctgtataaagatttcacatttgaagccgcacaccgactacccaatgtacctgatgggcataagtgcggacgtttacacgggcactcgttcgttgttcgccttgagatcaccggagaggtggataagcacacggggtggattatcgatttcgcagaattaaaagcgctcttcaaacctacgctggataggctggaccactattatctcaacgatattcctggccttgagaacccaacaagcgaagttctagctcaatggatctggaatcaggttaaaccacaactcccgatcctgagcgcagttatcgtgaaagagacatgctctgcaggctgcatttaccgcggcgaataa

SEQ ID NO: 193187 - DNA, 2268 bp, Klebsiella oxytoca
atgaatatcaaaggcagcgagcaacttctgcgtaactttttcgatggggatgaaaatattatctcttgggaaaaaattgagagtgagcagttggaaaaatctactttacggcgtttgaaaccgtggattgaggatgtcaggagcggatgtttccctgtgatcctgccgcgcgtcatgaagggctgcaatgataaagttacttggtatgctatagccgatgaagaacgaaactacgcagagctaggtgaattgatagattcacatgtgggtacatcatggtcggattttaaccgccagcgtattatgttgaatccaaatagttcagtagaaaaagcattgatcgagcactatggcgatagtgtatataagtttagctcgctctcgcgacctatgattctggaggtttttaaaggcattgagcgtctgcgcctccaacttgctaaccgaccgagccatcatcacgcacttttacgcccgcgtggtcgtatcctgcgagacattagagctgcgctgcgtcgccatgatgtgccgcaaacacgtatctacttgcaagagttgcgtgatgccggtggcatcggccatatcaacgagttatttattgagctgcgttgtttggcaatggaaaaggacgccaaaagtttacttgaatcgcctgagctacgcagggtgatggatataccacatcctttagtgctagctgaagaagtgatggcggtgctttatcagcagatgctactaaagtatgaacttgaagaagacttggcagcccaacgcagggtctttaatgattctttggcaaatagtgtgccgcgcttattcctggtgatacaggggattcgcactccagcagcggttaaaaatactcttctgtggcttctttccgatactcatagtgcgccttcaaggttgaaggagcaggcacatcaattagtggccgggatggagggagcatcggacaatgaccgtttctggatcagccaattgctggcagccttccctaatgaaataaattctgttcggcctatcaaagacattgatgagttgcttgttttggctgatgaacatccggaaagcacactggaagaattggtattactgcctgttagcgcacctggtgtagctatcgcgttgcaatgcgcttgggttgtgggcagtacaggagcagctgtaaaagctattagttatttgcagcagttggtgcaacaggaacgagatttattgttggcaaaaccgacttttcagcgttactacgcagagctgcagacatttttacctgtcacgctcgcagtagagaatgcagttgggttcaataactggcaggattggttacagaaagtgctagaggatcctcagtgggggcgagcaattgaagccgtagaacagactagccatcaatggcctacaagtgcactcgagacagaggtattcatttcgctacttgataagagcgataatcgtacaggcatgatcttgcgtgatgctatccctgttctacttgaatggctggataaccatcaggctgaggcttcatggcagcctgtcaggttagcgttattgcagcaattagtattagatgacaacagttcccgtgaagatgtcattattgcttgcgatctggctcgcagttacttagaaggggacataaatgcgaacgactatcgtgaattgatagaaaacctacaggttatgattgagagttccggcacgaatagtgctagtgcgtggctggatatacttgaactctttcttatctatccaaccgttgacaagcttgccagagagcaattattcagcttggtatacagcaagttctatagtaacccagtccgttatagcaaattgcaatggaatctattagctcagttttctgaagagtgcggtcttgtatttgaaattcctcttcaggctacagatgaaaataatgaaggaatttcgggggaagttcaggcaggggcaacgctgaataataaagttgtaggcatttatactttaactgagccggtagcacagcgagtgaaaaaacaacttctagccgattaccctcatgcagatattcgtctcaacagtgataaaggcggctcgacaattctacgctctttggctaaggaggcggatttatttgtttttgcttggcttagttcgaaacattcagcttattacgcaataaaagaagaacgtggtgaaaaaccttttctacaaccttcggggaaaggtagcaccagcatgctagactgtattcgcacctatctaaagggattgtcagcataa

SEQ ID NO: 193188 - DNA, 543 bp, Klebsiella oxytoca
atgaatacccggcgtatttttaaatccagatcctcccgccaaagtgaagtgatggatgtactcagttccttgcttgttgctgagatcgttcagccaagcgcggagttgtggcttgtctcgccttggatcaccgatcttgatctactggataatcgtactgggcgttttgattacctcgaacctgcttggggacagcgtatggtacagacttcagaactgctggcgcgtgcagttgccaatggttgtacgctgaaggtgatgaccaacgaaacccagcataacgctcgttttatcagacagctaactgaacgcgtagctaactacggtatgttggatagcctattcattggtcagaaacaggagttgcataccaaaggggttcttggtgaccatttcttcttgagcggatcgatgaatctgacgattggtgggattgtgattaatgacgaacagatcaatctgaccacagacaaaaccgcgattgtacaggcttcactggtattcaatgactattaccaacctgtacagggagggggggtatga

SEQ ID NO: 193189 - DNA, 4539 bp, Klebsiella oxytoca
atggaacagattattcgcaaagtacttgatgggctggagtcgcaagaggcggtactgctcacttggggtaacacacaaggttttttcactgagaccgagctccgtaatactatttctcaggtcctacagaaccacccgctcgacgccaacggcctaactagttttggcatagcgaaagttatgatcgatcgcggattgctgctgcgccaccagcaaaatggcttttcggtgtttcgtacccgcatggctgagtcagtgcggctttatagccagttacggcagatgttccccaaacatggccgaggtaataattggcgtactgcggcgactctggtatctgactaccgctttctacgccgccagcgcaaatatcccaagcgcaacctgcagcctatagaggtgtttcaccaacttgatgaaattgatggttttactcctatacaccaccagttactatcgacgctgatcagccatccggggggaatgtacaaccttgcgcgttttcagttggaatcctgcaaaaacgttctacgcggggtacaacagagcaagcatcgttcgactgcgaccattgtttgtgccgggactgggaccggtaaaacgctggcattctatcttccagccttgacctttatcggtagcgaactggtcgccaggaagaaagactcggtgaaagcactggctatctatccgcgtaatgaactgttgaaggaccagtttatagagacattgcgccagactcgtaagttgaacgatgaattagctaagaatggagtgcgcaagatacgaatcgccgcactattcggcatggtgccaacgaaaaaagaaaccatccatcgtgaatatatgaaaagtgcctggagtcgtcatcgcaatggcgtggcttgtctctacattccctgtccaactgagaaatgccgcggcaaaatggtttggcacacagccgactacgataagggctacgagcgactgcattgcgatagttgtagccagaccattgagcctgatgaggttattttaactcgcacacggatgaaggttgaactacctgatattctttttaccagtactgaaatgctgaataaacagatgggcaatccctttcttgcttcgttatttggtattggaaaaaatattatccctccatcattgatgctgcttgatgaagtacatacatattcaggtatcagtggtgcacagaacggtatgttaatccgccgttggcggcatctgtccggagccacaccacactttgttgggttatctgcgacgctagaacaggctacccgctttatgggggctctgacaggtctggcagaacatcttgtggtggaagttagtccgaatgaggacgatatggaaacagaaggtgctgagtatatgctggcgcttaggggcgatccggcttctcgatccagtcttctgtccactacgattcagacctccatgcttaccaaacgtatgctcgataatgcaacatcagttgccagcaaaggtatttatggtacgcgcagtttcgtctttacagatgatatggatgtcattaaccgactctactttcaactcctggacgcggagggccgttactcaaatggcaatattaatgccagaaaagaaccgctagcgatgctgcgcggtgatgcgcctaatgaagagaaatttacctttggtcagcaatggccactatccaaagttattgggcacacacttgattctgctgaccgtagtaacgtcaagcgaacctcttcgcaggatgctggggtcgatcttgttgcggatcttattgtagctacagcctcgctggaggtcggttttaacgatcctaacgtcggagcagtgattcagcataaagcgccgcgtgataacgcccagtttttacagcggaaaggacgtgcgggacgtcaacgtgctatgcgaccgtggactgttgtggtgctttccgactatggacgcgatcgcatggcatttcaatgttacgaaaacctgttcgaaccggtattgaaagcaaaacaattacctattggtaatagctacgtactgcgtatgcaggccgcttatgcaacgatggactggctttcaagtcgtaataaatatctcaaagagtggaatagcggtatttgggatgacctgtccatcccgcaggataatggcaagatctctaacgcccagttaaaactagctgatattattgaagaacttttgtgtaatcaaaaaactcagcaggttttcaatgaatggctggctgaagcgttgggcattaaggaaaacaaccagttgcaatcattgctatggcaaccaccgcgcgcaataatgacggcgtttttgccaacggtattaagaaggcttcgctctaactggtcacgtcttggtgttgaacaggccgataattgccgtaaaggcatacccatgccggattttgttccgtctgcgctgtttaacgatctttgcttgcctgagttgcaaattaacctgccaaatgaggttggtaaagaacctgagccgcaaactatgccgattttacagggaatgaaagatttcgcccctggtcgtattagcaagcgttttgccattaaaaacattcgagaacgtcactgggtagtgccaaaaaatttagatctgaaagacggaacgcatcttttccctattgatgattattgcccaccagacaaacgtgaaagcatgccagatggccatgttaccactcgcagtggtatgaagactattccctgcttccgcgcttggaatgtgtcgaccagcattccaccggatgaattaaaacttagtgaaacctcaaatgcgttcctgacttggcatagtgagattcgtcctcctcagcgtggtatcccggcagaagtgccatccaataatatttgggagagaatattccagcaggtggagttttacagtcatcaacaacactgccctattgaggcagtacgtttcgccaccggttcaaaagccaatataaaattcagcgatcagcgagatgatttgcagattaattttaaatttgaacatgagggtaaacctgctgcctttggcttctcattatgggttgatgcggtgagattccagtatcagatacctaattttgatcttgccaatattagcaataactgggaattgatggctgggttacgtacagcacgttttatgtatgaagtcagcaacgatgatgctattagtactaaccctttcttggggggatggctagcagaaactgtactggcaggcattggctgtgaagcagttttgaaagattgttcgctagaacaggcgttttacgcactgcaacaaaatgttgctcaaattcctttatttgacgttcccgcacgaatcttccagacactccatgatgtgcagatgggagaggacgttgagcaggatctacagcatagtctgcgtgaattactttcccaggcccccgtaatggcaaaaatagccgattgggctgaattactctggcagcccttggatgataattggctggattggctggattggctcacctttaacttcactaacactttgggcgcggcgttgttgcaaactgcaatgcaactgtgcccggatgctgacgagaacgatcttatccttgatctcagtggggggccgattcgcactgagcatttgggtgcagggatacatgaaatctggttatcagaaaccaccgtcggtggcggtggaatcattgaaaaaattcaacatatttatcgtgaggatccgcgccgcttttttgaactgttggacttcaatcttcgccctggcgattacgagacaatggataataatgtctggcatctattgcagaatttggcgattccgacatcaccactgcctgctcgtatggacgagatgcgtcttgcgaatagccacgttagccagattcaggcacagcgcaatctattgggagagttgcagcgcagtgggtttatgaccagccatagcttcctgtcagcgatcaatacccgcttactacggccaggaaccgatgccagtagtgacttctttatgctgcaattgcaacaagaatggagaaagcatgagaagcgattaggcattgaattaccgcaacgcgtgtttgcttttacctgtagtcagtccagtttacttgatcagcaattaagacaagctagccaagggcagcacaatctggagagttggcgatttaatacttgtaatggcctattgtggccacgtggttatacaatccgcgacaactggcttacttggtacaatccctacagctttgctggaccaactgagcgcctactgttggcacatgtggttcagcacagttgcgcccaagtggcactcagccaaactgactggattcaaaagtgtcaccatcatctggagaatgatggtaaatgtgagttattggctgaactgggagatgcacttaatgaggccatcgcgactttattggtcaccccagtagaaatgtacgggttattcttctatccccgcgttagtgccctgcgccgccacaataatgaaaccttcgtcattattgaaatcccggaggctatccaatga

SEQ ID NO: 193190 - DNA, 786 bp, Klebsiella oxytoca
atgagtgaagtaagcatcagtgaagtggtaatctccagcgcgtcggaagagattagcgtttttgcacggcgcagcggcgaatttaaaacgcgccttgagcgccatcagcaactggaaaaggctcaggagatacgcaatagcctgctgcaggtggcgcaaaaaatcgatgccccggcgaaaaaactggcgcagatcctcacgagctatctgctgctacgacgggtttgcgatagtgagagcggtaatccaattgttggcctgtttgaccgcgaaacatttggcaatccacaggccctgctggcggcctttcttcagcagtatggggcgcgtacatacgatgttgctcaagcccaggagtttagtttgctggttctggaaattgagcgcttagccagtactctcaatgaacatacaagcactgcgtggcgtgaatacatccgtacgttaaaagcgcagtgggaagtggatcagagacttttcagcaaccttgctcatcaggaaggacaacgaaaagtacaacagcactactgtgaccttgtcgctcagttcaccaatagtagtcgtgggctgccaaaaactgctgacgaagttgaggccataatcgacctgcatgagcaactttgccaccagcgcgacgcactcaagctggacgttccggaagaggtcaatctcttcctcaaagccgtatctgggcaaggcgccacgctcgatatgttgacgcctaatgtactcagttggctgactgaagaagacgacccgacgcgctatcgtataagacgcctgtaa

SEQ ID NO: 193191 - DNA, 3081 bp, Klebsiella oxytoca
atgccacaattacagagctactggcccggagaagagaacgttaccgcctgcatcctgaccgaagccgagtcactagccgacagccaattgctggcggtccatgaacctatgcatctcgaccgcgtcgagtttcacagtggtaaggtcattcaggtgggtgagggggcgctgctggactttctgcttgaacataatcgtccattgccgctgattggtgcctctggcgtggggaaatcccatctagtgcgttgggttcatgcgcaacttaaacgccgagaagaccacgcaaaatatcatatcattcgtatccccaaaaatgcgtccttgccgcgcgtgcttactatcatcttagaagacttaaagggtgagcagtatcagagtatccgcgagaaggtaaacggggtcgggcagcagttgattcctgaaaatgtggctgaacatatagctctcaagctgcgtcaggcactgaacgcagcttggaagtctgcagtagaagaacttcaacaggagcagatggggaaaattcaactggacgaaagcagaaaaaaaaagctgaaagaaatccagcaacacgcagcatcaactcggcttcccgcgcttttttttgacagtgtaatgacccagtattttaccgatcctagggcctgcttgcacaatattgcactgcgcttctgtaagggggctgacgatgatagtattgccaacctgcgttatgaaatgtctttggaagacttcaccttcagtggcctgaatctcaggcaagtttcaccggcagtgctcccctacctggtcaaccagcagttgcttaccagtgatgaaaaaaagcaagcagcggctcgcgttgttaacgaggtgatccctcaggcgttgggagacacctttggagaattgttcagctttaaccgggccagcttccaggacctgatgcgcatgattcgccgccagttgctggcagaaaaccgaagtctgatcttactggtggaagatttagctgccacctcagcgattgaggacgtgctgatcgactgtctgctggaagaggaggagtacgaaggcaaaaaggtgctgtgtaccctgaactcgattattgcagtgaccgagggccacgacagctttaagcgtcaccgtaatactctgggcactcgtgcccgctatgaatgggtgatccagcagcagcatgccagcgaaagtgatatatcactgaaaaaacgcgttgcggacttctgcggtcgctatcttaacgccgcccgccacggtgctgttgcgctggaaaaatatcaccaccagcaggatgggcagcgctatcgggatactccggtatggcaggatcaggaggtactggaaaacgaatctgctgcgcccgcgctggcgagtttcggctacagcagtcacggccatccactgtttccgtttaatccggcagcaatcggacagttggttgaacgccactgtcaggataaagaacacgggttggtttttgtcccgcgaaatatactgaacgctatcctgcgtgaaccgctaaaaaattatcgccagagctatcttgatgggcaattcccgccgtcagggtatgaagggattatttgcggtcaggaacttcagcaaagggtgcgcctgtccggtgttagtcagcccgatcgggtcaattcactgctggccatttggggcggtaacagtgcacatttggttggcctgacaccagccatctgtgaagaattcggcctgccgcaggcggcagaattgttgggtgatccaccaccaccaccacccagaggcgatgatccacagccacccggtggcgatgatccactgccatccggaggtgatgatccactgccatccggtgaagctccagccattcaggaatggaaagccgcgctggaaaaatggaaccagggcaacacgctcgatcaagccaaagcgcgtgatatccgtaagtggttacttgaagcgttgattgcgcgtattgactggtcaaccgagctgatccagacctcgctcacggccagttcagcaaaaagccaaggaaggatccacttaccccgcgtgctggtgggtaatcagtcgcgtccgcttgtgacgcttgaagatactcccgagctgtacagcgcctgcttggcgatggcgcgcttcaacctttaccagaactgggatttcgaaggtagtgagatcgattacgctgccttccataactttgtcgaccgtattgaaacagaagtaaaactcaccgtgttgcaggaagaacgcgaggagctttccagtattgtcaaagacctacagttgagttgtgcattccttgggctggatggttcttcatctccagtctcgacaattctagtgcaagccctgttaacagaaccacagtctacggacaaaagtcatccgctgctggacgacttcttaacccagtcgcgagctagcgtgatcgatgaacaccggaacctacgcgagcgtttaatcgcgcttactgcggcgaaaaagtcgggcgcccaaccctatgccatcaacggattaatgttggtggaagcggcaaaaagccaacaagtcgctgccgggaaacgaccgagtaagatccacgaagtcaaaaacagactatgtagttaccggaccctgctgctgaagactcaggagggcattacggaacgcctgagcgacggcaaaagctccagtctggcaacggttaatatctgtgacatcatgaaggaaatagtcgaactggcgaacagtgctgatgtcgtccgcccggtgggtgaaacggtgccggttctgctgaagttgttgaagtgctggaaagaaccggagttgaaaaaccagatcagacaactggagaaactgactctgccagccgataatcctcaggtgttgatgagagaaattcttgccgtcaacggcaaacaatacgaggcatttcggcaactgctggaatcctggagcaagtttgaagatgctaccggcagctatctgcagcagcgtcaccgtgatgagggcggcgaccagattgagggagccgaaaatgagatcgcacaaatcctgacaaggctgactgaacagttagcgctgctggagaagaacttagcatga

SEQ ID NO: 193192 - DNA, 909 bp, Klebsiella oxytoca
gtgtcgattatcaataactcccaaggaggcagtcagtatgccgtgctggccgcattttatcaggtgctgaaagccagcccgaaaaacactctgccgcgtgaaaaactgatggcgctctgtgctccggcaacgttgcaaacgggtgacgcaccggatgcaagaggtaaagcgccccaggaattaagagcgtggctggatctggggatactatcggaagaacaggtaggcgatacaactgaaatcagcctcagctcgaactatttcaacacaaaaaatatgccgctgcggcaggctgcacgccgctgcttacagtccccggaaaataacagtgacctaagttcacgcgatcaacgtgccgttgacctcaccctgctagcagcgctgctgctggcactggatgtgtataacaacgccgatatcagcacgcgtaacctggaagcgttagtaaatcagttcttgcctgatttccgcatcaataaaactaacgaagttccgattgttcctggctatctaaactggctgggctacgcccagaaaattacccgcgacagctacgccatcgaccccaccgatgccatccgagaagaactaccgttcctgatgcggccaggagaacaattgcccatcggcgaagcgttgcaacgtctgaatcaggcactgccggtgcttgacggtggctgctatcgccagcaggtcgaggaccgtatcagccagcatggctggcaaccactcagtgctaaccgcatttcgacctcgctgtcgcgagcgctgctgcgacttcagctctccgggataatcaacatgaaggctgagtctgacgccagcggcgcaatgcagttaaccggtagaaaagggagtgtgttgcgtaccgtaacccatcttaaattgactagctcaggagcccgctga

SEQ ID NO: 193193 - DNA, 2559 bp, Klebsiella oxytoca
atgaaactggcgcaactgattgagcaatctagtattacatcagcattgagggagtgcctgcttccggatgcgatcgcggggcatctcgatcgccgggcgctaattcgtgactggctgtaccgggaaaaatatgcccaccacagcgataacgagttgacggtccctgatgatagctaccccggttggccaagtctgggagagtgggaagccagcggtattcactgtcaacgactaggtcacacctttttgctcagtgctggtcctgcctggtgcccgcagtggctggaacagggagatatccccccttttcttgacaacgatctgcaccaattacgtcgccaggacacacgagtgccgatggactatattctgcgcccagttttgaaatttgaacactaccaagctccaggtcagcgagatgcgatacgccgggcactgttcgcaccaccgggcagtacactgctggttaatttgcccaccggcactggtaagactctggtggctcaggtactgacattaatggccccgccgcagggggcgatgtgtctattgatagcgccaacgactgcgctggtgatggagctaacacgtagattccgcgagttgttgagcgaagccggtggtcgacctgaatcggtctctgcctggtacagcgacctgccagcgcaggataaaagcgacacgcgtcagcgaattagagttggagaacaaagacttatcgtcacctctcctgaagctgcctgtggctcactgcagtttgcccttttcgaagcggccaaacaaggcggcttgcgccatgttatcgtcgatgaggcgcatattgtcgccagttggggtaatggctttcgtccgcatttccagcagttgggtggattaatccgcgggctcaaacgcatcagtcgtgaagcgcagttagaaccatgttctacgctgcttatgagcgcgaccatcaccgaagctagccgtaaaactctgcgtgatactttcgatcagcaaatgattgaggtccacgccagccatttgcgccctgagcctgcttactggtgctatcgggcgacaggccataatgataaacaggataaggtgctgcagtcgttggcgcatgcaccgcgtcctctaattttctacgtgacgcgaccggaagaagctgaagagtgggcgcagtttctgcgcgatcaggggtatcagcggcttgctacatttaccggtgatacgccggatgctgcacggcagagtctgctggagcaatggaataaaaatcaggtggatataatgattgccacctcagcgttcggcgttggtatggataaaaatgacgtgcgtactgtgattcacgccaccgtgccagagaatatggaccgcttctatcaggaagtggggcgaggtgggcgcgatggttttgcttgcacctcacttctgatttatgaacatcaggatgtcagcctcgcaaaacgactctcttctcaaaaactcattggtcgtgaattgggtctggaacgctggaaaactctgtgggaaaggagagaacacgtgggtgataacttatatcgtattgatattgaaagaatccatggcaatcttaatttccggagtgatgaaaaccagctttggaatctgcgtaccgtactgatgatggtacgcgcaggcgtgttagaactggatactgacctgcaaagcccgccggataaaagcacgtttgccgatgtcagtcactatgaagcggcattggagcacctcttgcaaaagcatcaaaactctctggtggtgcgcatcctgattggcaaccatactggggaagcgttatggaacacgcacattattccttcacgtgaagagactcgagaagcggcaagaactaaccataatacgttaatcaactggttgcacaccccccaactcagcccgctgtgtgagactttggtggacctctattccttgacagaatttaccccgggccacgcctgcggcggttgcccggcttgccgcaagaataagatgttaaacagcggttacgtgatccctccgccgttgctgctcaacccgctagcatcgccttcacaggaagcgttaagccgctggcaggagttgagtggtctgtccttttccagctgttttattacctaccctgcggtgaccgatgatgaatgggaacgtgagggctggtatcaccgcgtcgcgacgttactagttcagttgcatcgcgcagggattgtccagcgcatatggtcggatccggcattgctacacaatgtattcagtgccatcccgcgtggtgagcacctgactctgctgagcgacgaattgcctgtgggcggcgaacaggtggtggataacgatgtgatgggtgaactggcagaattgattcttcctactccagagtcttgcgccagtggctacctaccgccattcaacccggcaccgttgcaattgtcgttgatcccgcatgatatgcccgatccctaccaccccagcggtgcgcactatgttcacctcgataatcacaattggatcaccatcgaacaacttcaaaggaaattagactgtgtcgattatcaataa

SEQ ID NO: 193194 - DNA, 3177 bp, Klebsiella oxytoca
atggatggatacatgtcccttgaagcaggtgatctcgttgattcaccttatggaattggcagactcattcgcattagccataatgatgcgcttattcaatattttgattctcccgtacattatgaaggcatagagaaaatcatcgaggttaagcatcttaagaaggctaatctctatacagaaagcctggtttatcgctacgactatgaacttgcccattggcagattgcacgcgtggttgggttgattccgggaggtgtacgtctccatttccctaataaacagcaagaagatgttggcttaaacgatatctttattcgttgggatcgtcctatcagcgatgccgcagcccttcttgctgaacgtattacttacacccccttttggcaagatgcacgcttggcttatcagcaccagatgctgaaacagcgtaaagcctgtgccgggataacatcggcactgtcgtctagtatcgaacttgagccttatcagttggctgttgtgcgtcgagtgttatctgaccctattcagaggtatctgttggcggatgaagtcggcctcggaaaaactattgaagcgggattgattcttcgtcagcatgtgacggaaaaccagtttacccacaatgtattgattgttgctcccaaggcactacatcgtcagtggcagcaggaactttccaatcgtttccaccttggagaacttttggacgagtctatccatattgttgacacagacactttcagttcagataaaggcttatcctttcgtcctgatatgatggtaattgacgaggctcatcagatcggtgcttgggcatgggacgctgagcatgagcagcagtatgcctgcgtaaaccaactggcacaacaaagcgcaaaattgctgctgttgtcggcaacgcctgtgaccggtaacgaaaagaactttctagccatgctgcatctgctggatgccaataattatcagttgactgaaactggcctgctgaaatttcagcagcgtatccagcaacgcgaagagataggttcactgttctacgcgtttaactgtgataacgacaacatgacgctggaagagaacctacatgccttgaccgaactgtttccggaggatgaagttcttcacggactagctgcgcagttgctccccaatttagatgtgctgcagcctgagcggagtgaaaagcgcgatctgctgatcaatacaatccgacactacatcggtaaccgttaccgtcttcaccatcgcctgctacgcaaccgccgtagcagcccaagtatcagcatcctcatgcccggtttgtcaggcttgtcgctgaaaaaatacaccgcctcgaacaccaacaacgacatgatgatcgcttggcgagaatcggcagttatgctacatccacaggactcggcgtttgcctcgatttaccagctactgtttgaagccgccatcgccacaccggaactgctggcacgactcgccaccagccgtttacagcagcagccgctaagtgttacacagggcttcctctacagtgaatcacaactcgcgttgttgcagcacccgttgtttgacggcgagaagaatatcctgcaggagttggtagaccgttgcatcatggagcgtgatagcaagcgtaagcgcttaactgaagtgctggaaatacttttgaacagcaacgctaaagaactcccttacattgtggtgttctgcgatcagccttgggtggcagatcaagtctttactgacctgatgataccgttcattggtaaaatccagcgccataaccccgataaagaagttcgctttggcaagggaagcaaatgccagatcctggtgtgcgatcgtcgggctgaagaaggtgtcaatttgcatggtggtcgcaaaattgcgctgcattatgatctattactttcacctaatcgtatggaacagcgcctcggtcgcttgaatcgatattgtgcgaatgagaatgcgacctccatcctcagtatggcgttggtgagtgaagcagaggatctacaaaatcagtggctggctattctcaataatgttttcaacgttttcgaagattcaattgccagtttgcaatacttggttgatgaagagttacagtggcttagcgccaatctctatccgttaggagaagagagcatgatacagcttagcgcacgtttggcgggtgaggatggtcgcttggcagaagaaaaacagcgaatcgaaatgcaggaagtccttttgcaaatcgacggcgatatcatcgaagccagggagtatgctgatgcgctggcggagatagatgagaatgaagacgaattccgccaatgcgcgagtaatctgctgggtaaggtgttgaaattcgatgttatccgggatgaggatactccggcagcgcaccggtatcgtttcaatccgggggattggaatactggtaccttagtcagcccgcagcgcttacaaaaacactgcctgctgggctttgatctcaacaagtcaggctggaattctcctgtgacctggccattgagctataagcgctcagattctgctcagggtaacatccggcctgcacggctaggcgaacctttccacgatgccatcctgcgactgcttgattttgaagagcgcggtatagctagcgcgattctacgcatcacgcccggcatgggtgaagagcaaaaaatttttttccgctacgatttcctgattgaggccgatgttaacactccagcgcaacagcgcctggctgactacttgatgccacctcaaaccatgaccctatggctgaaccaggcgggtgagcacatcaccgatgcggacgtaatgactatattgaatgagccttattctccgctgaagcgcggcggacgtcaccttaacctgaatgagcagcgttgggcgcagattgcccattgtttcagtgctaaagagtggcgaacttggtgtaacgatagctacagtattgcccagcaattggcggtgagcaagttcgccgcaaaacaggctctcggcttaagccgcctagaaaattatttgagcagtgccttgctgcaccacgctgaccagcaggaaaccgggcagacgctgcgccatggcattacgtggccgaagatcaccaccctggcaacacgtgcgttaatcattgcgtcagaagccctcctgcacaaggattcacagatctga

SEQ ID NO: 193195 - DNA, 1128 bp, Klebsiella oxytoca
atgagtgagttccgtgtccccgctttgcgtatccggcagggtgagaagagacaactttttagcctggccattgatggcaaacaaattaataaaattgctgcgatttctcgtattcgacgcggagaagaggatctgatcggttatcagcgtccggaagtccgaagccatattaaggaaatccagcgctatattgaaagcgcgaacccgatgatcccaaacccggtgattattgcatttgaccagcgcgttcgttttgaaccgatgttggaaaacagcgatatgggccatttggtcatcccttattctgaagaaagtaactttgaaaaaccggggtttatcgttgatgggcagcaacgtactgctgcgttacgagaagctgacgttaattctttcatgatgccagtctctgcgtttatcgccaacgatgcagaagaacaacgcgaacagtttatgctggtaaattccaccaaaccgttaccgaaaacgctgttgtatgaattggctccgcatacccacggtcgtctgccatccgacttgcagttacgtaagttcccatcacttctgactcagcgcctgaactttggagaaggtcctctggctgggcgtattaaaactgcgaccaatccggacggagtgattgctgataactcgatgataaaaatgatcgactcgagcttacgtgagggggcgttgtatcgcttccgcgatccggcgactggcttgggcgacgaagcgaagatggtgaagttgctgaataacttttggacagcagtggaagcagtcttcactgacgattgggataaaaagccgcgttactcacgtctgctacatggtgttggtattctggcccttggcagtttgatggatgaaatcgaccaagttcatcaggagtatcagggggaatcgggttggaaggatattccaccgataacccgctttgtcacggaacttaaccgcatcaaacctctgtgtgcctggagcaccggtatttggcacttggggactgacattgatggtcaaccgatcacgcgtaaatggaatgagatacaaaatctctcaaaggatatatctttggttaccgactatttagttacgaattatatgaagttggtgaatgctgagatctga

SEQ ID NO: 193196 - DNA, 1251 bp, Klebsiella oxytoca
ttgtcgaagctaaaatactttttccccgatagtcaggattttatcgatcccagtttcgacttcgttcgcgaaacgcgcaacgagcatcgcgttcgtcagcgtgacgaccactatccccatgaggttttcgcacatccctatgatggcatgttggtatcaaaagcagtggttgacggtctgggcggtggtgagagtaaatacacccgagcacagcgcttacgctacttccgtaatgggatgaaacatttctttcgtctgcctgataatatgcagacaatgggtgactgcggcgcgtttacttatgtaaatcaggatgtcccgccgtatcgcgttgaagaagttattgagttctatgaaacatcccgcttcaactatggggtttcgctcgaccatattatttttggctatgaaaaaccgggggaatcgttctctggcgaggtgctggcagagtgtcgccgtcgtcaggatattaccctaactcttgcgcaggattttttagtgaaatcgcaaaagagttgtttcacgccgtttggcgtagcgcatggttggagcaaggagtcttaccgacagtcagtagaagcactgttggcgatgggatataagaatatcaccatgggggggatggtaccgttgaaaacggcgcagatcctcgaaactctggaagagattaaaccgctactcaaaagcgatacccaagttcatctactcggtattgcacgtccagagagctttacggattttattcggcttggcgttaccagtattgattccaccacaccgcttcagcaggcatttaaagatcgcaaaaacaattatcacacgccagaaggtcgtgcctatacagcagtgcgcgtgccgcagttcgatgctaacccaagtctaagtcgtaagattaaatctggcctaatcgaccaggatgtggctcgtcatcttgagaaagatgctatgcatgcgctgtttgagtacgataacgactcgttatctctggagaaaacactggaagccgtgttggcctatgagcgtctgcactcaggagagaaagaggcagagaaaattcgagccgattacgaacgtactttgggcgatcggccctggcggaagtgccagtgcactatctgccgatccattggtattaacgtgattattttccgtggcgccgagcgcaatcgccgccgtggtttccacaatattcaggtactgtacaatcgcttgcagtacacattgtcattacgctcagaggataaatcatga

SEQ ID NO: 193197 - DNA, 957 bp, Klebsiella oxytoca
gtgagccaaattaatctgataacaacatgtaccaatggtaagcacagtaacggttatccgatactgaatctcgcaacgtggtcaacttctctttcctgttcccaaaatttaatccaggcatggtgtaaggccgttaattcggctatttctgctgggcataccttgcctgttgagaaattgtataaaggtggacactgggcgacagcaatatctatccacgagatatatccagttgaattgtgggtcctttctgcagggttagggttattgaaacgtggtgataacgttgtcccataccaggcgacttttgctgtaggccataatgactctataccattattttctaaatcgtataagggaaaagaatttcatcagatatggtggtctgaattaaataaacattcaccatttcaagagaagcatcctgtatcgctgactgatctcatgaaggccagacctgatgagtattttatcatttgcggttcgcctgattatatcagcgcagttggtccagatcttattaccggtttgccttatttacattcagcagaaaaacaggtgttgataatatcatcctctcgggttaaatcgccattaaaccattatttactggaaagtaacaagcgaattgctgaatggctaaattgcaacatgctgatgctgaacataaaaatcgcgcagtatgtaatagagcagtttacccgagaaggatatgacaatttggggttattagccgataggttgaataaacagttttcttcgttgccagcggcctgcaaaaaacaaggcgtacgcaggacgccggaagaggtcgaagcctggatattacaacatctcaaagaggtatctgatactagcgcatcacgtgctctgcgagtctttcgtgatagcggcaacagttttgaagagaagcgatttcgtgccttgtttcactctgtgcagttgcgcaatgagtaa

SEQ ID NO: 193198 - DNA, 234 bp, Klebsiella oxytoca
atgttgtcatttgatacgaaggccgcgttggaactgatctcacactctgctggtggttttagctatgacactcttgccagggcattgatttcagataaaaaagcacaaccttcccaacaccttttggctgattgccgtgagttttgcgaatccctggagtcgcaagggattattcagcggtgtgcatcctgtcgcgaagttcaagatgtgtattacgaatatcgtgcccactag

SEQ ID NO: 193199 - DNA, 633 bp, Klebsiella oxytoca
atgagtgagcagcgaacgcctccgtcacgcccaccacagggaccgattggctggctgctgtcgctgaccgggcagctcatcgggttggttattggtgcgctggtgctgcgggtagtactggaactggcggggctctatttctggtggccgcaggaggggagcaggcatgtttttatggtgatgaagcatgagcaggcggaattggttactgcgttacaaccgcatccgctggggaatgaaattctggtgctgctggaaaaaggggcaacgcacgtgcatatggccaacatgttcctgcagaaaccgttcatcgccctggcctatacgctggtgagttttatgctgcgcctggtatggctcgcctccatgctccccctggtctgtctgtgtgtattaatcgggctgacagaaggtctggtgcggcgggatttaaggcggtttggctccgggctggaatccgtttttctccaccgttatgttatcaggtcttgcagttcagtcgccacgacgctgtgggtgttttatctggcacagccgctgtttctgcctacgaggttagttttattaccagccaccatatggtttggaataacggtatggatagctgcaggaagctttaaacgttggttgtaa

SEQ ID NO: 193200 - DNA, 1116 bp, Klebsiella oxytoca
atgtatctttttaaatattatagacctgactttttctttgataaagccattaggtataatgagctatatttttcagcacctgcacaactaaatgatccaaatgacttgaacctagattatcgctttgataatagattgaatctttggagttatctgctgcattcgaaatgtgagtactcttacgaggatttaagtcatatattagatttgagtcagttaaaaatcgtgcaaggattgaataaaattttcaaaggtaaaagaattaagggtaatcttgaatcactcgacaacctttttgatgagcatcttgatgatatacggaaagttatacgtgaagggatgttgccaataaatagaattaaccccattatttatgataattcgcctgaacctgagcaaaagttagtaactatatgtgaaaatggtattaaagagagattatataggaaaataattccggcagtttttagtgtgtctttttccagcaacgcgttagatcgtatgatgtgggcacattatgcaggtggttttagtggatgtgtagtgatatatgaaactcaacaacgtgttgataatactttatcttttatgaagttaagggataatgtattttcgtcaaacacttttacttttccaattaaacctatcaagtatagcaatcaagctaaagaagtatcattactggagcctggtgttgatattacagaattattttgtgttaaaaataggttttggaagtatgaatctgaatacaggatgtttgtccctgaagcaaacgtagggattggaaatgaacgtgatgttaaagatattattaatcgtaatgtaggccatatttttcatcatgatgttagtgctatacaaggagttatatttggacccagaatgagtacgctgaagaaagaagaaatatggcaaaccataaaatccaatatggaaaatgcaacaaatccaaaaccctgttatttttttgactctgaattatccccgacagggaagattgctatctcaatggggcagcaagcaataccaatgcagggttatgcgcttatcaaaacaaccatgaactcaactcaattatcggagattcttaatgatattggtatcgctaaataa

SEQ ID NO: 193201 - DNA, 1503 bp, Klebsiella oxytoca
atgagaatcgaaataaaaaacttaaaaggtatttccgagcttaatttcgacatccctggccaagggttatggctccttactggtctaaatggctcaggcaaaactagcctattagccgctttgtatcgaataagacatagtcgagcttttcaagatcattacaagactacagcgacacaagaaaaattagatactttcaaaaatgcaagaattacatataagataaatggaagtgaggttacgtattcctatggagggaaaagatggccaccaacgccaagagcaaacgctaatattttatctaattttccttacgcaagcatccattttattcaagctaacggtaacagagtggagccttatgctgatgaaataacgactagaagaataaaggatgtaagctcaggagtctgtagcttcttatcttatgtacttcataataataactggaattccttaaaatttgttaataccagacgaggcactggaaaccaagcattccttcttccctatagggctggaagagaaactcattactattcagaaaaaaacttcagtctcggagaactatgcatcctgaaacttgcgcaaaaaatagttgatgtagaaaacggctcattgattctaatagatgaagttgagatggccttacacccacaagcacaagttcgtctgatcaataagttgaatgagatagctagtgataaaaatttgacaataattttttcaactcactcatcaactctaatcaaaaatacagataaaaagaaaataattttcatttcaaaagatgaaaatggagtatgtacaactataagagatgtatttcctgcacatgttctcggagaaatagcttttgatgaagaagttaagagtgattttattttcttcgtagaagatgaagaagcaaaattactattagagcaactttgtggaaaattcgaagagaatagaacagctcataaacctatgtttaaagttgttccagttggtggatactatcaagttatgcaaatgctagagagatcagcgttaattattcctcagcacgtgaaacgtcatatttttttagatgatgatgttagaacagaggctcttcccgaggcaagaagacgtagatcacgtgcgataacagatttatatgatcggattcagaataaagtatcatttctaccttgcacccctgaaattggtgtgacaaatatgctcgaaaatttttacaacaacacaaacacgactgaattaaatattaatctctatggttcaaacgtaaatattactaaccacattatgttaccagaatatcaaaatataactggcgactcccctcgtaaagtagctaaacaaaaattagattcaattgtaggatatattcgcacacattgtggtactgacgaaaatacagttcgtcggtttttgtatcgtaaatacatagatcaccattattcgagtggaatagctcctcttatgcagttgcttggccctatactcaattcacgctag

SEQ ID NO: 193202 - DNA, 237 bp, Klebsiella oxytoca
atgacttctatctactcaaatgactaccagatggtgattaaagctctccgggaagcgcggattgcttgtggcattactcagcaggaggttgccagtgttttcggaaggccgcagtcatttatagcaaaggtagagagtggagaaaggcgtcttgatgttgtcgagtttgttcgtttctgtcgtgcggtgagtgttgatccagttagtattttagaaaagttattgtgtgatagctga

SEQ ID NO: 193203 - DNA, 375 bp, Klebsiella oxytoca
atgatgatttactgcgcacgtattactgccatcgggctgtttgtcgctgacggcctgaccgacaagatgctcatcaccttcgacagcaacgggccgaaagactgcctcgattactccctgtcgctggagccgtcgttccgggaagagagcctgatgatactccccggcgaccgcctgatgctggcagggcatgattatctgattactgccgtcggcaagggggcacagcaggcgctgtttgaactcggccacctgacgctggtgttcaacggcgacctgaatccctgccacgtaggtgcggtccatctctccggcccggtgccgaaactccatgacctgcacggtaacctggtgattgaggagggacagccatga

SEQ ID NO: 193204 - DNA, 981 bp, Klebsiella oxytoca
atgaacacggtgcttattccgcccggccccggcggctacggtaaagggctgtggctgcccgttggcagcggcaaaaaggtgctgtcgctgaccgggcgcgaaatccatccggtagcgatagaaatcggcgcgctcaccgaatcggaaatcgttaacggcttcgccgatatcccgccggataacgacatcctgtgcgtggtgattaactgcgccgggtccctgcgctgcggcctgtacccgcagaaaggtattccgaccatcaacgtgctccccacctggcgcgccggaccgctggcgcactttattaccgaagagaattacgtctccggcgtcacgatggagcaactggttctggtggataccgccgaagcgccggacggtgaaccggagtccatgcctgtcgctgcgccacgggttaccaccactccgccgcctgcgcgtggcgcagagaagctggtgcacatggtcgagcagaccggcaccgccgtcggtcacgttatcgccctgctgttcgccgccagccgggaagcggtggacgtgtcgctgcgcaacgttatcccgtttatggcctttgtctcactgctgattgccctggtgcaggagaccgcgctcggcagcctgattgcccatgccctgacgccgctggcgaactcgctgtgggggctagtgctgctgtcgctcatctgcggcattccgttcctgtctccagtgctcggcccgggtgccgccatctctcaggtgattggcgtgatgattggtacgcagattggcgcaggggcgatatccccggccttcgccctgcccgccctgtttgccattaacgtgcaggtcggctgcgactttgtcccggtgggactttcgatgcaggaggccaaaccggagaccatcgcgaagggcgtgcctgcctttttactgtcgagacaactgaccggaccgctggcggtaatagtcggctggctgttttccctgggcttattctga

SEQ ID NO: 193205 - DNA, 1005 bp, Klebsiella oxytoca
atgaacatgtggcgatggatgattattctggtcgggctgatagtgagtcaggcttcatgggcgttgtgctccgcatcggggagctttgcgatcaatgtgggtacgatcgtagttcagcgggacgcggtagtcgggcagcccatcagcgactggctgacgtctaaccagggcgtggcataccagaactgtaattatgaccccacaccacaatatctcatcgtagcgggtatcaaaaacacgggctcgaaggccagtgtcacctggaatggcgaggcggtgtttaacactaatgtggcgggagtaggattcgtttttgaaggccgcacgtcattcgacagtaatcccttacccgataactggacgggcatcgccagcggccagtcacaggtctttactacccagaccagccacagttccggctaccacccttccattaacgatcaggcgcggatccggctgattaaaaccggcaatatcacgccgggtaccctgaccggtaaccttggacgttttattgccggaacacgggaaaatgcgcagtggtcgacagagatccctatcgctttttccggggggaaaatcacgaccgtcgcctgtacggtgaacacgcctgatgttgacgtgaagctcgatcaacacaaaaaatcggagttcagcggaccgggttcggcaaccgaatggaaggcgtttaacatcgagctgaattgtgacaaaagctcgcgcatcaacgtccggatcgatgccactcaggatccgtcgaatgtcgccggtgtgatgaagctggatagcgcggctggcgatctggcggcgacggggatcggcgtccagttgtactttgtgccggataacagcgctgtgcagttcggacaaacgaaattctattacacctcgccgaatggcggttttgaaacagtgcagcttaaggcgcgttattaccagacgacgtctgcgatcacggctggtgaggcaaacgccacggcgaccttcacgctgacttatcagtaa

SEQ ID NO: 193206 - DNA, 2532 bp, Klebsiella oxytoca
atgaaaaatccaacttcccggctgatggtatttctgctggcgctgctgctggtgatggttctgctgctggggtatctccgtcacgcggaggcccgtgagatcttcaaccctcatgcattggagatcgacaatcccggccagccggtggcggatttatccacctttgctgaagccgacggccagctacctggcacttaccgggtcacggtttatgtgaatggtgaacggcagggacaggcgcaggatattgcctttatctccgggccggacaaaaagctcagcgcgcaggtcacgcccgcgatgctgaaagcctggggcgtcaaaacggacgtctttcccgcgctggcggcactgcctcctgaaaagccgctggaaaatattggtcactacatcccgatggccaccaccgatctgcgtttcagtcagctgcaactgaatgtgagtatcccgcaggcggcaatggatgccagcgccagaggcgcagtggatccgtccgaatgggacgaaggggtgcctgccgcgctgctgaactataacctcagcggcagcaatacctggcgcaacggggaaaacggttctgatgacaactactacgctaacctgcaaggcggcctgaacctcggcgcgtggcggctgcgcaactattccacctggaattacgatgacgaaaacggcagccactgggattcggtgaacacgtatctccagcgggatatccagcgcctgaaagggcagctcacgctcggcgacagctacaccccgtcggacatctttgacagcgtgcagtttcgcggcgcgcagctcgcctccgacgacaatatgctaccggacagcctgcgcgggttcgccccggtgatccgcggtatcgcacagtcgaacgcccaggtgaccattaagcaaaacggctacatcatctaccagagctatgttgcgccgggggcgtttaccatcaccgacctgtacccgacttcgggcagcggtgacctggaagtgaccatcaaagaagctgacggcagcgaacgtaccttcattcaacctttttctgcggtaccgattatgcagcgtgaagggcatctgaaatatgccctcaccgccgggaagtaccggagcggcaatgaggacagcgacgaaccgcagttcggccaggtgaccgcgatttacggcctgccgcatgccattactgtttatggcggcacgctgtattcggaggattaccagtccggagcggcggggctgggttttggccttggcgagctgggttcgctttcggctgatattaccgccgcgcataccaccctcaacaacgatgaaacccacgacggccagtcgtaccgggttcagtactcgaaggattttcagaccactgataccagcttcacgctcgcggcttaccgctattccacggagggtttctacaccttccaggaggcgaacgatctgcgttcggacagcgatgatggctggcggatgacatacaacaaacgccagcggcttcagctggatctcagccagagcgtaggcagctacggatcgatttttgtctccggctaccagcaggattactggaaagaggacggttatgaacgcaccctgagcaccggctggaacgggaatattaacgggatcagctacagcatcacctacagctacagcgattacccggaaagtacccagcctgccgatcagcaactggcctttaatatccaggtgccgctcagcaaattcctctccggcgaggcggcaaataatgcctgggccagctacagcgtcaacaccgctaaacatggcgatacccgccagcaggccgggctcaacggcaccctgcttgctgacaacaacttaagctacagcctccagcagagctacaccaaccatggcgtcggtggttccggcaatatcaatgccgattacaaaggcggacagggggaaatcactggcggctacaactatgacgacgatacgcagcaggtcaactatggcctgaagggcggcgtggtggttcatccgcacgggctcacgctttcccagccacttggcgagtcgctggcggtggtcagcgccccgggcgcggatgaggcgaaggtgcagaacaacaccggcgtttacaccgacggacgtggctatgcggtggtgccgtacgttaacccgtacaagaaaaaccgtattgcgctggataccagcacgctgggcgatgaggtggatatcgacaccgccgtacagaccgtgacgccaacgcagggggcggtggtgatggcggagttcaacacgcgcgtcgggcgacgggtgctgatgacgctactgtatcgcggactgccagtaccgttcggcgcgcaggcgaagctgaaagaggggggcagcggcattgtcggcgacgacggccaggtatacctcactggcgtgccggaagcgggcgagatcgcggtgagctggaacggggtgcagcagtgcgtggtgcattatcggctgccggaactggaaaactcgccaccggtcgttacggtgagtcaggaatgtcttgaggttggaaaatga

SEQ ID NO: 193207 - DNA, 681 bp, Klebsiella oxytoca
atgaacaggtatgcagacgttgcgctggcgctattgctggcctcctttaccgtgcaggcgcaggccggaatagtgattggtggcacacgcgtcatttatgacggagataaaaaagagacctccgcatccattcgtaatcccgagaaatccagtgtttatctggtacaaagctgggtggacagcggtgagcaaaatgcgaaagcgccgtttatcgttaccccgccgctttttcgtattaacccgggtgaagagaatatcctgcgcattgtgcgtaccgggggaaacctgccgcaggaccgggagtcggtcttctggctgaatgtaaaatccatccccgcgactgatgacagtaaaccccgcaccaacgtgctgcaggtggtggtgaagtcgcgcctgaagctgttctaccgtcccgccgggctggacggtcggcctgagaccgcttatcaccagctctccgtcgcccgcagcggcaaccgtcttactatcagtaaccctacctcttattacgtcacgttatttaccctgaaggtggacgggcaggagattaaagacgcggacatggtgccgccgaaaggcagcgcgagtttcacgctaccttcggcatctgtctccagcgtgagctggcaggccatcagtgactacggcggcgtcagtcagactgaaagccgcaggctgtga

SEQ ID NO: 193208 - DNA, 513 bp, Klebsiella oxytoca
atgaaacaaatgatgttaagcgcgtgttttttgctggtggcgggtaacgctttagccgctgacggaaccattcattttaccggaagcattaccgatcaaacctgtaccgtcgataccggctcacaaaatctaccggttgatttaggcaacgtcgcgcagaccgctcttaacggtgcggcagggatgaaggcggcacctacgcgtttcacgctcagcctgagtgattgccctgacactgtaacgggggcaaatgtgaaatttgacggtacctctgatggcgtaaaccagaatctgctggcgctggatagcggcaccgggatcgctaccggcgtgggtatcgaaattgccgacagaaatggcaccgcaatcccactgcatacggcatcgacggattacccgctggcagaaggcaccaattcgctggactttatcgctcgctatgtctctaccggcactgcggtcacaaccggcacggcgaacggtacctcgcagttcaccattaactacaaataa

SEQ ID NO: 193209 - DNA, 462 bp, Klebsiella oxytoca
atgaagaatctaggcgtctggattaaagctatagcgctattcatattatgcttagcgttatcgtcaaccgataaacaggtttataccctgcttgagcaggcatcggcaggggtgatcggctcaattcttggagggattactgcagggatctctgtaatttttggcattctggcggtcatcaataaggggcaaaaacgctcaagttttacaagttacttgggaagtttagaagctgatctgaaattacttgtgatctgtttaggcgcaacaatttttttgccgtaccttcgaaattatgacttacctctaataaattatcccaagcatgagttgattccttctaaggataagttatttactgcggcagagctgtttgccgtagtgctttctctcaatctcattgttgaagtgataagttgcatgattttagtagttaaacaaagtctgaaaacggaagattga

SEQ ID NO: 193210 - DNA, 897 bp, Klebsiella oxytoca
atgcaattgttcgccttacgtgtgttaatgagaccacgcgaccctgatcttttttcaaagggatctgttcaaaaagacattgtacattttgaaaatgccatagtattcagcgcgcaaaagttacatctgacatcatcaacaccatccgttcataagaaaaccagctataccctgaagctgagtataaaacccactgaaggcgtcatggctggggtcatatcaaaacagcaaaaaattaaaggacatgataaggattttcgcgagttcgatgtagacaattatccacctatcgtatggatctgggatagagaagagcaagtgttattggtcgagaagaaaacagcggtattcaaggatgcgcatcaagttgctaaggcatttgaagatcttgccaacaacgactatttggctcaattgggactaagagtatttatcgaagcttgccttgaaatggaagatttttggtctgaatatcatagacttcagtttattgataaagttagttttacgttgattactccgaatattttcggaagtagcaagcaggccttaactgacgatttgcgaaagcttgaggcagatactaatgcaaacgctgtaaccacaacatttgaaaacacagatggtaatttaaagcttaaaggttctcattgggcatctgtttttgttgattgggtaaaagatggtggtggttcttggttaattaaaggtcgaaaaacactcaaatcaaaacctacaactgtatccagtaatcaaacggccaagatagtccttatcgaaggtgagatttcagaaattcagttagatggttactcacctagtgatatcaaagaaatcatagcattacatcaaaaaaggtacacatacaaaaatgaagaatctaggcgtctggattaa

SEQ ID NO: 193211 - DNA, 528 bp, Klebsiella oxytoca
atggaaccaacattgtcattaaccgtgatgttctgtgctgcagtgggtgcttcagtatcagagtcgctgtcagagtccgagtcgctgtcggagtcagaatcgctgtcgctatccgagtcgctgtcggaatccgagtcactgtcggagtcggagtcagagtcactgtcagagtccgaatcgctgtcagagtccgagtcgctgtccgagtctgaatcactgtccgaatccgagtcgctgtcggagtcggaatcgctgtcggaatcggagtcgctgtcagagtccgagtcgctgtcggaatccgaatcgctgtcggagtcggaatcactgtcagagtccgaatcgctgtcagagtcagaatcactgtcagaatccgagtcgctgtcagagtccgagtcactgtcggaatcagaatcgctgtcgctatccgagtcgctgtccgcatccgaatcgccgtcagcatccgagtcactatcggagtccgaatcactgtccgcatctgagtcagtttctgaaatcgaagagtggtga

SEQ ID NO: 193212 - DNA, 240 bp, Klebsiella oxytoca
atgctgaatggcgtcctcagctccagttatccgacaccatcctcccgtgggcatcactatggctgttttattttgaacagtggctattttccggaaaatgggaaggtggcggggcgcatccgaatgaagatgatgcaggtatctactatgaagattaatctgctttatacctgtattatccaatccagtaaccaattattggtggataaaataaaattcctttttctaatgatggactag

SEQ ID NO: 193213 - DNA, 333 bp, Klebsiella oxytoca
atggcaacggctttcaacgcggagagccttcccggagacggtgcgctgagcctgtccgggctacctgaccgcaggcggctgtgcaactgtagcccgggcaaggcgcgtcaggcgccgcccccgggagagatatggcaacggctttcaacgcggagatatttccacgcctcaaaacagcaccggcagccccagcccgcgttttacttcatgcagcgtccgttgtgtcagttcgtgcgcccgttcgcttccccggcgcagcagcgccagcagcatgcctttatcctgaatataagtcgcccgacgctcgcgtatcggcgccagcagctcctgtaa

SEQ ID NO: 193214 - DNA, 3387 bp, Klebsiella oxytoca
atggcacactacagcttaacgccgcgcgtcaaagtgttggcagaacgtttactctcacaaaaaagcaccctgtgcaccgaacatgccaccacgctcaacgcccttgatggcgatatcgccggggttcccgccgccgtcaaaccggcgcgccgtttctatgaactgatgcgccagctgccgctgtgcatcagcgccgacgagctgatcgtcggcaaccagacccgcaaaccgcacggggcgattttccacgacgagagcgccgcccgtcgcccgtccgcgttccagtttctcaatctgaatagcgatctcgactccccggattacaagctggtggtcgaaaaaggcgtactggcgataaaacatcagctggaagagaaaacccgcgcgctgggcagcgccgtcagccgcagcggcatggacgaagtcaatggctgccgtgcggccatctacgcctgcgatgccctgctggcgctggcgcaaaacctggccaacagcgcggaacagctggccgccgcggaaaccaacgcttaccgccgggcggaacttctggacagcgccgccattctacaccatgttccggcgcatccggcgcgcagcttcaaagaggcgtgccaggccttttatctgttccagctggcgctccagctcgataacggcagctacgccgtcaacccggaaggcgccgacaaagccctgctcccttactaccagcacgatatcaacaacggcgcgctctccccgcagcaggcgtatgaaatcgtcgaatcgctgtggttcaagctggcggaactgtgcgaagtgcgcgccgcctgcgcgatcgacggttatccgatgtttgacgccatgctgcacggcgcaagccttgagaatgcgcgcatcaacgaactctccgacatgttcctcagcgcgcaacaaaacctgagcgccctgaatctgccggtgcgtctgttcaagggagtacaacacgtttccgccgccccgtttgccgccgccggcgatacgccggcagcagaagggctgactccgcgcatgcagcgcctgcgcaaccactacctgaccgtgcgcccgagcgtctctatctatcgtgcgctggcttttaccgaagtggtcaaagccaaccctggcatgccgacaattctgctgcgcgccaaagccttccgccacgcctgcgaaaccgcgccgattctgattcaggatgatgagctgatcgtcggtcatccgtgcggcaagccgcgcgcgggcgccttctcgccggatatcgcctggcgctgggtgcgcgacgaactcgataccatgagcacccgtccgcaggatccgtttgagatcagcgaagcagataaaaaaaccatccgcgaagagatcgtaccgttctgggaaggccgctcgctggacgaaatctgcgaagcccagtaccgcgaagcgggcatatgggcattcagcggcgaaaccttcgtcagcgacctctcctaccaccagatcaacggcggcggcgacacctgcccgggctacgatgtgctgctgtttaccaaagggatgaacggcattaaagccgacgccgaggcgcatcttgccagcctgagcatggaaaacccggaagatatcgaccgtatttactactacaaggcggccattgaaacctgcgaaggggtgattaactacgcacaccgcatcgccgcccgcgcccgcgaactggccgccgttgaacagaacgcccagcgccgcgccgagctgctgaccatcgctgaggtgaaccagaacgtgccggcgaacccgccgaaaacgctgcaggaggcgctgcagagcatctggaccgtggagtcgctgtttgaaattgaagagaaccagaccgggctgtccctgggtcgcgtagaccagtactgctacccgatgtttgaagccgatatccgcgaaggccgcctgacgcacgacaccgcgctggagctgctgcaggcgtttatcatcaaatgcgccgagctgatgtggatgtccagcgagctgggggcgaaatatttcgccggctatcagccgtttatcaacctgaccgtcggcggtcagaagcgctccggcggcgatgcctgtaacgacctgacttatctgatcatggacgccgtgcgcttcgtgaaggtttaccagccgtcgctggcctgccgtattcacaaccagtcgccgcagaagtatatggaaaaaatcgtcgacgtcgtcaaagcggggatgggcttcccggcctgccacttcgacgactcccatatcaagatgatgctgcgaaaaggcttcgatttcgaagacgcccgcgactactgcctgatgggctgcgttgagccgcagaaatccggccgcatctaccagtggacctccaccggctacacccagtggcccatcgccattgagttcgttttaaaccgcggtcggatggtgctgtttgacagctatcaggggctggataccggcgacctgcgcgacctgcacaccttcgaagcgttcgacgcggcggtgaaaaaacagattgcccatatcgtacgcctgtcggcgatcggtacggtcatcagccagcgcgtgcaccgcgacgtggcgccgaagccgctgatgtcgctgctggtagaaggctgcatggaaaaagggaaagacgttgccgccggcggcgcgatgatcaaccacggcccggggctgatcttctccggtctggcgacctacgtcgattccatggcggcgattcgtaagctggtgtttgaagataagaaatacacccttgagcagatgcgcgacgcgctgctggcgaacttcgaaggctttgaaggcctgcgtcgcgactgccttaacgcgccgaaatacggcaacgatgataactacgttgaccagtatgcactggatatcaccgagtggaccgagcgcgagtgccgtaagtacaagatgctctactccaccctgagccacggcacactatccatctccaacaacacgccgatcggtgagctgaccaacgccacgccgaacggtcgcctggcgtggatgccgctctccgacggtatcagcccgactcagggcgcggataagcagggtccgacggcgatcatcaagtcggtgagcaagatgaacgtcgaaaccatgaatatcggcatggtgcacaacttcaagttcctcaaagggctgctggataccccggaaggtcgtcacggcctgattaccctgctgcgcaccgcgtcgattctcggcaatggccagatgcagttcagctatgtcgataacgaagtgctgaaaaaagcccagcaggagccggaaaaataccgcgatctgatcgtccgcgtcgcgggctacagcgcctacttcgttgagctgtgcaaagaagttcaggacgagattatcagccgtacggtaattgagaagttctga

SEQ ID NO: 193215 - DNA, 285 bp, Klebsiella oxytoca
atgggtgatgcattaggtctgatcgaaaccaaaggtctggtggcctgtatcgaagcggcggatgccatgtgtaaagccgccaacgttgaactgattggctatgaaaacgtcggttccggcctcgtcaccgcgatggtgaagggcgacgtcggcgcggtgaaagcggcggtggattccggcgtcgaatccgcgcagcgcatcggcgaagtggtgacttctctggttatcgcccgcccgcataacgacatcaacaaaatcgtctcgcattacaaaatcatggattaa

SEQ ID NO: 193216 - DNA, 606 bp, Klebsiella oxytoca
atgaaatttgtaaagataatgatcatcgttagtgctttttatgcaacattcactcaggcagcaggtgagccgccagcgccttataagctgcgatgggagatgagctatgatgaggccagaaacacgcctttatattcactggaagtctccgatataaattacgcgggtaaagatcccgatctgattatctcaacgctttcccctcaggaagtcggtgagttgcaatataaggagatgaccctttactttgataaaaaaaaagggctgaagagtattttcatgggcgccgttgttgattctggcgaacgggcctataagattgatgatggcaaggaggcgctggctttatacaatcaggaaataaaggttcttgaccgggaatatggcccggcggtaaccaaagaagaatttatggccgataataataaattctatcatagcctttctgcctgtattgaaaaacagcaagagtggtacaacaaaaggttggatccgaataaagtaactcactgttcaaaatggcagcgtagttataaaaagggacgggtaaccgttttgctgtacattgaaccgagacaagtttcaaaacaatatatttataaataa

SEQ ID NO: 193217 - DNA, 822 bp, Klebsiella oxytoca
gtgaaaaaatataaaatcctgctaaagattattgctctgttcgcgatggtcatcatgcttacttattgccggcagtcttattatatggcgaggaatgcgggacgcaacgtcatgaccttatacgaccatcagcacgcggtatccgcgctaaacgctaacgatttagatgcggcgcaaggctacctgacgggggaaaagtacaataatcgctacagacccgttggtggggctgaaccctggggaagtctacaatatcgggcggcgaaaatcgttgccagcgcagcggcaaacggtcaaaaagtgcgtgatgacgcacgttatctcgcctggatttccttgtttgaagccgaagagggggtccccgaacgtcccgacattatgctgggttacatgcatcaagcgatggcgctactgttagcgaatccgcagttgctcgataaaatcgattctaaaaacgtccgtactttacccagccagtttacccttgagcgctatgcggtatggcaatatttaagcgatggcggagagattgactggagcaaaaaggcgcctgcgggtgaaggttatacaattgctggcgaaagttatcaggtctggaatatcagattaagaaaagcgctgtggaatcgtggggatgcctttttaacaaatattggtaaagaacaatttattcatgacgctatagattattctcagtttccggttattgcctgtaccgccaggcgaaaaggctggcatttaacgttaccagcgaactaccctgagcaaaatttccgcggcggcgggcgttttgattgggcttcatgtcgggacgttgattaa

SEQ ID NO: 193218 - DNA, 645 bp, Klebsiella oxytoca
atgagtgtggtggaagttttgcgggagtattcagaggtatggaaactatttggtcaaatgcctgattctgccactgtaaatagtgagcttgcttcagtctttcttggcataagcatcaaaacccttgcccgatatagacaaaatgggggaggtccaccttatatccagtaccaagcagaagatacgaaagcgagaaatcagcgggttctctatgtattaggtgatctgcgagtttggagagatatccataaagtaagtagttcaatgcatggtgctcaggttcgtggtttggcttttacatcattgacggattttatagaagagcatccttttattgttagaaataaaatcatccaaaaaaggaaaataaaaaggttaggagttagagattcaaaaactgagatatacgatgatgttatcttagggcatatactctgtgtggaagaaacagttttaacaagccatatatctaataacgatttgcaagttatttgggtttcaatcgaagaagctttgaaaaaacattgggaacataacgataataaaaatatatttttaaaatgttttaagctgtgctcagaagaaatcattacaaatgcagaaataattagtgattataattttttaaaacagcaattgaggtga

SEQ ID NO: 193219 - DNA, 1980 bp, Klebsiella oxytoca
atgaaaattacacaaatggagatcaaaggctttaagagctttgataatgtaggacaaattataaatataaattcattcaccagcttaattggaggaaatggaacaggtaaaacggctgttctcctcgcattgacaaggatgtttggtgtcaaaagctccgatagaattattcaagttgatgatttttatgttcctcctggagatgaaatcgatactcaagatgaaagagagctatcagttcgtgtaaaattcgaatttgcagacctaaaagatggtgaggacgattcggttgcagatttctttaagcatttaatttcaagtgcagcaggagagatcccattctgtatagcaaaattaaaagcaaaatggacaaagactaatcttgctgaaggcgatatagaaagcgatctggtatgggaaataggggagtctgaaaaaaatataacggcatatgaaagatcaaaaattcatgtccactatgtccctgcttaccgtgatcctgctcaacaactgaagcaaacagccggaaccatcatgcaccgtttgataaatgcagtcgaatggtctgaacaaatgggggcaacagttgatgaggttgctgtttcaatcggaaatcagttccaagaagaagtaggggtccagacaataacatcttcattaggcagaaattggaaatcccttttcactggtggttacttcgaagaactccaaattaagccagtagtgaatggtattgaagatgtattaaaacatatagatactgtgtttttaccaagtccagatactcaaccattgccaactgaaagattgagtgatggtatgaagtcattattttatttatctttagttaaatctgcatttgatattgaagatgagataataaattctgatggcaaacaattatcgatatcagtagaagcattagatcctccaaatttaacgataatattaatagaagaacccgaaaaccacctttcaccacaatacttaggaagaatagttaagctgtgtgaagaaatatcagaaaatgatcgagcacaagttgttttgacaacacatgcaccatctttacttaatcgggtagaacctgagaatataagatatttccgtcttaatgataataaaaatacagttgtcaaggagatattattaccaagcgaagatgaagatgatgcagacaatgtggacactttcacatatgttaaggaagctgtaaaagcatatccggaaatttattttgcaaaagttgtcattcttggtgaaggtgacagcgaagagattgttattccgaaaatagcacaagtaaatggaattgaacttgatacttcattgataacatttgcgccattaggtgggcgatatgttaatcatttctggaaacttttaaatgagctttcaattcctcatgtaactcttcttgattacgatttcagaagaggcggtggtggttggggaagaattaaatatgcaataaaacaacttatttcgataggtgaagataagaatgaattattgagtactactacagggattttaaatgatgaaaaatttgaaaaaatgcataaatggaaggagaatccagatagtgaacttggatggataaattttctaaaaaattataatgtatatttttcctatccctatgatttagattggatgatgcttaataaattctttgaggattataagacatttgttccagaaaatggaggcccaagattgccaaaggatgatgatcctgaatataacaagaaagttgaagcagcaatagcttcagttttgaaaaaagaagaaaaagacattgatattaagaagttcgaagactttgaaaaatatttttggtaccgctacttatttttaggaagaggtaagccattatcgcataattatgttctatcgaaaatggaagacgataggttaagagataatagtcctgaagttcttgatgaacttatcgaaactgttagaggattactttaa

SEQ ID NO: 193220 - DNA, 168 bp, Klebsiella oxytoca; identical to SEQ ID NO: 111884

SEQ ID NO: 193221 - DNA, 510 bp, Klebsiella oxytoca; identical to SEQ ID NO: 158772

SEQ ID NO: 193222 - DNA, 546 bp, Klebsiella oxytoca
ttgcgcttcggtgacgctggcggcgaaggtgtcccagggcataacggcctcgatggcggcgaacggatcgctgccgctttgcttggcctcaatcaacgcttgaccgatgcgcccatacatccgcaccttgtcgttgatcgccttgccggaagcctggaactgctgctgatgcttgttcttggccgcgttgaacagcttgccgatgatgcgatcgtgaaggtcgatgatttcatcggtgacggtggccatgccttcgatggccagcgctaccagcgtggcatagcgtcgttgcacctcgaactttgccagatcagcaggcgtcatctggccaccttcacgagcgattttgagcaggcggttctggtgaacctgccgctcgatgcctgcgggcagatcaagtgcttgccaggatttcaggcgctcaatatgttcgagcatgtggcgagagttcggtttggcaggcgactggcgcagccatgccagccacgtcactttactgccgtccttgcgcttgagaagttcgtccaggcgctgacggtggggtga

SEQ ID NO: 193223 - DNA, 366 bp, Klebsiella oxytoca; identical to SEQ ID NO: 157173

SEQ ID NO: 193224 - DNA, 291 bp, Klebsiella oxytoca; identical to SEQ ID NO: 102305

SEQ ID NO: 193225 - DNA, 570 bp, Klebsiella oxytoca; identical to SEQ ID NO: 102306

SEQ ID NO: 193226 - DNA, 279 bp, Klebsiella oxytoca
atgctggaagatcttagtagttcaaaaagcgttgttgcaagattaggaggtgatgaatttggtgttctattacccgagtcaacctataaagaagcagaagaattccttcataaattgagggccgggattaccagctacaatcttaattctcaaaaaaaatacaacatagatttttctgcagggattattgaatatgatgaggaaattcatactgaatgctctgctatcatgcaggatgcagacgaaagaatgtatgaaattaaaaagggaaaacgatag

SEQ ID NO: 193227 - DNA, 234 bp, Klebsiella oxytoca
atgctcaatgatttcagtccgaacggcgtcgcgcagctgaatctgttcgatgacgtgcagccacggccgcacagcgatgcgctgatgaaggtactcgacggcattaatcattccggactcgggaaagtctggtttgccggacggggtattgcgccggactggcagatgaaacgggagatgctgtcaccggcatataccacccgctggaaggagctgccggttgcccgtttctga

SEQ ID NO: 193228 - DNA, 1512 bp, Klebsiella oxytoca
gtgatgtacggagaggagaagtcggactcgctcatagtagctgcgaatctggcgaacaatccgcaaggagcggagtcagtggagcgaaggagcggggccaagggaaacgcggaacagccacacatgcgccggacgcagagccgggaaagtatgtcacagaggctgtcacgcgtgcgggaagctgcgaagcagcggaagaaagaacggtttaccgcattgttccacctcctgacagcagaggcactggagaacgcattcctctccctgagcaggaaagcggctgccggagttgatggtgtcaggtggaaggactacgccgaaaacctgaaggtcaacatagcagatctgcaccggaggcttcatcagggtagttacagggctcagcccggcaggcggcactacatcccgaaagcggatggaaaacagcgcccgctcggcatcgcctcactggaggacaaaatcgtccagtatgcgctggttaagatcctgaatgcagtctacgaaaatgactttatggggttttcatacgggttcagacccgggcgaagccagcacaatgcgctggacgcactggccacagggctggttcggaccaatgtaaactgggtactggatgccgatatcagtcagttcttcgacaaggtaagccatgaatggctaatcaggttcatagaacacagaatcggcgaccagagggtaatcaggctcatacgaaagtggctcacagccgggacctcagaggaaggagaatggcgggcatcggaggaaggagaatggcgggcatcggaggaaggcaccccacagggtgcggttatctcgccgctgctggcaaacatctacctccactatgtcttcgatctgtgggcgcatcagtggcgacgccgccatgccacaggcaatgtggtcatggtcagatacgcagatgacatagtcatcgggttcgacaagcgaatcgacgctcaatgctttcgtatagccatgcagcgcagactgaaggagttcggactcacggtacatccgaagaaaacccgactgacggagttcggccgcttcgcagccgaaaaccgcgccagcaggggaaaaggtaaaccagaaacgttcaacttcctcgggttcacgcatatcagtgggaaagatcgtagtggcaggttcatgctgatacgaaagacacgccgggacaggatgacggcgacactgaaagcgatcaaggacggactacgaaagcgctggcattactcaatccccgaacagggaaaatggctcaggagagtggttcagggatacctgaactaccactcagtcccgggcaactatcccatgatgcggaagttcaggatatacgtaacagacctctggcgacgggcgctgaggcgcaggagccagcaggatgatacgacatggacgaaagcaaacagactggcagccgtatggctgccgaaggttcgggttctgcatccatggcctgtggagcggttcaccgccagacacccaaggcaggagcccggtgcgtga

SEQ ID NO: 193229 - DNA, 468 bp, Klebsiella oxytoca
atgctcttctgttgggtgcgtcttttcacttatctatcgacgaaagtgtcgtttggtatcaatagcggagttttatttttttatctaaacggtcagtgccaccaaggcgctgcctgctgtaaacaacgcaattatccagcccatcgtccatggtgtgccatcacgaacagtgcgagaagcactgaagagatgatgccactgccgtattgtaacgcgtccattagcgccgacgctgagcctgcaacattaggcattgagtcaagtgcgcaagccgtggacgttgccgcgatgatgtcattcatggagaagaatacgaatacagcgccgacaatcacggtaattccaccaacacccaagtcagtcgcgacagccacctcggcggcatcagtccggaggcctttgaacaggcctcgtcgtgaggacagaatttgtctacaggcgtggggtcagtccaatgatcccgcataa

SEQ ID NO: 193230 - DNA, 1053 bp, Klebsiella oxytoca
gtgcagacgttagaagcggacgatagcgcgagagaaaaacgcaggaaaaacaccggtaaaattacgctcgctgaagtggcaaagctggtcggcgtcagcacgatgaccgtgtcacgcgcgttacgcatgcctgaaaaagtgaatcctgaactacgcacgcgcatcgaagcagcggtaagcgagctgggctatgtgccaaatctgcaggcccgcagccttgcctctgctgactccagcctggtgatgggcgtggttccctctttttcctccccgggctttcttgccgtctccgaaacactgcagaccgtgctcacgacccagggctacagcatgatgtttatcgagtccggccagggtggacagagtgaagaaaaagcttttgcacaaatgctcgcttacaacccggcagcgattgtccaattcaatattgataacatcagcagttgttcgcaaatgataagtaacaccggcgtgccggtggttgagattggcgccatcaatcacgatgcgagctgggtcagcattggggttgactatgctgccgccatcaaaaaactggtcacatcgcttatacagacgggatataaaaatatcggcctgctttgtactgcctccaataacattatgtttcgccaggtactgagcggttggaacagtgccatgatctccattaaccactcaccacatcgcgttgtgacctctcatctaccggcaggcattacaaccggtttaaatctactgaatgatattcgtatcacctggcctgagctggatgcgctgatttgcacatccgatgaaatcgcctgcggttgcattatggcctgccatggtgcggggcaaaaagtgcccgactctctggcactggcaagcctgagtggggggactcttgccgctgtttgctcaccagccctgactgccgtcgaattcccctggagtgaaacgggaactgtcgcaggaaaaacattgcttgagttactggtaggcaaatcgacggataaagtcattgaattaccttcgactttacaatttcgcgccagtaccagaaagcagtag

SEQ ID NO: 193231 - DNA, 444 bp, Klebsiella oxytoca
atgattacgacctggttaactgcggataatatccagattgtagattcagtcagtgactggaaacaggcaattacgttatcggcccagcccttattggcgaaagaggcgattactgaagattatattcaggctatttttaacagccaccaaaagcttggaccttattatgttttagcgcctggtctggcaatgcctcatgctcgcccggagcagggggcaattaaaaatgggttatcgcttttgcatattaaaaaaggcgtttcttttgactcggaagataatgaccctatttacgtcgtgattatgctatgtgcgctttcgggcgatgagcacatcaatatgattacagcactggcggacatttttagcgatgatgaacggctctcagcactgttgaaagcatcatcaatggaagcaattcaagccgttatcaacggagagtga

SEQ ID NO: 193232 - DNA, 267 bp, Klebsiella oxytoca
atgaaaaaggttctgattgtttgcggtaacggtttaggcagtagctttatcgttgaaatgaacgtaaaaaaaatcattaaagagctgaataaagaagcagaggttgcccataccgacttgacttcggcgaaaagcgaaactgctgatattattcttagcgccagggatattgctgaacatctgtccagccattctgcacaggtttttggtttatctaatttgttagacaataataaaatcaaagaaattctttccgagaatctctga

SEQ ID NO: 193233 - DNA, 1263 bp, Klebsiella oxytoca
atgctgcagtttattattcatgatgtgttgggcacaccagcaatactggtcggtctgttttccctgattggcttattattgcagaaaaaagcggtttccgaagttatttccggaaccctcaaaaccattatgggttttgtgatattaacatccggggcggcgattatcgccacgacgttaacgacgtttagccagctttttgaacactcattccatattcagggagtcgtacccaatactgacgccatggcggcgctggcgcagaaaaactacggtaccgcgacggcaatgatcatggtgctggggatgttgtttaacattgtccttgcccgtattacgccgctgaagtacatcttcctgacggggcaccacacgctgtatatgtcggcgatgctggctgtcatcctctctgtcggtggtctgtcgccgttctgggtagtgctggtaggtgcggtgatcctcggcatcatgatggtggtctctccggccattctgcagccctttacccgcaaaataacaggcactgatgacctggcgctgggccactttggttcaaccggctatctgctgtcagcgctggtggggaaagcgatcggtaaaggcagcccgtcgattgaagagctgaaggtgccgaaatcgctgaatttcctgcgtgactcctcggtggccatctcgctgacgatgatgattctgttcctgattctggtactggtcgcaggcaaagagtttgttgaggccagcatcagtggtggtcagaactttatcattttcgccattatccagtcgctgaccttcgcggcgggcgtgtggatcatccttgccggtgtacgcatgattattgccgaaattgttccggcctttaaaggtatcgccgacaagctggtgaaagatgctaaaccggcgctcgactgcccaacagtctttccattcgctccgaacgcggtgatcgtcggcttcctgtcaagttttgccgcaggtctggtgagtatgttcctgtgtccgctgtttggcttaagcgttatcgttcctggcctggtgccgcacttcttctgcggcgcgacggcgggcgtttacggcaacatctgcggcggtcgacgcggtgcggtggtgggggcattcgctcacggcctgctgatttcattcttgcctgcaattttgctgccactgatgggcgaccttggctttgcatccactacctttggcgatgcggacttcggcgtagttggcatcattcttgggcatgtcgtgacactgtttaactaa

SEQ ID NO: 193234 - DNA, 678 bp, Klebsiella oxytoca
atggcggctaaattttcgccctcgttaatgtgcatggatttaacacagttcagagagcaaattacggcaatgaacggtcgggctgatttttatcacgtcgatattatggatggcagctatgtgaagaacattacgctatcaccgttctttatcgaaaacctgaaaaaaatcaccgaggtgccgatcgatgtgcatctgatggtgaatcatccggaagatattattcctatgtgcattgatgctggggccgatattatcagcttccatccggagacggcgaataacaaaatcttccgtctgctgaaccagattaaagatgcgggtcgtcgctgcggcgtggtgttgaaccctgccactccggctgatgctattaaagagtatgcgcatctgctggataaagtgaccgtcatgtcggttgacccgggctacgcaggccagaagtttatcccggaatcactcaacaaaatcagacaactgattgcgatgcgcgaagcgcatggttaccactatctgaccgaaattgacggctcctgcaacgagaaaaccttcaatgttatctcccggtcgggcgttgacgtctttattgtgggaacctcgggcctgttctccctggcggataatgtcagcgatgcatgggataaaatggtcgatatctaccagcgcgaagtcgctgcctaa

SEQ ID NO: 193235 - DNA, 1047 bp, Klebsiella oxytoca
atgaaagcctttgtcatactgatggcgctgcttgctttggtattcatcgggattacggtcatgggtaaaattcgcgccccggctaaagctgaagctgataaagacggtggtaaagcgcaacaggccaatacactgccaaactacagctttaacagcgatcctgatgttaataaacctgcaactgcgcagaatagcgccactgatgcccgtgctgtgcaggctgccgcacaggcagatgcagatgcgggcagcagcaataccggcgcgcgtacctctaataagcgtaaagaaccttcgcctgaaaaactggctatgcagcgtcgtctgggcggcgagctggcccagactaatcaggcggctacaagcaatagtcccggagtgcagccccaggacaacgaaacaagcgaaggtagttcagcactcgctaaaaacctgactcctgcaaggctgaaggctagccgcgctggagtcatggctaatcccagcctgactgttccgaaaggcaaaatgatcccctgtggtaccggcaccgagctggataccactgttccgggtcaggtttcctgccgggtttcacaggacgtttactcagctgatggactcgttaggctgattgataaaggctcatgggttgacgggcagattaccggtggtatcaaagacggccaggcgcgcgtgtttgttctctgggagcgtatccgcaatgaccaggacggaacaatcgttaatattgacagtgccggaacgaactcactcggcagcgcggggattccgggccaggtggatacccatatgtgggagcgtctgcgtggtgcgatcatgatttcgttgttctctgacaccttaacggcgctggttaaccagacgcagagtaataacattcagtacaacagtacagaaaacagcggtgagcagctggcgtctgaagcactccgctcttacatgtctatcccccctaccctctacgatcagcagggtgatgcggtgagcatttttgttgcccgcgacctcgatttcagcggcgtttatacgctcgcagacaactaa

SEQ ID NO: 193236 - DNA, 621 bp, Klebsiella oxytoca
atgttattagtaacagtgtcactactttccggtttaatgatttatattatcattatgaacagagcagaactcaatagttcactatctgcaaggtttgtaaaggctttgaaaaatgaagccctgtcgctggtctatcaacctatttacagaattgaagacggacagatctgcggatttgaggccttgctcagatggaaagatgaaagactcgggaatattagccctgaagtatttataccgctttctgaaagggaagggttgcaggaggatgtgactttattcgtcattaaccatgctatccgagaatttatccatactgctattcagaatgaaatatttttgagcgtaaacattaatccaagcgatcttgattcagaaaaattcagggataaactactaggattaatttctgaatataacatcccatataaaacaatccttcttgaaattacggagcgtcaaggaggggattttgaaggtatgaaaattcacattgataaatataaaaatcatggtgtcaggtttgccatcgatgactttgggacaggatattctaatcttaatctggtaactgcgcttgatgtagatgaaataaaaatagacaaatcgctaactaaatag

SEQ ID NO: 193237 - DNA, 396 bp, Klebsiella oxytoca; identical to SEQ ID NO: 100678

SEQ ID NO: 193238 - DNA, 882 bp, Klebsiella oxytoca; identical to SEQ ID NO: 180798

SEQ ID NO: 193239 - DNA, 834 bp, Klebsiella oxytoca
atgggacgaaaaatttctgcattattaaagataataggagttacaggttctttatgcgggatcattgcgacagcattcgcaatctatgcgcattacaacccgacctccccttctactcagagatatgacagtattgtaggaagctggctatctgattactcttacaccgtaaaaggtaataccgttagggttaatggaaaaacgaccttcttctctaatggaaaatacaactttcatggcagtatctctattgactcttatgctccaggtgaccatatattcatagactatctttctgacgttactcgtttggaaagagagttaagtaatttcatcaaggccaataaggaaataaggattgatgttgttgattatttgaaggggttactaagtatatttggtatctcagagttgaaatcttattttccgcaatatatgaatggcaatggtcttgagcataacattaatactctttctaaatatctcgaaggattagatataaaaaataatatgtcaaatgctatagatatgttgaatggaattaaaaccgtaccatttatgactatccataaaagtaaaggtttagaatttagaaaggtcgtgatagtaggactagaaccggatgcttactttggtgatgaagaagggcaaatagaaaatcaaaaaacagtttttgtagggttttcaagggctattgatgaagtgttcatgactcgttgtaaactaaggatggataattttggtaatatgtccagacaagactttaatagaataccgcttataaccgatatgctaacttattgtggtatagaggctgagagctatcctggttga

SEQ ID NO: 193240 - DNA, 210 bp, Klebsiella oxytoca
atgaccgggagtaatgcgcggtggaaatggacaacagattacaaccgtcgctcgatagcggaaacggcgatgtaccgggtaaaacagctgttcgggggttcactgacgctgcgtgactacgatggtcaggttgcggaggctatggccctggtacgagcgctgaacaaaatgacgaaagcaggtatgcctgaaagcgtgcgtattgcctga

SEQ ID NO: 193241 - DNA, 192 bp, Klebsiella oxytoca
atggggtggaaaatgaactccaaaacggttttgatttacaataatcgttatattagcgaagaaactttaaaagcttttgaagaggcagacttggtaaataataaaatcataaataaaattgaaggagaaatagatgaaagcattaatgttagaaaattacttggtattaaaggcaaaagacagcagaaataa

SEQ ID NO: 193242 - DNA, 273 bp, Klebsiella oxytoca
gtgaaaggccacgccaacgcgctggctgacggcggtactgcactcctgcaggtggatatcgaaggggacggggttagtgtcttccccggccgaatgaaaccgattgctgctgatttgtcccatattgaccgtcatctggcggtcgcccgcttcaacgcggcacgactcggcaataactatcccctgaaagcgcatgtttccgccgggcagcataacgttccactggttaccggccagcgccagcggcgggagcaggaatatcaacagacctga

SEQ ID NO: 193243 - DNA, 198 bp, Klebsiella oxytoca
atgccggactatctgatccttatcgccactctgggcggcatggagatctacggtatcaacggcttcgtgatcgggccgctgatcgccgccctgtttatcgcctgctggaacctgctgtcgggacgagaacatgccggcaataccgatgaaatcgatgaagagtttattgaggaagcgaaaaatagccgtaatgaatag

SEQ ID NO: 193244 - DNA, 249 bp, Klebsiella oxytoca
atgttactgatctttggcggcctgcccggtaccgggaaatcaactatcgctcgcctgctggccgccaggctgggggccgtctggttacggattgattcaattgaacaggcgctgattcgcgccgaaaccgtcaccaggcacgatatagggccggccggatatctggtggcgtacgccattgctgcggataacctcaggcagggcaacgtggtgattgccgactcagttaaccctatagccattacctag

SEQ ID NO: 193245 - DNA, 348 bp, Klebsiella oxytoca
atgtgcgttaacgtgatcactatgccgagcgtaatctcgtattacttcatgtgggattttgtaggcatcaagaatgttgtaagtttcatcgaaaataacggctatcaaataatcaaaatcggcagcttcatagttacgcaatgcactgagttgccgggaaggattatccggcgtgactctcctcgctttgatctgcactttcttgccatcagcatcaatggcatcagcacccgccgacgaattactgagaagagtcatacccagtgcattagaaaccagccattcagcatagtcaccaacaggattattcttggtgcgaatgacacctctagaacgcaactgcgttaa

SEQ ID NO: 193246 - DNA, 753 bp, Klebsiella oxytoca
atgtcaaaaacacggcttaataagcccggtttttcagccaagtctgtgctgaccattatgttaatcgctgcgtcatctgcatcttatgcagcagaaagcatcgatcaactggcgacgcgcatcggtatggatcacttccgggaagcgatcaaaaagggtgatcgcagcgccttcaaaacgctgccggcaaaaggctataaaaacggacttaccgggctgctcatcaaaactaacacttacgttaaccccgaatacagctttgctgattgcgatacggacaccgttattgtctcggtgcaagaacgcaaaacgctccccggttgccgcatatctctaaagctagcgactaaagatgctgacggtagctatcacgataatggcattcgcatcgaatatggtattgcgaccggttccaaaaagtttatcgccaacaattcaatgtgggcacaacatgccatcagcggtgataaagtgttagaaggtgctatccacccggataaaacaaataatcataaagatcaaatgtgcatgggtatggctcaatttactgcaaacgtaaccgaaggccgaaacggaggaatgagcaaaggtgaatattatcagcgacttgataatatgaacggtaagtccgaagtcactcctcaaatgatcatgctctataagaccttcgttgactacgtatatgaacacccgaaacaagatgctcaggtttcagcggcctttgtttacactaactgtataaacaacttctga

SEQ ID NO: 193247 - DNA, 1002 bp, Klebsiella oxytoca
gtgcattatctctacatcgatacctgtgtttggctaactatagcaaagtcaaagaaccagcatgcactacttgaagcatttaaccaattattggatagtaacaacgctgctattgtaatcccaaccttggtgaaggaagagttccttcgaaataaggacagggttattgaggctactaagcagcaaattggttcggaattccataaagtcaaaaaaataattggggcttatggaggtaatggtaaggaccaagcgctagctgtattaaatgatgttggaagtcgcttgcctattttaagcgaagttacagggcatacagcggagatgattgaatctctgatggataaatgtataagtcttgaggctagtgattccgttcggttaaaagccgtggcaagggcattggataagagagccccttttcatcgctcgaaaaacagcgttgctgattcaatattaattgagttgttttacgactttatgaaagataaaaatggcgtcttccattttgttacggaaaactatacggatttcagctcattaactgataggcgaaatccacatccggattttggtgagatattttctgataatgtccattatcatttagatattgcggaggctataaatagtatagaacctgagcttttgagtgtgcttgaagaagaaaataattggtttgatgatgacacaagaagcttaacagacatactaactgcgattaatgagtattgtgaaaaagtatggtataaccggcataaatacagggagtataaaattgaaataggtgatatttctataatacctaaaggagatgcacgccatggtaataatgttattcatgaagatatctgggaaagggcaaagttggcagctgagaaagtcgaagaacaatatgaagacactggcccttgggatgattttgaatggggaatgatcaatggcaagttatctgccttaagatgggtgcttggagatgaatgggatatgttggatacatag

SEQ ID NO: 193248 - DNA, 636 bp, Klebsiella oxytoca
atgaacattaaatcatttagctttttaattttgcttagcgccccactcgcaactatcgcagccgatacagaagaaatcagcaaaaaacttgatgatggttatcgctacgcatgtaacgccacccaaacaggcgaggcggctagcgcgtcctataaacttgaaaattatagaacgctattcactggcacttctgccgtagcaggcttcagccagattatgcacggtgagatagacggtattgtggctggtttttttaaaaagggaatgatccaagggaacactagcaccgctgcatgtgaaactccgcaagacttgctggcaacaaccacacgagaagtatacatccggcaggtaaaattaactctgacatctaattttgatgacgttcgctttagccaatatgcaaatcaggcttacccaatatttgattcgatacttgccggaaaaattagcgaagaagaagccagtagttcaataaataagattgcgaataatgccatcattaacaatgaagatgctggtgccgtcagtaatgcaaccaatgccatgaaggccgtcgcaaaagttctcgtatccatcagaaaagataaggatcttgaacaattcttttcggactatatgaagaatcacaagtag

SEQ ID NO: 193249 - DNA, 333 bp, Klebsiella oxytoca
ttgagaaccgtcgagatactgcaatacaccttacgcaaaggcagcggcgccacttttcatgccatcatgcaggaaatcagcgttcccctacaccagcgccacgggatcgatgttgtttcgtttggcaactcgcttcatgacccggattgctactatctgattcgcgcctttgacagtgctgaaagcatggctacgattcttgaaactttttacgcaagcgatgactggcgcagcggcccacgtgaagacatcattggcagcatagaaaccagcattaaaacagtgatgaatctaccaccggaaagcgtggaagggctgcgggtgcaatcgtag

SEQ ID NO: 193250 - DNA, 1953 bp, Klebsiella oxytoca
atggcgcagcgtgataatctctatcgacgtccaagtggtatctatgttcttcggatcactgttccggttcgttatcgtgccctgatagggcagcgtgaaattcatgcatctacccgcacaacccaccttgcaaatgccagagctattgccgcgcgtttgcttgagaagtggtatgcgtctctggaagagttcaggaaagtggataaagaaaagattagtggcaatgcaccattgttgactggcgcaggcaaaatcagcctggcgttgttttgtgattcatttggggttggggttgagactgtcgtccagcatcttctggcagccaatgtgccgctgtatgcgcttgtgtcgaaccagcgtggctttctgattgatgatttcagcattcttgagcgtgaccctgatacgcatgggttcgttttgaataacattacgtatgacggtgctgaggctgcggtgaacggctatatgcagctttaccagcctcagtttgcccttgttgaattgctgaacgggcgagaggttgaggttacggcattcagggctaacaacggtaatcctctttccctctggttgttggatttacccggggtgacgctgaatgtaagttctttgttcatcaacaacgtgcaggctgaaaaactgcgtagcgcttgggataaggcgcttacgaaatcggagccaacattaagtgctttgccatgcgctccggtaggtgtaacaccagcgattcctgtggtcgctaccatcaacccgtattgcaacccgacatatgtgagcatgacggtttcagcattgctggaagcgtttttggtctataaaaatacgggcgatattaagctagccagcgaggggaaaattcgttccagaattgaacatttcatggagataatgggcgatttaactctaggtgaactgaatcgtgacgtagtgaaagattacgtcaccaaaatgcagaatatgcccggtaatctgtatttgatgcggcgaaaatacaagatttcagatacgcacatgttgatcgaaaaggcgctggctgatggccagccagttatgagtcgagatgccattggcaggcatattgagtcactgggttctatgctcaaatgggctaagagcgaacgctacctttttgataaccctgctgagaatgtgctggctcagcgccgcgtgatggtgcgtgagcaggatcgccgcgatctcttcaccgacgaggaactagagcaaattttctcggctgactggtttaagaaaggcgcgggaacgcccaatcaatacggacgttatacgagcttccgcccgtttcactactggttgcctctgctggcattatatgtgggcgggcgcatcaatgagctttgccagctttatctgacggatattcgcgaagataaaaacggggttgcctatattgattttaaccttgatgcgccggataaggtgatggatgaagaagcgcaagctggtggcgataaatcattaaagacggtgaatgcgatccgtcaggttccaattcatccgcgacttatcgaactagggttgctggagtatgtagatgcattgaaagctgccgggtatgatcgtcttttccctgagttgaagcacaacaaaatcaaaggatatcgtgccgccgcctcaaaatggtttaacgaaaactactttggcaaagtcctcggatttccccgtgacggtaagaaaacgttccattcgctgcggcatactttcatcaatgccgtagacgagtttgagaacaatgaacgcacgattgcgcagcttgttggacatgttcggggcagcaccaccgcgatgacaacctatcgtaaggatgctgatgtgggagagcaatttggagtgatttcgcagcttcactacagtttgcctgatattgcgcagtttgattcgcaagcaggtatcaaggcggtcatcgacgcacgacgcagacataaatcatag

SEQ ID NO: 193251 - DNA, 126 bp, Klebsiella oxytoca
atggcgtcaattcaccctgcgtgcgtcggggacatcattaaaagatacatccagataacgatctggatcacaatcattaacaaaatggatgtaaccgtttccatccttgtgacctcactcacgtag

SEQ ID NO: 193252 - DNA, 312 bp, Klebsiella oxytoca
atgtggaatattccggggaatgccctgtgggctattccgttcacggtgaatccgggacttttctcaaacccgctgcgtgtgaacggcatgggggcgtttcgcccgccccccatgacccccggcattgcgctgaaaacggccgctgcgcggtccgctccacgccggcttcatctggcggagcgggcaggactcgacatccctgtctcgacctgccctctgacggccgtcctggccgtcagtcctggatgcgcgcctgcgttcccgcccgttttcctgacgcgcctgaacccccttgcggtcagcctgtgttaa

SEQ ID NO: 193253 - DNA, 246 bp, Klebsiella oxytoca
atgtggaatattccggggaatgccctgtgggctattccgttcacggtgaatccggggattttctcacacccgctgcgtgtgaacggcacgggggcgtttcgcccgccccccgtgacccccggcattgcgctgaaaacggccgctgcgcggttcgctccacgccggcttcatctggcggagcgggcaggactcgacatccctgtctcgacctgccctctgacggccgtcctggccgtcagtccttga

SEQ ID NO: 193254 - DNA, 630 bp, Klebsiella oxytoca
atgaactggcagcttgtcactttttttggcgatagtaccgtactgttacccagtgcggccgtgttgtttatcgtcctttttcagcgaaaagattcaaagcaggcggcctggcgctgggcgctgctgttcggtatcactggcgcgattgtttgcgcatcaaaactggcatttatgggttgggggatgggcattcgcgagctggactttaccggctttagcgggcacacggcgctttccactgctttttggccaattctcttgtggctactgtgcgcacgagcaacatctgtctttcgttttgcttcggtcatcgtgggttatgcattagccgggctggtaggttactcacgattaatgatccatgcccattcaagctcagaggtgattgccggttttttgctgggtgctgcgggaagcgcgttgttcctgctgatgcagtcgcgtgttagcggtactcataccttaaagctgtcatggggaagcctggcaagcgtggttataatcccggcgctgttgttgaatacgggggcgaaagcgccaactcaatctctattaagtgagattgcggtaaagcttggaccactggaaaaaccgtttaccagagctgatttgcataagcgtttttattga

SEQ ID NO: 193255 - DNA, 1212 bp, Klebsiella oxytoca
atggtaagtgagcaacattttagtattttgcaaggtcagcagcaacaaattacgttgatgctcattttaatattcttcattataatgttcatcgtttcccctgtactatctttttttggcctaatagtatttttttctttaattagaatagatgagagattaattaggtttttatttgcaatgcttgcattgatttctggagttgctatatatgcatctagattcgtacatccagtagagttaggaggagatgatttttctaatcagtactatcctctattcaagtcattgtcttcaggagcgagtatattttcatctcaatttggtggcggagttgagtttggtttggctgcaatatacaaggtaataggtttctttaatcccacggccacctattgggagatatttttcatagtttcatttttatgtgtatttctatattatatatggtttgagcgatttattgtatcgaggctatcaggtagggatataacactgtgtttggcctctgcattgcttttttttggtttttttattacaacgcaattaattaggcaggccttatcatctgtttttattttgtattcactatcttatctttcagaaggaaatcgtaaaaaagcttatatatgttgcattatagggtgtatatttcatattacggctctaccatttgtttttcttttttatcaactaatgcatggtaaaaagaaaacaaaaataattattgttggatgttttattgcttttggggtgttatttagcgtatttttgggtgttatgtcatccggagcagtttcttcgataatagcaagtaagtttttatattacaatcaaaatactgatagcgggattgcatctgcatattactggaggatactactcatattatgtgtagtatattttttcttctctaaacggaatgatgagaatgatagctataaatcgttattatattatggtacaataatttatatttgcttaatcaatattccattcgcatcagataggacactcatggtgcttgtgattttttatttaggaattgtagtgtatcatgcattttataaaatcaagcatgtatatgtactgataattatagcgctaagtatctatcggatcataacattagggccatattatgacacaaattgtcatgaagcagctctgtgcttgtggagttcctatccatggtatggatcgttactataa

SEQ ID NO: 193256 - DNA, 1260 bp, Klebsiella oxytoca
atgccaaaactaacagacatgcagatccgcgcatggattaagagcggagagcgattcgaggggcgggcagacggtaacggtttatacctacgttaccgtgaagccgacaaaacccccacatggagattccgctataaactcgcagggaagtcccgcgccatgctaattggttcgtatagcgagctatcactatcaaaggccagagagacggcgagagagctttcggcgcgtgttgcgctgggttatgacgttgccggagagaagcaggagcggaaatccgaagcactggcgaagatggaagcagagaagaacgctatgcgcgtttcagagctggcggctgaatactttgagcgtcagatcctgccgcgctggaagcaccccgatatactccgccgccgtatcgacaaagatataaacccctgcattggcagcatgaaggtggaggacgtgaagccgcgccatattgatgacatgctgaaaggtattgttgaccgtggagcgccgaccatagcaacggacgtgctgagatggacgcgccgcatattcgactacggaatcaaacggcacgcgctggagattaacccctgttcagcctttgaggtggcagacgctggagggaaggaggttagccgcgagcgctggctaacacgcgatgagttaatccagctattcaaagccatgcgcacggctaagggtttcagtcgccagaatgaaatcacgttcaaattactgttagcgttatgcgtccgcaaaatggagttatgcgccgcccgctgggaggagtttgatcttgataaagcagtatggcgcttgccagaggaacgcagcaaaaacggcgacgctatagacattccattagcaccgccagcagtcgaatggctgagagaacttaaaacgttctcatgcaatagcgcatgggtactgccagccagaaagatgcaaaaccgcatgatcccccatattcaggaaagcaccctgcccgttgcgctggcgaaggttcgcgctgaaatgccggacgtgccgaacttcactattcacgacttccgtcgcacggcccgcacccatttagccgcgctgggcgtggatccggtagtcgcagaaagatgccttaaccacaaaattaaaggtgtggagggtatctataaccgccaccaatactttgatgaacgccgggccgcgttaacacagtgggcgggcttgctggtggcactggaacgcggcgaagaatacaacgttacaccgctgagaatgaccaagtaa

SEQ ID NO: 193257 - DNA, 924 bp, Klebsiella oxytoca
atgacccaaaaagaagcccacagcagtattaaaatcccacctatggaatactttacgctcgacagggcagctagtattttgcaatgtgatacagatgatttacttcactatggtgttattggtgcgatccccttatgtgtaatgatgaggtatttctgttctgcgctggtttttgtcggtggcaaagacattcaagatccaattgagttttataacgaacacaaagtaaactcatcatttctttttcgtgatagcaactatgtatctcattttaattccacgctcaccgaacatgacgcatacaaaacagatagtgggcttattttatttagaggattggcgaacgggctatggtgtctgggacacagtgaaatagaaagtcttctttattctaagaaaacaagggtgatagacacgacaattttcaggccgttcggatgggacactttccgcgagaagactggcctttcgtgtcagataattagcgatagatattttaatcagagctggctaccgacgctaaacagaaaactagccgaaagtataggggttcagttaagccagagccgaaaacctgcgcttaatgagattttgacaagctccgatctatttattgccagagataccattttaaaactcaaagacgcaatagacacaggcgagccgattaaaagcatgattaacggaggtgttgttcccttaccgccgacggaaatgaatgtaggaaaaccagtaaaaacaacagaaaaacagatgagactaattgtcgcattacttaaaagtataggcttaaccgatagtgatttaaaaggcagcattcaacaactgagagctaaagctaacaataaagttgagggactaccactcccggatgatgataagacgcttattgattggctgagaaaagggggaatcgaacgataa

SEQ ID NO: 193258 - DNA, 219 bp, Klebsiella oxytoca
atggcaacacagaacgcagcaatccacacaatcccccaatctggctatatccgacgtttccgccttgctgaattgctgggcgttagcgtttccaccattgatcgcaaagttcgcaatggggttctgccgcgcccggtaaagctgggcgagaagattaccgcctttgatgcggtagagattaacaactggctggcagagcgtcgcgggaaggtggcctga

SEQ ID NO: 193259 - DNA, 438 bp, Klebsiella oxytoca
atgaaaaaagaaaaccgccccggacagcaggcggctaacaacatagatattcgcggatctgatgttacgccaccagcgcccaccacacaagcgccacgccgcacaccgaagaagcaccgcgcccgcgtctatatgctacgcactggcgtagagggatggacagaaaacgacattctgcgatattgccgcctttcgtctggaaggaactacgccagcgagttagagcgcaggcttgatattcagcttgagcgcatagacgaaaagaatcccgacgggatcggctcacatttacgctatcgctttaccgggcgcggtgacgttctaaaagttattcggcttgtgaaccataacgccgacgctgggggctatcagggactttctcagcctgaaattgccgacattctcaatctatacccggacaatctcaccgccgcataa

SEQ ID NO: 193260 - DNA, 810 bp, Klebsiella oxytoca
atgactatcgaaaaaagccgattcaattcggaggccgccccgcaacccaacgttaacacgggagtaattaacggcaacgacttcgccgctattgtcccggtcattaccgggcagattggcgggcgtgaagccaatattgtgagcgccagagccttgcgtaaggcgctgggggtggggcgagacttcaccacttggattaaagggcgcattagtcagtatggttttgccgctggtgtggattacatcaccgttgaaaatttgagctcacccgtttcggggagcgcaaaatttcgccagcaaatcgagcatgattaccttctctcgctggatatggctaaagaagtggcaatggttgagcgcaatgaacaggggcgcgccgtccgccgctatttcatccagtgcgaggaagcgctacaactgagcgtgccggaaatcgccgcgaagtaccgccggcaccttaaagcccgcattggtgccgccaacctctttaagccgatgtgcgccgctctggatactgcccgggcggaacagggtaaagagacgcaatcccgccactacagcaacgaaagcaacatgatcgcccgcatcgtgctgggtggcatgaccgctaagcagtgggcgcaggcgaatagcattactggcgaaccacgcgacagcatgaacgccggacaactggaacatctcacctatctggagagtaccaacattacgctgattgatatgggtatgggatatgaccagcgtaaagccgagctaatccgcctttctcagcgctggttagctaaacatctgggggctaatcatgcttaa

SEQ ID NO: 193261 - DNA, 909 bp, Klebsiella oxytoca
atgcttaatgccgccatccagaataaagcctttcccctggctggcctgatgtatgcaaatgttaacgtctggagcaaagcagcccgccgccagattgcgacaaatagcgacgtttggaacctgtcaaaacctgacatttgccaccgccagatctttacaaatcttggtgttttcgggacaagtacgcacgcgcatgaatgcgaagctggcataacagtgccagctaatgccagctcctcattttctcgtcgtggtgacgaggagagtttcgagaccagtacgcgcacgaagatttattgggggtcactacgcgaggaagattttcccatcatcactacacgaggcgggaagatttttctgacatcaccactagatgcagggaatttatgcaacagtacgcgcacgcgcgaaggtgagtttctggagtccataaaaaagggcttgccgactatcgccaacccggtttatggttatagcgcaccagcaaaatctggtgtcgggattggcgtcccggtaattatcagagcgcacaacacgcgccatgcgtgtttttttgtgccgcgcagttacacctgttcaatggtggactgtatgggggcggagcaatccgcgccggtttctctgattcccggttacgccaaccctgtacagttcaccaccagcgaaattggcgtttccggtggtggttctcaaaaccatgaatcagaggctgccgctatgctggctactacccctacccaaaatccgcaattcatctggctaatcgcagccgttcgccgcgatatgccgacaattaccgccaaaatccatcacattgctgctgaaactgagcgcgaagcccgccgcactctggcgcaggatcacgtctgtttctttgcaggccgtatccgtctggaggtggccgcatga

SEQ ID NO: 193262 - DNA, 264 bp, Klebsiella oxytoca
atgaacattaacgctttataccgccatccgtccgagcttgaagccgaagcgatgttatcccgcgagcaggcttacccggatgattttacgcttgcagaccgtacagcagaacggatgacccgcgcccgcgatggactggctcacgttatgaccgatttagtcactcaactcgacgatgaacaagccgctatcgtgtattgctggttgagtaaagtcctgacgattatcgatatagccagaattgatgcggaggccagcgcatga

SEQ ID NO: 193263 - DNA, 222 bp, Klebsiella oxytoca
atgagccagttacaactgattgatgctgcctgccagattgaacaggcacaggctgttttatccatgtggctggagagcaccaccaataaaacagatcccgatttaccgcgcctgattggttccattctgacgctgttacacggtgtacccgaagcaatgagcgaggctgaaagcaagctggctgaccatgtaatgcgtgaatatcgggagggcaaagcatga

SEQ ID NO: 193264 - DNA, 627 bp, Klebsiella oxytoca
atgagcaatatactgaccattaaaccgggaaatcccgacctgttccacgcagaagccacaccgcacggcgtcaatatcatgacccgcaatgatgccggaggatttgagcaggttgctcttatcagctacgagagcgcggtaaaccgccttgatgccggagagtacgacgatacgccaaatatcggatacgccatccattttgccgttgctgatggcggggcgcgtggctggttcgactttaccgcgcagcataacgtcactatgtggcgctggctgattgctgccacgttcatttctgagatgaagcgcgagaacggcacaacctccatcacggaggctgacggcacaacgtcaaaagtagcgatttactccaatggcacggcggggattgtggtttacccgttcgcggaacgtctggcgatggcgaataacatcgagggcgcaatgattgagcgctacggcattgagcagggaacggcgaacgccattgttttttatcaggccatgatcgacacggagcgcggcgagctgaccccgttcggacgtgaaacgctggcagatctgcatgatgggttcattgctgatctgaatgaaaacggcttgcctgaaatgccagcggcgcactga

SEQ ID NO: 193265 - DNA, 462 bp, Klebsiella oxytoca
atgacagcacagatatcagcctacgggcgtttagtcgcagacccgcagacccgcaccacagcaaacggtacaagcatggcaatgggacggttagcggtggcactgccctgccatgcagcagagggcggagaggttactttctggctgggcgtggtggcattcggcaaacaggccgacgcactggcaggacacgttaaaggcgatttagtcagtgttgccggagcgatgcaggtcaatcagtggacgggcaaagatggcggtacgcagcaggggtatcaggtagtagccgacagcgtgatcagcgccagaacggtacgccccggcgggaagcgggccgagtcagtcaaagcaagcgaagccagcaggggccataccacgcaacccgcgccgggatgggagctatataacacccctgatgattttgaccagcgcccgccgtttgatgatgaaacgccattctga

SEQ ID NO: 193266 - DNA, 312 bp, Klebsiella oxytoca
atggtaaacgacagcaaagctgaggaactggaagcgaaggggctgtatcgcagggcagctacacgctggcaggaaatcatgatgatttgtgctgaggacgatgatcgggaatgggtaaagcagcgccatgatatgtgtctggataacgtgaagcgaccgcccgtgaaggctgagaactttggcgacctgcataaagctgtcaccgaaactcagcaccgcatggggatagcgcaaccaaacggtaactccttccggttaaatggcggcaagaggcaacggcagaccaccagcgggggcgatggttcgcagtaa

SEQ ID NO: 193267 - DNA, 570 bp, Klebsiella oxytoca
gtgagaaacagaacgcgcagctataccaccgacctgccccgcatagggttgccattccttgcgcacatgcgtagcaggctggcggacgccgaaccggggacgcagctttatacccagaccgaaagcggaaccctgcatatcttccgacaggcagacggctacgccatgacgatcaacggcgttacacggacaatcagaaccacgaccacacaggctggctacggagttcggcaatggtatgtttgccctcattgcacgaaacgggtagcaaagctgtatatcggcaggaaagatatcggatgccgggaatgctggaatctccactataaaagccagagtgccgacagactggacaggatgcgcatgaagatacgccagcagcgatacgcgatatggggcaacaatgaccttgccaataatctgtttaatgacattcgcatgttcccgaaaccaaaggggatgcgctgggctacgtttgataggaagcgggcagaattatcagttatggagatggcttactggcaggcattcagtccggtagtgggcaagataaccgggcgtgtgcggtag

SEQ ID NO: 193268 - DNA, 1014 bp, Klebsiella oxytoca
atggctaaagatcttactacctccgtacacgaccgacagaacatacttaataattcctatgccctaactcatgctgaaaaacatatgtccttaggtgggattgagttcaatggcgaaaaagtgttcacaaaaaaccagttgattgaactttttgatgtaagcgacacaacgattgaacgctatattaacaatcacttagatgaattaaagaacaatggatacaccctcttacgaggaaaatccctaaaggatttcaaagagatagcagatggtaccctcatcaatgaaggtaccaaaacctcaatactaggcatattcaagtttcgctcagttttgaacctagcaatgttactagttgaaagcgaacaagcacgtgcaatacgagctcgccttttagatattgttatcgatacgctggcagaacgttcaggcggccatacaaaattcatcaatcaacgtgatgaagactacttagttgctgcgttcaaagacgaaagctatagaaaaaaattcactgacgctttagatgagtacgtcgaaggcaacaaatggaagtatgggaatttaacaaactcgatctaccaaagcatttttcatgaaaatgccaatgagtatcgcagtgttcttaagctacaccaaaatgacaagattagagataccatgtactcggaggtgttgactttaatctctagctttgaggctggtttagcacatgaaatcaagcagaaagccgaacatcttggtcgcaagctcacttataaagaagcagaatccatacttaaacaaatggaggggcatcctctatatgagccaatgctagtagacgttaggactaaaatggctagcagagatttatgcttccgcgatgccctacatgaaaaacttgaagcgtatgttaaagctgttcctgcgggtgattttgagcgttttcttggagaaaaaagcaagtcattagaggaaaggctgaatgaccctgaaaccctagaagtgtttaaaagactgaaagatcgctag

SEQ ID NO: 193269 - DNA, 462 bp, Klebsiella oxytoca
atggacgatataacattcaattattttgacattcatcacgctattcgagttcatgattggatcattgataaaacaggcggcttacacggaatcagagaccaaggggtacttgaaagtgcccttgatcatatccaaaacgattggtattacccggagttcgtggataagctaagtcacttattctttgcaataaataaatttcacgcttttactgacggaaacaaaaggtcaggcatcgccctttcaacatactttcttgagataaatggtttcggccattgtgtgcagctttttgtgcgcgaaatggaaaacatcgctgtttgggtggctgatggggcgatagaaaaggaattgctcaaaaacatcgtccatgatctgatcttgtgcgaagaaatacttgaaacaaccaagctgaatatcgccatagctgtaatggagtttgacgctcaaaggcatggttaa

SEQ ID NO: 193270 - DNA, 567 bp, Klebsiella oxytoca
atggggccaataaaaatttattcttgtggtacgtatcatccatggagataccgcggtgcgcgtaacccaaagtcgggtgacaagctttcgaaagcaatgatggatttgaaggacgctacaaattcaggtcattcaaaggcagttcttacgtttagccaattgatgataaatagtctaaaaggctatgtcattggtaaagtatcttttaccgacgtacctttcgagattactattgtaccttctcatgcccaaggtagagtatctgaagctttgatctccatcgcaaaggaaattgaaaaaaaatatacaaacgctgttttcaaccaatctctgctaagaaaaatcacagtggtaagtgcccacaaaggaggtggggatcgttcggtagaacatcatatgtcaactatttcagtatcatcagatgttactgataaggttattcttctaattgatgatgttacaacgacaggggggagtatgacagcgtgctatcatctgttaagatatgcaggggctaagtcaatattgcctttggctttacttgaaacagcaaattatgaggagtga

SEQ ID NO: 193271 - DNA, 963 bp, Klebsiella oxytoca
atgcacccttccgaaattaagattctgttaggtctatctttgcaggttgatagattggtatcagaacaaggggtgtttaaattatttaatgaaatcccattccataaattatctaatgagcatgagttagtggagtatattaatttcacaggttttctaaaagccccgttcacggtgtcctcattacataaagcagaagaatatttaaacaagcatttgtctttaggtattgttccaattccttttggtgacaataaatacccggtttgcttagctattacaccgaatccacccgcaatgttatatgtaaagggtgatgtaaacatccttaatgaaatgccaggggttgcaattgttggatctcgggatgtttctgctgcaggagaagaaattacaaagagaattactaaaaaaatttgtgagatgggattggttattgtaagtggtttggctattggtacggatacaaatgcacacaaagcaacacttaacgcaaaggctaaaacaatagctgtactagcgcatggcttagaaattgctaagcctaaacaaaatgcgagattagcaaatgatatcttaaataatggtggagcatggatatcagagtatcctgttggtagaccagcatttaaacaatcctttgtccaacgtaataggattcaggtgggtttgtctgctgtatctattttgattgaagctgcaaaaaatagtgggactatgactcaggcagattttgctattaaggccttaaggccaatttttgctgtcgttcctcataaaccagataatccattaggacttaattgtgaaggcacgcaacaattagtagataatgaacaagcaaagcccttgcgaaccagtaaagattatgatgacttattagccgttatttctaattctatagataggataaaagtaaattcggatatttatagtaccaatgtgaataattatttattttaa

SEQ ID NO: 193272 - DNA, 441 bp, Klebsiella oxytoca
gtggctgagctgcaggaagttgacgcctggttagatgcgctgctggcgtggctggagcctgccgcacgtaagcgcatgatgcgggagctggcgcagcagctgcgccgcagccagcagaaaaatatccgcctgcagcgcaatcctgacggaaccgggtacgagccgcgccgggtaacagtccggacgaaaaagggccggattaagcggcagatgttcgccaaactccgcaccacgaaatacctgaaaatcaccaccagtgccgactccgcgagcgtggagtttgccgggcaggcgcagcggattgcaagagtgcaccattacggcttacgtgagaaagtaaattattcaaggaagagtattaagtaccctaaacgaaatttactcggattcaattctaagtttgaggtagaagaggttttattgagttttttattgaaataa

SEQ ID NO: 193273 - DNA, 1167 bp, Klebsiella oxytoca
atgagcattgaaagttatattgttttttttattttacagattaggtgtcaagtgttaactactaatcaaataattgatgtgcctgccgccggaacctttaattttattacaggagataatgggactggtaaaacaaggtttttgacagttctggctaattcggttttaaatgaattaatttcgagtagtagtaaatatgataaattaatttgtctgactggtactgtttatgaaaaattccccagaccattaaaaaagaaagattataaaagcgagagatacgataaggtatattcttattttggtgggagggttaataataatgttttctcagatctctcgccttttagagttataatgaaatgctattgtggctttgaaataaaccagaattcttttgagttggcaggtaagttattaaatgagcttgggtttagctctaaggtggaatgtaagtttagaaatgaaaagtctaaattggagaatggacgatctataatcaacaacgaggatgtggctgtagatttatctaagtctccgtcacaactgactaacatgacaaagaaaagtattgttgatgatgatttattcttattaaatattaattttgttaagctttctgataggaaatcatacggcatacgagatctgagttctggtgaacgaagttttataataacaatattgtcacttgtgtttagtttgagggagcgaaccctcatattatttgatgagccagaaaattcaatgcaccctaaatggcaggagaaaataatatcaacaattaagtatattgttgatgtgttatcacctgaatcaactgtaataattgcaactcattccccaatggttgtttcatgtgttacaaataataatacattcacattgaatttacctggtgagcatatttggaaagcttcatattatgctggaaataacgcagactcagtgttaaaggaacagttcggagtgatctcgccaagatctgaagaatttcagattgcgatgcaaaagtgcttgacttcatttagtttgaatgaagaagatggttctttcttacaggatatggaacatttgtttggaatgaaaatatccttaaataaggatgacccactttatgatgcttatgagacacttacagatttttatctggagaggaaactatga

SEQ ID NO: 193274 - DNA, 690 bp, Klebsiella oxytoca
atgagcttgggtccggggaaattaagtccagtgcatagggtttttataaaccggagagaagctagactgttgatagctgaatttctttctggaccaattatttggtctgatccaaagttatctgatctaaagaataatataagattatccttacggaaacagcaatgtgggcgttgcattttttgtcggcgaataataaaggaagagcgcagaaatactactgaggatattgaacattttctggataaatccaaagtgtactataagaaatgggcctttcaccctatgaatctatccatagcatgtcactcatgcaactttgttaaaagtacaaagcaaatgggagatattaatattcagcgtgcgcagtacttagtgcctggaattggtgtgtttaggtggttgcatccatattttgacgattaccatgaaaatatctcaatagagaagggttgggtgtatcgtattgctgatggagcgccaaatcataatggggctgaaaatttaatcagagagtgtgaattgtcggggatagctaatatagaacgcaatgctgaagattataaattgacctgtcaaaggttattgaaattagcaattgcttgtgccgccaaaggtcaaattacacgaatgcaaaaattgcagttttctttgcaggaattaatggaatcgaaacaatttgacttttaa

SEQ ID NO: 193275 - DNA, 672 bp, Klebsiella oxytoca
atgaatagcctgttaccgccgggatcatcgtcgctggagcgcaggctggcgcaggcctgttcaggtatcagtgatttaagcgtaccgctgcgtgacctctggaacccgtggaagtgtccggtgaaattcctgccgtatctggcgtgggcgttttccgtcgaccgctgggaggaaacctggtcagagagggagaagcgccaggcagtcagcgatgcgttctggatccaccaacgcaaggggacggtggcggcggttcgccgggtgattgaaaacctcggctacagcatgacgcttcaggaatggtgggaggtggccgaccccgccgggacattccgccttgagattgacctgaatgatatcggtattaccgagacgatgattaaggagctggagcggattattggcgatgcgcgaccggtcagccgccatattgcccgcctgtcactgtcagcggggaccaccggtccggtgtataccggcgcggcctcgtgcggcggggaggtcatcagcgtgtatccgccggaatacacgcccgatgaggctgcccgttacgacggcggcgggttccattccgggtcggtcacctataccgaaaaccagcgcggggaagactctcaccgctatgacggtcgcacctttcacgatggccgtggcgtttacgcaggagaataa

SEQ ID NO: 193276 - DNA, 1950 bp, Klebsiella oxytoca
atgagtgcaattaacgagcagacgaaatgggaagatgaggtttacctgctggcgcgtgaagaccgggtggagggcggcatttatggcccgtcaaacaaacaggcccggcagctggcgaaccgtacccgctatttaaaaaccgccgttgagtcgctgcaggactaccgggattacaccttcttcatgaccccggatgacccggacggcacccttgcggggcttgctggcacgccggaggggaaactctttcgcgtggtggtgcctgacagcgaggggcaactgctggcctttatctattaccagaagcgcaacggccaggcgaaccggctgaatgcgctggcaagtcagcaggcgattacgtccctgcgccagcagctggagcaggacaccggtgcggcgctggatggtctgaccgcgttgcagtccggtctccagtcgctgacggccgccctgatgcagctcggtctcgatgagatggctgcgcaggtgaccagcatggccgcctcacaaaaaagtcagtcagaccagattcaggccctgatgctggcgtttcagtccggtatgcgggcgctggctctggtggaggccacccccgaggaggtggaaagtcatcagctgagtaatctctatgccttccaggtgctggcccgtcagcttctcccgctcgacggcttcgacccgtcagcggcgggcagcggcacgggaaaccgggaggcgcaggcgaaatatccgggcgtgtttgccttcggtgagccgcgcggtctgattcgcctggacgtgacctccgacagcggcgcaccgaccagcaaggacaacccggttaacggcaccttacaggtggacgttgacggggagatgttcacggcatacgtgtccttcaaggttcagggggcctcgtcggctgggtatccgaaaaagaacatgaaattcgagctgtttgccgacgcggcgcataccgaaaatgtcagcctgaaaatcggcgatgtggtgccgaaggacaaatggattttcaaggcgaactggattgactcgacccacctgcgcaatgtgctctgctacaacctgtggcagaaggtgatggcgacccgcagcggctggccgcgccgggatattgataacagctacgtggggaagctgggggccagcgccattgataccggtgccatcggctgcccgaaagggtacgcctgcgtgctgtatatcaacggtgagttttacggcatcggggattttctctacaactcgtcccgcaaggattacaacatcgccaaaaacagcccggagcaaatcatgattatctgggacggggcgattaacatcccggcgctcacggataacggcacctgggtgatggactcgccctcgaaacccacggcggaaacggctgcctgcctcgaccgctggcgggacttcgcgcagtccgcgcaggacgcgtttaccgccgccgccggtacgcatctggataaaaacaacgtggtggatttctacgtcttcctcagctttatctgcgccccggactgcgtgcagaagaacaccacgtttatcacctgggacggcacgaaatggtttttcatgccctatgacctggataccacctttggtctgcattacgcaggaacgtcgattgcctatccgccagacctgaatctgtttgataacggcctcgccatgcaggtcaaccgcaccttctggaagaaagtccgtaccaccttccaggcggaaatgaatgcccgctatgcggagctgcgggataacggtctgttttcacagcgcggcgtgctggagctggcccgcgacctgctggggcgctataccccggaactgatgcaggctgaatatgaaaaatggccgaatgtgccctccctgagcatcaccagtctggaccagatgatggactggacccgacagcgtattgcatacctggacacttttttcagctaccaccagtaa

SEQ ID NO: 193277 - DNA, 957 bp, Klebsiella oxytoca
atgtatagtccatatctatatggtcgtggttctgagctgttagcgctaagagaattggcagcaagttgtactaatgctgagttgtttataccgataattgaacctgtgctaaccaaaaccgataaacttatacgttgtttagagatactttcagagaaaaacaagagggtcatgttagtcatcaatccaaaacaacatgagtttagtaaagatatagaggctcgaagaaaatttgtagcaacgattaaaaataatttagataaatgtaaaacgcttatccccacccttatagttgactcaagtgtagcaattgaaacccttaatggtttcttaaaagcatttgaaggttcaaatgttgctttaatatacaacaagccaagtattagcgatgtggaattttccaagttaacaaaattaaaatttattgaatttcatatcactattgatggtaatgttaccgattttcaatttaatgaaatccctaaaaataaacttattgaagtgaaagataacttcgtcaaattagataagaatgcagattactctggtcaagaagttttcacggataaacataaaaaaattggtaaaacagtattaggtatcggtgatttcactatagtcgggaaaaaacttgagattggtggtggcaaggctggtgccgttgcatctcatttaatttataaacatcctgcaagcggtgatatatggatagaacattttgtttcgaatgacactgatagagacattggcgacgtagcgtcaaaattcttacaaatgacagataaaattgaaaaggaagttagaacaagggccacagagtacggctctaataaagcattagaaaaatataacgagcattataaaagcagaacgtttcccggtttggggaaaaataaagaataccagattagacaccacatacagcacataattgatgtaatatcaggaaaaatctga

SEQ ID NO: 193278 - DNA, 855 bp, Klebsiella oxytoca
atggcgctaagtatcgataatataagagttttttcaagggtgttcagccgcccagttttcgaggctttagccaagggaagagaaccgtctaatgtcttggattttgtgtctttctctgatgaaatgaagcaggatgggcaaccattacatacattttttagtgaatgttataaagagttatccaggaattatagaaatgagtatgtttacaaaacagaagtagcaaatcgaatagtttttgggaggcatagtccccggacctcatcattattaagtgagcttcatgtcggaaagtctattgttgatattgcaatttttaacggaacatctacagcgtatgaaattaaaacggaatatgacaccccgcgtagattgcaaactcaaaccccagattatttaaaagcattcgataaagtttatgtggttactcatccaaatttatctgaaaaatatgctgagattgttccagataaagttggtgttattgcattaaataatagaggtagccttaagatagttaaaaatgctgagtcaaacttagctaatgttgatatattatatatttttcgtatgctgaaaagaagtgaataccttccagcaatagaaaaattcattggcgagaagatcaatttacccaacgggcttatttatgcattctgcgaggatatatttaaaaaaattcctcaggatttagctcacaatatttacattaatgcaatgagaggcagaacgacaagtgatgatattgtaagctttgttaattgccttcctagttgccttcgtgtgttgggaatgtcatctgctttatcaagtgttcaacgtaaaaagatcctcacggttttggggatagtgtag

SEQ ID NO: 193279 - DNA, 870 bp, Klebsiella oxytoca
atgaaatcttgggtaaaaatgaatagttggacatcagaagacaccaaagcagtgaaaacatggtttgatttggatagatatcgagagtttgaaaacatttcaattaatatgctttaccatgaaatatgggcgaggacatatttcttcaaaccagtaatagaagaaggaatgcataaaacagtattgaaaaattatatgcagatattagaaggtaatccttttctcatcaaagagaaagacttgaattatatggatgctgaaaataaaatttatcaaccgccatacttttttataaccacggtagatcgaatagctaatatcagttttgcttgtatgaaaaaggctttattcataagagctaattcagaacaatataagattgattccactattgagaacgaatacatatccgaaaaaatccctgaacagtttcctactacaattatgttagaaatcgatcttgcggctggaaatgatgatgagatagcagaggcactgcgaatatcattaccacaatggcgaaaagttaagggtgtaaaacctgcaccgcttgatgcagtaagatttggttatgggacaataaaaaagttaatgagctatagaataataccaatgcttgatttacttgcttggtcagaaagaaaaaaagtgcttctgtcagatgatagaatatcacgattgatttatagagatgaagatgacgataaggtaattagacaagggtatcatattagagatgcagaccgacctttagctatgaaagtagtagaaaatgattttttacgccaattctacttttttataaataaaaacagacatattaaagagatgagcgtttatgatgtaatgaaaattacagacaccgattga

SEQ ID NO: 193280 - DNA, 624 bp, Klebsiella oxytoca
atgttgacgctttttttcaccgtggcgctggtgcatatcattgcgctgatgagtcctggcccggacttcttctttgtttcacaaaccgccgttagccgctcccgcaaagaggcgatgatgggcgtgctggggatcacctgcggagtaatggtatgggcgggcgtagcgctgctcggcctgaacctgattatcgagaagatggcctggctgcataccattattatggtcggcggcggcctgtatctgtgctggatgggtttccagatgctgcgcggcgcgctgaaaaaaagcgaagcggcagcggcggtagagcctcaggtcgaactggcgcgcagcggccggagcttcctgaaagggctgctgaccaatctggctaacccaaaagcgattatctattttggctccgtgttctcgctgtttgtcggcgacagcgtcagttccggcgcgcgctgggggattttcctgctgattgttctggagacgctggcctggtttacggtggtcgccagcctgttcgccctaccgggcatgcgccgcggctatcagcggatggcgaagtggatcgacggcattgccggtactctgtttgccgggtttggtattcacctgattatttcgcgctaa

SEQ ID NO: 193281 - DNA, 234 bp, Klebsiella oxytoca
atgagcatcagaaaaaatgacgtaactgtaaccatttctggtcctgttggttctggtaagtctgctatctatgccgaaatcgccattacgctgacggctctgggaatatcggtcaagcacgctgatcccaagtcctggcaagctgaagttaacgctggcgtatacaccaccgctcacgacatgctggatatgtataaccccatcgtctctatgcgcgaggttctggaaaaatga

SEQ ID NO: 193282 - DNA, 540 bp, Klebsiella oxytoca
atgaacaaccgcgattcaatcgttaccaaagagcaattaaccgaatgggtttcgcagctcgaccgcgatggcaactgtgatgcaacagaccatcaattagcggcactaattcgacagtcactggttaaaatggacagtgagccagtggcgtttgtcgataagtcttggacactggtctattaccagccgccaatgaatttggggataaagattggcgataatctctatcggcaggaacaacccgctcgggatagttgcgcgatcgccgatgttatcgctgaacgtcaacggcagcagtctgtaaagggattttcgacagagcaggatgatacgtatgttggctgccagctggcggctgctgcaatctgttatatcgaaccgatggaggcgatgagttactggcccgctgactggcatgacgacagtttcaagccgacaaacgagcgacgaaacctggtgaaagcagctgcgctcattatcgctgaaattgagcgtatcgaccgtactactggcctacagattaaaggagctgaccaatga

SEQ ID NO: 193283 - DNA, 183 bp, Klebsiella oxytoca
gtgaaaactatcatcgtaacactggagatcgatgttcctgataatgccaccgataaggatatttcagactgggttgatgttgaatatggccagtgcggcagccgcaagctggacaacccatgcatggctaatggtggtgatgctactgaattattccgccattactggaaatatgaggcctaa

SEQ ID NO: 193284 - DNA, 1020 bp, Klebsiella oxytoca
atggcagaagtggttatccgtaatgaagatgatgcttatgcgctgctggaaaggatcgtcgataaaaatattaatgccgaaaagttgaacattgagttcgagggatggcctaacctgtacgttcgattgaagggggagcagttcgaatcaacgatcaccccgacaatcatgaaagcttttatcgagttacaagcgggtattcatcgcgcttacgctactgctgcatacggtacgcctaacgcagccaaactcactaagtctgaaagacaaatgctggagatcgtggttaaagtcgagccgggaagctcgatatttactattgatttccaggaaatgtttgagaaagtatgcggggatctaattggaaaaatggacggtacgcaaacacttatcgctatcatctgtttcgcattattgtactttggtaactctgcgtacaagaaccgcttgcagacaaggaaagagattcgttccgaagagataaagagtgaggaacaaaaggcgctcttggataatatgcgttttgctcaagaacaagaaacagaacgcgcaaggattatggcaaatgttgctgcaacgaacccacgtgttcataccattgaagccttggcccaaaacactcaagcagagttactcaaacgttcagcaacagcggatagcattgagattcaggacattcagctcacgggtcgacaggctgaagagcttgctaaaaatgcaagaaaaccagttatagatattcgtttagatggcctttatcgcattttgagtgtcgactcaactgacccagatggtttcaaagtgaaagttagaagtagggcatctggtgatgaattcatcgccgtggttcaggatgaaactctggacagagcctacaaacaggcattgcaacgcggggaatggcaaaaaaaaccggtagaattgattatcaatgcgaagcaaagaacatcagatgactcaatttacgcagccaaaatcataaaggctaatctccctgaatcccctgataataaagtctaa

SEQ ID NO: 193285 - DNA, 4257 bp, Klebsiella oxytoca
atgtcaaatctgcaggaaactcctgtttgggtggatggaatatatcagctcactgaagagactcccgtactcggtaagcaggaagacgttccgggagatggcccggcaaatattcaggctcagcaacttgctaaccgtacgcaatatttaaaagcaattatagagtctattgctgacggaaaagagcatacattttataaaacagcaacggatcctgatggaacaattgctggcattcaggggactgatgttggtctggtcttcagggtggcccaggggggcgcagaagttcttgcttttaattattatctgaatgacgcgggtgtggctaaattaattgcggtattaattgggcaaggttctgttacgaataatattcgtttttttgcatcccgcatacttgctgaaaatgatttatccgcagggaatattctcaacggttctaaatgttgggtaatgaacactgcagatgaaacactggcagatgagtacatcaataacggcgggatgctcgaagcaagcgggaggagcctgctatcaagtgattctctgtccatcttgcgggaacttgtgcaaaacaatcttgaaggggatgagaataacatcagccgtgtcatggccagcgctaatgatttggctgaatcgttgcgcagcgtttaccagcgctcgaagatcaccattaattcaaccggcgaatccgggctttctctggataattccgggctcataatctttgattcagtagtaaatgctgatacgtccaatccgcagcatgtgactgtaaaggatttttccggcagcactgcactcgatctgttgctgttacccggagaatcattgtcatcaggcatactgacaacacactatgttcaacgggatttctttgggctgccggtttctgactttatcgccgagtccggcgttgtccgtgctgttctgaagctggatttgtcgtctcaggagctgaatgtataccaggccaacgtgtttgacaaaacaggcatgtgggctgccgtcacgcagtttgctgcgccgttcgcgacagcaaaatcagtgtcgtcacacagcgccggcggcattcaacttgtcattccaaacgcagatattacggcggccgggtatgaactgacaaaagagggagttcagcgatatctgagcgggctggataatctctttttctggtacaaagtcacctccgtcgccgctcgcgccgccattaactttgctgtcgtgccagccggtgctgccacagttattgccggagcgaatgtcactatttccgcatcggcatacagtgcgccggacattcccaaggtcaatctggcggcgatatcccgcaccgcatcacagagaatacgtgagcaaaataccgtcagggcgaccacgcttgctctggcctctggcgggttttcgcttccggagccggggatggtgaccatcggggctcaggcatctcagcttgacgcaacaggcgcagttcatacaaccacgatcagcaaggccgggatcactgtagcccggctttactggccgggcgggtcaagccgacttgaaaacggtacgatcacgtctaaatttcgcccgttcacactggatgacctcacattccattcccgcgctgagttaagttcgtctcttgtccgggtgcggtatgtgctgcccgcaggttttgggctggaagttgatctgagtgattttcgtgtcatggacacgtccggtctttttgtgccggttgcaacagttaacggatcgaccacgacccagacggccgtctccgcatctacagtcgccaataccattcagttttccgttatgctcacggacctggctgcggcggggtacggtgtttccgccacggacattgacgattctgtcagagactggctggttgagtatgcagatgagtgcctctttatggcctacaccgggacgctgaaaacgtaccggggctatcaggacttcttcagtttcagtcttgatgcaggggattacacgctggatgcccctgcgttcacctacagcggtaaacgctatgcgctgagcggcagcatcgatgtctgctacaggcaatctttacctgatgctctgcggggcgatttcatccgacttggcgctgatgtcatgaacgccacttccgtggatatgacgaatatgccggttcagctaaaagtcagtttcccggcaggggccgttcctgatacaaatgctctggacgtcatggatatggatggaaacgtatttgagtgtcagtttgctgatgagtttcaccccaatattcgcaccgggattaatcgtggtcgccaccaggataaatccctggcgtcaggctcgatcttcattcgggacagtatcgccgcaggcgcacagaaattttatgaagtccgtgcgtatcggaagagcatccgcagcggatactatccaggcctggtaccttccgcgaatggctacactatcagcgttggggggtatgtctgggaatttaacgcctcacaggcatttttgctgacagcagtaacggacccgtcaggaacgcggcataatattgctcatgagctgcattttgcctacgcatccggcagcacagtcagtgaaccgctgatcagcctgcgccctcgcataagactggtcagcagcgggccggtattcaccgaagtggaaattaccacagtgaatatgggggagggttccgtacccgatgaggcattgcgttcacttgtccgggttcgcctgttcagcggcggtaaatgccggatctacgtcatgacaaccagcaccgtagaactgccagcatccacgttatacggcgtcacatcgcgcatcaactttctcgacggtgcatacacctatgatgccgcggccatgacggtttatcacgacgacgaaaccagcggaaaacgcctgtcggtaacactggtttctgcaaacggtgatacacaccgtgacggcacaacatatggtccgaaccgaccgatgagagcgattatcctgacgccgtcacccaccaccacccggatgtatgcgggctggcagtttacctcagtgagcgatgcatcatttactggctggactgtgccgaaaaactggacctggtcccatgagttctggatcgatatggaaacttcggtgacgagtgccgcatccgggacaaccgcgcgtgaaattgtcaacctgacgcagaacctgcctgccgggttcattggagagtgcgggtttccggctgtcaggcgtcgcgatgtcatggactggatagtttgccacgtctcggggacaatggaatggtttaacagtgccgccgccacgccgtacggcgggggaaccagtaccaccaaactgttccactcatacacctgggaggtaatgaagctggtaaaaaccgggaaaagcaccctggatgcagtttactttgcttttaaggcttacatgacagcccgatggggaaccatgacggaggttggcccgctgtggaccagtggctcactgccgatgcagttttcgtcccggcttgtcgtcccggtctggcagtacctgtatgacctttccgtttcggcaggtggcacagctaaggttacagagctgaaagccgccattaaaagctacgccgacgccatccttgcccattaccagacgtatggcggagtcccggttgacgggcggcaaaaaaattccgggccgtccaacagtaacgcaacggcgctgcgcgtttttgcgctggccatccatgccggtctggatactgacggctcgtatctgtctgcgtttaacggcattgaagcactgctgactaatcgcgatggattcatgaaggctgagggcattatcacggacggtccgtcagaacgcccatcaaccggcaggtatctgcactaccagctgtttgcagcgaataactatgttatcgcgtgcaggctgctggggagagtgccgaaatttgattgtgtgaatctggcgctgcaggccgcaacgggaggtggcgggtttaatgaaattgattactgcatttcagagagtcgcagggggagtgcgaacaccatttcgttcgcgatgatgccgctgattctgtcggaacgtccgtcggcattaaatctgacgtcagctctggtcgatgtaatgaaaacccagtacggaccgcgaccaggatttccactgcgtttttataattttgacgggacaacatccgcaggccagtcgctacaagacctgagttttgtggcaaccacgctagccgatttgtggctatggttctatttcaacaactaa

SEQ ID NO: 193286 - DNA, 231 bp, Klebsiella oxytoca
atggcggaagcggcaacccctcacgatgcggtattcagaacttttctctcccgtgtggaaaccgcacgggattttatcgagatccatctgcccccctcactcatgcaaatttgcaaactggataccctacgccttgagtcaggaagctttattgaagatgatctgcgccccttctacagcgatatcctcttgaagcggcgcgcgataaatgtggcctttaaagcgcgataa

SEQ ID NO: 193287 - DNA, 1434 bp, Klebsiella oxytoca
atgctggcggctaaccagcgcagcgatcacaaacgcctgctgcgcgctttccaggttggactggaccttcaggaacatatttccgtcagtcttcatcagccggaagaggtgcagaaactggtggagcgcagccacgcggaagcggtgattcgctggaacgcgcaaaccgttgccgcccgcctgcgggagctggcggacgatctcctctaccaccgttatcctcagcgctttcagatggataaacagatcggcgcgctggaaaaaatcgcctggcagcatccggataatccggttggccagttctgcgcctggcacttcagccgcattgccagggttctgcgcacccagcgcccgctatacgcgcgtaacctgatggcggataaaacccgccgcctgccgctgctgcccgcgttgaaaaactatctgtcgcttaagtcgccggcgttacgaaacgcggcgcgtatcagcgtgatgctgagcgtcgccagcctgatgggcagcgcgctgcatctgcctaagccctactggatcctgatgaccgtgctgttcgtgacgcaaaacggctacggcgcaacccgggtacgtatcgtccatcgggctgccggaaccattgcaggactggtcattgccgggctcacgctgcactttcacgttcctgaaggctatacgctgaccgcgatgctgttcatcacgctgttaagctatctgattatccgcaagcactacggctgggcgatggtcgggtttacggtgacggcggtgtacactctgcagctgctcaccctgaacggcgagcagtttatcatcgccagactgattgatacgctgattggctgtctgatcgccttcggcggaatggtctggctatggccgcagtggcaaagcgggctgctgcgcaaaaatgcccacgatgcgctggaagccgatcaggaagcgctcaggctgatcctcagcgacgatcatcaggccccggcgctggcctaccagcgcatgcgcgttaatcaggcgcataacgcgctgtttaactcgctgaatcaggcgatgcaggaacccggctttaactcgcactatctggaagacatgaagctgtgggtgacccacagccagtttattgtcgagcatattaacgcgatgaccactctggcgcgcgagcacaatatgctgacgccggatctggcgcagcgttatctggagtcctgcgagattgcgctccagcgctgccagcagcggctggattccgacgggccgggcagcgcgggggatgtgaacattatggaggcgcaggatgcggaggttcctcgcggcccgctcagtacgatggagcagcatttgcagcgcatcctcgggcatctgaacaccatgcacaccatttcatcggtggcatggcgtcagcgtccgcatcatggcatctggctgcgcgccactaagcgctaa

SEQ ID NO: 193288 - DNA, 381 bp, Klebsiella oxytoca
atgctgggtgcagtagagcgtcgcttcggtaacaggctgccgacatcccccgttgagtggctgacagacaacggttcagcctaccgttctcatcagacgcgtcagttcgccagaatggtaggactggagccaaaacatacggcggtacgtagtccagaaagcaacggaatggcggagagcttcgtgaaaacgatgaagcgcgactacatcagcatcatgccaaaacctgacgggttaacagcggcaaagaaccttgcggaggccttcgaacattacaacgaatggcatccgcacagtgcactgggatatcgttcgccacgggaatatctgcggcggcgaaccagtaatgggttaagcgataaaaagtgtctggaaatatag

SEQ ID NO: 193289 - DNA, 780 bp, Klebsiella oxytoca
atggagatcgtcaagcaggcgggttctgttgcgctggagaataaaaagaatctggatcttatcgctgagattatggtgattggattgacggcagaaagtgaaatatcatttgcccgcaggggcatcgttctccataaatcagtactgtgcattaagctaacagcaccacaagtgaccagcgatgaaatacactatttgtcgacaatcaacgttctcaccagagacttcgcattgaaaaacgtttttcattattttgacgctgacgtgataacgttaatcatatttgatatgaatgagcaaaagcttttcgctcttgaggaaaaagtaatcgcgcgctatcagcaggacaagctttataaagtgggggtgagttcagttctgcgacgccaggaggttatcaccagcattaaacaagctaatactgcgcttgatgttcttaaaaccagaaataaaagtggcgtaatgagttttcgtcattcaggtattgatcgcttgtttataaaacatacccctgaggaactaaaagactttatcctggatctgttttcacctgtgctggaagagaataacaaacctggtatattgttggtgacgattatctgttttttaaaaaacaggcagtccgcagtgaatactgcagaggagatgggcattcacgtcaatacgctgtatcaacggattaagaagttcgaaacgctaaccggtttaagcctcaataatgcagacgaatttattatgattgccctgacgtgccatatgagtcggttttatcttagttaa

SEQ ID NO: 193290 - DNA, 1446 bp, Klebsiella oxytoca; identical to SEQ ID NO: 178989

SEQ ID NO: 193291 - DNA, 1131 bp, Klebsiella oxytoca
atgaataaaataattatcgcagatgatgataaagtacgcagaaccaaaataattcaacttctaaatcaagaacatgatattcctataaaatggattgatgagtgtgactctattaattcagcagttcaacttcttaaaagcacttattactcaattgctttaatagacatggggctacctaaactttcaggtggggagccggacaattttggtggtgtagcaattgttgagtctatttataaaaataaagtcaaaagcccaggttttattttgggatatactgcgattattgataaccttgaacaaagaactgcagctttcaaagctaaaggtttcagattagagcagagtactgctggtgattattcttggttgaataatgcgaaagccgaaatcaaacactttcttaatgttttttcaaattatgaaagagggaattataacatttcagttttaactgttcatggaattagaagttatgcttcctggcaagaagatattgagagaatcatcattaataactctgaatcacaaacacagacattctttcattataaacacacgttaatttccacttattcatttcttaaatcaaaaaaacgagatgaaattttagatcactttacccttgagctacaactatggatcaataataatagaagcaataagattatttgtgtcgctcatagtttcggtacttttttattgatggaaggcattaagcgattaaatgataatagattaacaaacagcttagaccttataattctttgtggaagtgttttaccagaagactataagtttgattttctttctaacaatcgtgatgtgcatattttaaatgaatgtgccatccatgactacccattattattcaatggtgcaatagtcaagaactccggtttggctggaattctcggattcaaaatatttaatggacagaaaattaaaaatagatatttcaatggcggccattcattattttttgatgaaacccatataatgaaatattgggtccctgtctttaatgataaggaacgagtcattgatattaacgagggagctcatcaaaataaattttttaaaatcattctcaggctgagccaacttattggaaaactagtaaaataa

SEQ ID NO: 193292 - DNA, 447 bp, Klebsiella oxytoca
atgaacattcttatcattgaagataatttatataagagtgataaagtatgcatgtttatgaatgaaatattctccgatcctataatcacattggcgcactcagtttctagcggtattaaaatactaaacgctgaaaaattcgatttagctattatagatatgagcctgcctacatttgataaaactcaaggccaaccaccaagtaatccaaaagtattcggtggtttagagattgcaaaacacattcatagaaaaaagtccaagctcaagtatatcatcctaacccaatacaaatcgtttgcggaagatgataaacgctatgatctaacctcaatcaaaaaaatattcaaagaaaaatacataaacaatgcacttggttgcgtatattatgaaaactcaagtcttaactggaaaaaagaaataattaacattttggatttggaatga

SEQ ID NO: 193293 - DNA, 3462 bp, Klebsiella oxytoca
gtggttaacttcattcaaaacttcattaattcaaacaaaataaaaaaaatactaggaagctatggggatacaaaaactaaattcacccaaggcaaaatctcagccttgaataggttagaaatggcactaaaacaaatcaacaataaagagcatatatcattttcgcgagactgctataaaaacgttcaattcagaaagttaataaatctttactctttttctaataaatattttataagtaccactttagaaaaagatgtaccgacatccttcatattattcacgttcctagagttttataaagataacatccatcactttcatgaatttgatgattataagatgcgcattgagaatttttttgtcacaaaaaaatattctgaatgttatggtttacttaacgaagtaaaagaaaaatttggggagagcatatggtattatgacgttttaatggcgataaatatagcttccggtgcaaaaataattaaagaagattttgttgttaaagatttccctcgaatatttcatataacaaatcatctctttgaaaaacacacatctattagtagtctatcatataagcaaaaaattaaaatagatactcttgatagattaagaaagcaatatactaactatgcagactttatatcttttattttacagcctacaacccttgatccagacattgacctatataatgttctacaattctcacaacgattgtttccaattgacaaatatcaaataataaagagatgtcttttggaggttattatgatgaacatagtaactcaagaagaaactactaatgacataaggcagtttctcgaagaaatttccgccattgaaataggaacatactggaagaaacttcgcaactcaatgaattataaatttgaagtttttttgacaaataatgaaaatataattttagaaagatattcacaaggagactatgatgaaacaattactctttgcgagagtagtttactagacaatcctagtaattttacaacactagagatttatgcaaggtcgttactatttgaaaatagcactaagcttcgcgaggtgttaatgaggccagcagatgatttaatgaatttgttattaattaatttaatcaatgcttatagaaatccttcatcatattattcagcaatagaagctgttgaggatctaaagtttagatatttgtgctttgattttataatgccaattctacctagcttctatgcatcctatccgtatcaaaatacagaaaaactaaaactctccctaatcagtacatgtaattctgaatattgtttcactccaaaaaacaaagcaagattagataatctactttctaatagatacctaataaacaatgacattattgaagataaaaattacttattttcggaatctagaaatctaagactccagttatcaaatgaagttaataaagacaatataaataaggaaacaattctaaaactattagacaaaataaatgatttgcaagatctcacttccccagacaagtgctatattatagcatcaacgctatttaaaattaaagagtacaaccttctcatttgtagaattgtcgatagcgcacttattaatagttcaagcctaatcttgttcccagtttcagagttggcatatttactagacgaagatgttgaaattgcagctgatagtttaaatgcagcaatatttagccatttcatttttcgccacattgacaaagattatattggtaacgtatcatattttgtagatagatacttagaaaagtttaaagcagtaaaacccagtgacatattgcatttaaaaagtgaaattacaagtaaagaactatttttattaaagaatgtatgtattgaggacattcttagtggtcttgaaaatatagataaaatacttttaatgttaacggaaaggataaaaatcttaaatattctcatagagaaaagagttatttttaaattaaatgatgatgaagttacttcactcaacaacgaagaagggaaaatatacagtaaactactggtcaataaactaaccaaacatcatttatcaaacttgatccatatagatttcaatggaatatttctagccaagacagacttttataaacttgcttacgaaacagtaaaaaaaatacatctcgatgatctatcgatacatatagactactatatttcttcaaataatagcaatgacgctgaatgcttaaacataattgatgtaaaatcgggagatgaagcgaagttatatcattacggaattatttatacaaatatgatcaatgactttataatgaatagtgaatatggccttgttcgctatttaagctctgaatttagacatggtgttttgccaaatcaaataaggagtgtttttgaagcagattcattagttacactaaaaatcgccgataatacatatgaggaaccgacattctggctgaataaaattagtgacattgatacttacggaaaggagcatctaaacatttgtatccaagaattctcaaataaaattgactcatttattgtcgatacgaatgatcttcttatacctataatttctgataaagaatcaatcttagaaaatcaaacaacttcaggattcatattttctgctacaacagaaaaatataatgaattaatgaaatttatgaataatatgattgagaccatagggaataataatagtttttcatatgaagactttaaagaatcaatcgaagaatttatctggagacaacttgaccattgttttatagtcatgaagacgataatcaatgaggctgttaaacctaacttcagagcagagtgcgataaattgttaagtgcactttccaaaaataaaaaaatcatagaaaatggattactttctgaaaaaattcaactagctaaattcaacatcagcgaaaaattatcagacattgaaaattggtttcgtagaccaagtaaagaattagatgaagatattgaattagcaactttactcatcgcatcaaaagattatatagaaggaatttactctccacaaaaaataaaaattgagttaagacataatgaacatgactctttaaaactaagtaatgcctcgttattaaatttaactcgttcactagtaactatgtataataactgccttagacatggtatagacctcgttggtactcctatatccgttactactacagtcattgattcacaattaaccatttcagtcgaaaatgaaatatcccatgataagcgacttgaactatttaaaagaaatattactgatgaagtcgactcatatcccaacaacgattacagcgatagactaaaaatggaaggaggcactggcctatataaagtattcaagaatattcaagatggatttaaaaaaagtcgatttacagttgaactaaacgacaagatttttaaacaaataatcgaaataaatctggagtaa

SEQ ID NO: 193294 - DNA, 519 bp, Klebsiella oxytoca
gtggcaaaaaccaggctgcggccccagatagctgcgacaacattgtcagtgacaccttcggccaggcaaaagctacagtgctcccgattggcagaagagtgccgcacacaagatctggcgtataacgagaaaacgatagcctatagtctgccacatcagggtctgcgggcaaaagcctcaagccggttcactcctgatagctatcgggaacatggccagccagtgtcagagaacctgctgaaacaggatttttacgcctgcggcccaaaccagaaatggtcaggtgccattacgtatctacgtaccggtaaaagctggctgtacctcgccgtgattattcacccggagtcgagggccgctatcggctggtcaatgtcgtcgcggatgacagcacaactgacatgcgatgcagtgaagatgccgctgtggcggcgtgaacgctctgagaacgttatcgttcatattggtcatgcggtcagtatgttcggagggttatcaggcgctgctgaaacagcataa

SEQ ID NO: 193295 - DNA, 201 bp, Klebsiella oxytoca
atgtccgaatttagttgggaagccctgaagatggccgagtgcaccggcgtggacgcagaatccgtgtgctcagtcattatgaatctcaactttaactggcgcagcaaacagcagaatcaagcaaccgcatctaagcgcgagagcgaacagactgcgaagattgcccgactcaaacgccgcctagctgaacgtgatgaatag

SEQ ID NO: 193296 - DNA, 1434 bp, Klebsiella oxytoca
atgaaagagttacaacctgtcattaatgaacttattgaacaatcacggggcgcagataagcttaaacaaaaagaagaattgtgtcttttgaaaaaagttctggagatctatgaccagaaggttgtggcagaagtgttacgagcagtgagtggtagtgactggactcgtgaaactatcaatcgctgggttaatggcaagttaacaaataagcgattggttgatgtcgagattaagatgcttaagagccttttaccatcaccgccagcgcattataatcaaagtcgttttcgttttgttgacctctttgctggtattggagggattcgtagtggttttgaggccatcggtggaaaatgcgtatttaccagtgagtggaatgagtatgccgtcagaacttataaagctaattggtactgtgatgaaaacgatcatatttttaactcagatattcgggatgtcactctgagtaatcaggatgatatcactgaagaacaagcttacactcaaattgacaaaagtattcctgatcatgatgtccttttggcaggctttccatgccaacccttcagtcttgcaggtgttagtaaaaaaaattcattagggcgtaaacacgggttcgaatgtgatacgcagggtactttattttttgatgttgcccgtattatcatggcaaaacagcctgctgtttttgtcctagaaaatgtgaagaaccttaagagtcatgacaaaggtaaaaccttccgtgtcatcatggataccctaaatgaacttggctacgacgttgctgatgctgactctatgggggcagatgaccccaagattatcgatggcaagaacttccttcctcaacatcgggaacgtattgtgttagtaggattcaggcgagatctaaatcttgcagaaggtttcagtctcagggatatagttaaagagtttccccaacggcgaccggcagttaaagatttactagatactgaagttaatgacagatacattttgacaccaaaactttgggattatctttacaagtatgccaaaaagcataaagaaaaaggtaatggttttggatttggacttgtagatactactgataaatcaatttgttgtagaaccctcagtgccaggtatcacaaggacggttctgaaattttaattgaccgtgggtgggacatgagccttggcgaaagggaatttaatgatccagaaaatatggcccgtcgtccacgtaggttgactccgagagaatgtgctcgactgatggggtttgagcagccgggaaaagcaacttttcggattcctgtatctgatacccaagcgtaccggcagtttggaaactcagtcatcgttcccgtttttgccgcagtggcacgtttactagattcaagaatctcccgcgctgttgaaatgcgagaatcgaagacagtaaaaatgtga

SEQ ID NO: 193297 - DNA, 1245 bp, Klebsiella oxytoca
atggatagtagactcagcgaatattttatttttgcagcaggaaaatcgctgagtgcggtcgatgctgtaccttccagatctaatcagcatgagattggtgggttggttaaagttggttttggagaagcaattggtcatatcatccccggagaaaagctacaaattccatgtttgatggtttggttatcagacgatgatgacaatagtctgataagcacaactgtaacttggtatgatacaagggctggtaaagcgcaccgtgcttctgaataccgactttattatccaggcaatgaagtcacggagcggattggggaaggcgattttcttctaactgctctacggcatgacaacgagttggtaatatgttttgctcctaaaaatagtcaagtcgaatggcaactacggtctttgtttggccttggggcaggtaatattacggatcaccgtttccacagcgctgagctatcagataaaacattgttgctgccgattagactttttcttgaagaaatggggattatctttgagcctgaagtagaccctcatgatgcaactttggagtggttgctatcacgatatcctgacggctttcctacctccaaagttttttcagaactggcccgtgaacgcgtcggtcgtcattctgttggaactccagatgaaactcttatggcttggctagaagaagaagagatgctatttcgtgtaatggaaagacatatcgtcaggcaacaacttcaggccggattcggagcggagaaagatgatgttgacgcttttattcaatattctctaagtgttcataatcgccgtaaaagtcgtgtcggttttgctttcgaaaatcatctcgaaactatttttatagaacatgatcttttatttgaaaaaggtagtcgccgtaatattacagagaataattcaaagcctgattttttatttccttcattttccgcctaccatgaaaaaaaatattcacaagataaactgactctacttgcagctaaaactacttgcaaagaccgttggcgtcaggttttagctgaggcagctcggattcctaaaaaacatctgattactttacaatctgtaataagtgcaaaccaactagaagaaatgagatatcaccaattacagctagtgattccatcaccggtactttcactgtactctcctgacagtcaggatttcttaatgccattatctgaatttcttgatgtggtcaaaggtactactctagcatga

SEQ ID NO: 193298 - DNA, 171 bp, Klebsiella oxytoca
atgcatgaggatatacctattatattgcccaatgattccttgagaatgattgaagcagcggccgcaatctctggcgaaacggttgagcagtttattttgaggagttcctatgagagtgctgtaaaaatcattgaacatcacaatagtgatggtagttatgataaatcatag

SEQ ID NO: 193299 - DNA, 306 bp, Klebsiella oxytoca
atgaactgttccaaaaaagaacactcgttggtgtgtaaattaaaatggaactgttataacagactgaaaatccagtataaatattcaaaggcgtctggagacgcgtactgctctcatgtcttttatccttttctcagaagttatgtacataagaaattcggtccacgacaggagaaaagttttcactatcttcatcggattgagtataaagagtatttcctaaatctgatagttgcgcgtggtaagcagttcgctgagccatgggatgattattggtttcataggtatgatgtcgccggacgctga

SEQ ID NO: 193300 - DNA, 294 bp, Klebsiella oxytoca
atgagcaaacaacgtaaatggcgtttcgtcgctgaaggcgctgaaaaacaacagggaggctcttatagcggacagcgcacagggttctttcaagtctggtacgtcactggtggtgatggtgtgaagttccgccgttgcccttatacgcccggcggctggaaggtccagaaaaaccgcaaaacgtatgacgatcagcctgttgaatatgccgtcaaaaatcatgaagacatttcagccctagatgcatttgttggagaaaaaccatatccgggatacgggagagttcaggcatga

SEQ ID NO: 193301 - DNA, 264 bp, Klebsiella oxytoca
atgaagaagcgtttttccgacgaacagatcatcagtattctccgcgaggctgaagccggggtctctgcccgtgagctctgccgcaagcacgccatttccgacgccaccttttacacgtggcgcaagaagtatggcggtatggaagtgcccgaggttaagcgcctgaagtcgcttgaggaagagaacgccagactcaagaagctgcttgccgaagccatgctggataaggaggcactccaggtggctctggggcgaaagtactga

SEQ ID NO: 193302 - DNA, 1062 bp, Klebsiella oxytoca
atgctcagtatttgtcacaatgcgtggtcaacgacgccacctgccgcacatcaacacccgcagcagcaccttagcgcatcggtcaaagccgttgcgaaccaacgaatatgggtcgaaacgccatcaggcaacggccaattacctgttttcgccgatcgtccaataaaccaggcggcccctgacgttgtgcggattttcattgtcatccatggcacgctacgcaatgctgacgcgtattacgcaaccgggcgcaaagtcgttaaaaaggccggggatgcaggtaaaggcaccatggtggttgctccgcagttcctgaccggcccagatctcaaggcattttcgctaccggctcccgttctcgcctggactcaggaaggctggaaggacggagcgccagccctgacccctgcgccaataagctccttcagcgcacttgatgcgttactgacgcatttcgccaaccgcgcgctttatccttcgttatcaacgatagtgattatgggccattcagcaggtgcccaatatgtacagcggtatgccgttgtcggccataaaaatgagaaactggcgcaaaccggcgtgaccgtgcgttatgttgtcgccaatccgtccagctacctatatttcaccgacgacaggcctgagagcaaggcgatagcgaacggagcctgtccgcgcgcaacagaatggaaatacggctttaaatcggccccgccctatgtggcgtcgcaggatgtcagtaagcttgaatcacaatacccctcacgcgatgtggtgtatctgctcggccaagcagatacaaacccgtatacccattatatcgaccgttcgtgcgccgcaatggcgcagggtccttaccgactcgcccggggattagcctacttcagctatctgcaaagtcgacacccaaccgatctggagcaaaaaattgtcgaggtgccgggcgtcgggcacgatcattccgcgatgtttacgtccgattgcggcatcgccgcgttatttaagctgaatttgccgcaaacttgccctgttgttggaaaatcggagccgaccacccggtaa

SEQ ID NO: 193303 - DNA, 450 bp, Klebsiella oxytoca
atggctgacaagaaagtacaatggactgagcaaactcctgaaaatattgatgaactgaaaaagaaagcgggtaacaaaaacaactatcatgacagactaaacgccgtgaactcactgaagaagtttaagtgcagacagtctatagacatcctctggcgtctgatgatgaatgatttggtttatacggttaaagaagaggcattccgtgccttacaagcatttggtgaaaaggtgacattaccccgtaagaaaaaggggcatctaatcaaagacataaacaaaaaagtgatagctgtaggtaacacattcaacggtgactttgagattgaagagtttaagagaagattccagcaacgtcatcctgaagcctatgacgtgtatcagtttgaaaagaaaaagaaatttgaagaatggattatcaatacactgaaatcagcccctaaaaaataa

SEQ ID NO: 193304 - DNA, 357 bp, Klebsiella oxytoca
atgctgaaaactaaaatattctcaggggtggttatggctaacaaaaaacatagtgtgtttaaggcactttcaatgggattcgaaaaagttcttgatgagcgtggttatgataatggcgcttattacgtcaaggatgggaagatttggatttttgatattgtagctttaaagcaaaaattaggtgtctcttcaaatgaagaattagaagcacaagattatgatgttgagacatatctttcactggaaaaagaaccgaatgaattagcagcactatatgaagatatggctgttgaagatggtgaaccagtttatcttgaaggtggaatgtatctttaccctgatggctcaattcgctga

SEQ ID NO: 193305 - DNA, 1425 bp, Klebsiella oxytoca
atgagtctaaaccggaagaaaaccctgaggcaagtcaccatgacaatggtcacagatgcaaacgacccagagggggaaatcattgagcttgattcaatgaacaactacacaagaaaggtggtacctcctcttaaagtagatgggaagataatcaaaagttatagctataatttcttccctataatattaaataatgatggctcaccatggcgagaaggtgttttatacataattgaaaaagcaaataacgactttagttataacttatcaacttatcatagcattgtgtcagatttaactcatttcaaaaattatatcgatgacaatggtatagatatgtatagttttcctaaaatgaagctattgcgcccaacttatagatacagaaatttcctactccttcttgtccaaaatggggaacttagttctcatactgcaaaaaggagagtatctgccatgattaagttctatcgttacttaactgaagaaaattattttaagccactaaaccctctctggaatgaaagtgacttatatatcaaaacatgtgattcagtgggttctgcctttcatcttaaaaaggtcacaactgatttaaaaattaaatctacaaccaatcacaatcctttctcaaacgaaataatcgatgaaggcaggcttaggcccttaccgaaacaagaacaattagcattaattgaaacaataaataaccttggaaatacagaaatgctattaattcatctaattgcattacttacaggagcaagaatacaaacagtgttaactttaaaaaaatcccatttttcgaaaccaatagatactagcgaccatggtttcactatagcaactgggcaaggtacaactatagacactaagaaagataagaatttaatacttattttcccaaaactactctatgataaaattaggatttatagtttaagcgagcgttaccttaatagagcaagaaaaataaaaagtgacgactttaaagattatttatttttaagcaatagaggggcgccatattatattgacaaggaatcattaaaatcttccaatacacagcccaatgaaagaacaatgcacaatggagaggccgtaagacaatttatttctaaaatggttattccgataatgagagataaactatctaatgataaatatactttccgataccatgatttacgcgctacatttggcatgaacttattagaatcacaaatgagattagttgaagaaaaaaagcaaagtctgcatgaggccagagaatatgtcaaagcaagaatgggacatgcaaccactgaaatgacagatagatatttaaattataaaaatacttctgatatgctgatgacacatcaagaggattatgaagagtatattaatattctcttagctaatatcaataaggagcaattatga

SEQ ID NO: 193306 - DNA, 1884 bp, Klebsiella oxytoca
atgaatatgataaatttaaacacaagatctacgataatatcacacccatttaatgagagtttagacttaatagaccttagcatgattgctcttaattttaacagaaaaaatcactatgtaaattctttgttttatcaaaaaatagtcataagtggatccaatatatatgcagattcgattaattctaacaggagaattcttgtaaggaaattatacaatgaaataataaatcagttactttttggagggattcgaaagtctaaaatatcgtataatttatcacgattctttcaattcataagatggtgtgactcacaagaaatacatgactgcctagataatgataaaagttgcgttgatgcttttaattcatatgttaattattgttgggagcagatttcattaggtaaaattaaagagagcacaataaccggcaaattacaagtattaattaatttattaaaaggaataattaatgaagaactacatcaatactttccaaatgtgagagtatctctgagagacagggagttaacgctgccgcccgacgacatacacgctagtgaaaacattcaaatacttcattcagttattagtggtgcacatgattttattactcataagaaagcatacccctatgcatggaaaatccctgaatttctaaaaatccacgcaaatactgtttggattttcccgataagatgctggtgtcaaacctgtttaaacgataatgggacaacaaagaaaacaaaagtaaactctggcttcaattacaaatatggtagggtagtcacacctagagaactcagggaaattggagttactgacctagaaactcaaaagagaaccatccgtcgctccgttcttcttcttaaaaaaacgaatgattgcaatctatatattaattcacaacaaaagcaggagtttttgcgtgatgcaattgcatcgttcacctttctcttaatagcaaatactggcatgaaccctactcaattgttaagcataaagtggagtgatgaatatgacattcagaaagaaagcattgacttttgtttaattaaacatagagcatttaataaaaaagtacactttagaataaccagtaaattcctgcccgtttttaaaatctatttacagctaagatattactacttaatcgataagagctctgattatttgataccagcttttggtgataagtatgaataccataaagatttggttgatatatctaaaaatataaaatcattaatgctagacttaggttatgaaaaaggtttgattgttgcacgagaatggagatgtttgaaagctgaatggttaattaacaatgcagacccctatgttgcagcaaaacttttacaaaatactgaagcgactatattaaatcattattcttcagggtcgtttactaaacaaactgagaaccttagcgaatatctaaccaaattgtcccacgaaggtgcagtaacagatggtccatataaaatatcgacgtctgttggcggatgcaaagaacccgataaaccaatcagtctttctggcgatattgtatttaagtcagactgtaagcaaccagaaggttgcttgttttgctctaattttttaatacatgtggatgaaaatgatttacgaaaaattcttagttgcaaatattgcattgaaaatacccagggtttatctagatcctatgatgactggcatgatatttatggtcctgtattactacgaattgatgaaatagttaacaatatctctgaaattaatctcaatctggtagatagggttaagaacgaagtatatatagaggggaatcttgactcatactgggaaggaaaattagaaatgctaattaatattggagcgatcacaaatgaaaactaa

SEQ ID NO: 193307 - DNA, 1971 bp, Klebsiella oxytoca
atgaaaactaatcaaattctttccgcaaatatctttctttccgaacaaatgccgcctcctgaccccatctacctttcaaataaattaccaccattgtcatctcatgttataagtcgaaatattaatggggagactatttcaagatactcggatgatgaatgggattttagttgctatgataaaaaaaatcgtccgtgtatactttcattcaagcattgggccaatggtgatacaggggatattatatgcggtataatttctgatttaaaaaaattagtattttcttatatctggtatagagatggtaaaaaacatcaagttaagaatatatctaaacttggtttaacattgaatgctttagccagatactgcatatcatctaatatatctatctctgagttgttaatatctaaacaccatcttaacaattgcttgatggccttaaaaccaagtgcaatgtatgatgtcaggagattcttactggcttttaatgatgtaaaaaatgaacaaaagccatttaaattctgtgatataaaaaaactgactgagatgaatgcaactataagaagttacagaaataatctaaaacaattcccgccaataccaccaagaatttacctatcatatattaaccggatcacttcggacatacaattattagttgaaaaaattgatgtttttttggatttcattttggaaattaaatctaaacacgctgaaataaataaacttccacacaactctagatatattaacacgcctccagagtacaaaattgatagaatcatacggaagcacaatttagatttaatatttgactatttccctgcaaacaagaacattcaaggagtattatatctattaaatagtgtgttatttctatgccgattagcaatccaaatgttcacgggcatgaggctagatgaggcaactaatttatatcttaattgtttccaagtttacaataaaaatggtcatagacattatatcataaatggcagaacgaccaagttaatggaaagagatgctaaatgggttacaaatgaagttggctataatgccgcatgcattgccaataaaataagcttttttatagtgaatcaaatagaaggtttctcttatgatgcttgtaatattcctctttttgtccgtacatcttatctaggtctagtaagaacctcaccaaaaataaaaaactctataatattacctgccgaattagcaccgaatgatgaaatgaagaaaatctcgtggctaaatgtaatgataacaaaagaggatgtatcagaacttaagagaatagatccattcagagcttgggaaactgaatcaaaatttgatatcgggcaatactggcctcttcaaacacatcaatttagacgttctcttgcattatatgctacaaggtctggactagtatcattaacttctttgcgtcgacaattacaacacttatcaactcaaatgactctttactattcccgcggaagcacatttgcacagaatttaattctaaatgacaaatctcacttcgctgcagaataccaagaaatacaaacatatactcaggcattggattacgtagacttaatcttactatctgatgacaatttatttggaacacaaggtaaaataatcaacaacaatcttaaaaagaatatatctatcgataaaaaagaaaccattagattatttaaactaggccaactggcatatacagaaacatgccttggcggatgtacaacattagaagtatgtacgcaacgctcaactcgttctttaatcagttgcttatcttgtgaaaatgccataattaaaaaagacaaacttgagttagtaataaaagcacaacactcattgttagaaaaaattgacgaaaaatctttgagttacagaacagagcatcaagatctccaattacttgaaaaatatctcagttcttataactcaaaatcgggagaaagtaaatga

SEQ ID NO: 193308 - DNA, 336 bp, Klebsiella oxytoca
atgagtaatattgatgcgtattattccgccctagaacgcttgatcaacaatgtaccagtaattgttcctttaggcacaaaaataagttatgacgctgtttcacttgaagcaggaaaatctaaaggcagcataaaaaagtcaaggctaatgttcactgatttaattaaaaaaattgatattttgaaaaaaaagcagaaaggtattgatgtagtcgatattaaaaaacttcgccttgaaattctagaattgaaaaatcagcttgataaatctcttgcaagagaaatatgcttaattgtagaattagaacagattaaaaaatgtaaaaaattcaagtaa

SEQ ID NO: 193309 - DNA, 189 bp, Klebsiella oxytoca
atggaaggtacgatttacgccccgattacctattacgattctaacggctgtctaattgttggtcacaatctggttgggaaaatccaccctcaattatttgataagttggttcgccgttcaaacgatggttcaacccgttcacagcaagcacgaatcaccagctacttagaaggactgttaaatggctaa

SEQ ID NO: 193310 - DNA, 810 bp, Klebsiella oxytoca
atggatggaggtctcactgattcagtgaaacatgctttagaacagaggattaagagtcccttgtgggggttcattattctggcgtggacatggtttaattggccgaacctagcaatgttgttcatgagtgatgcgcctgtaaagttccgaatcgattacatcctttcacaggattatttctatctgtattacgtgtttgcccccatcctttctggcagcattttggctgttgtctcaccctatgctcagtggctcctgtctcaggcacataggtgggctgatgacagatacaaggataatgtttttcagtccaaggagagagtgtttcaagataacatcaagctatcaaagcttaaggttcaatcagatatggcagtggatgttgaaattgccaaaatcaacgctgatatacagactgaagtcgaaaggggcaagcgcgagcagatactaactgaagagcttgaaacccaaaagaaaatccttgaggaaaaaattgaacttcttaccaaaaaacttgaggatgagaaagccgattttgaagagttgttaaaggaaaagcaaaagattcaagatattgcgataaacgttacgacactgttagaaaaagccctaagacttgatgacagaaggtcagttaagcaattggtggatgaaatttctgatttgttcagcgtggaagacttcgagctttcagaacaaaggaatgctctgaagaatggtataaggaaaaaacggagcgtagctgaatttattgaagaggttaaactcaaccaaagcgaaacatcagagattaatcttcaaaataagtga

SEQ ID NO: 193311 - DNA, 453 bp, Klebsiella oxytoca
atgataaaaatcagcaagttagtaacatacccccgtcatattaactgcgtggagggcaacacgaccctgtacgctttaccaaaagctgagattgtcagccgctggtatgaacaaacccacgatgattttcgcttttgcttcaagtttccggccaccatttcgcaccaggcatcgctgcgcaactgcgacgacttaagccacgagtttttcacccgcctggcgccgctgtcatcgcgcattggccaatactggctgcagctgccggccacgttcggccctcgggatcttcccgcgctctggcagttccttgacagcctgccgcgcgaattcagctacggcgttgaggtaaggcatccggagtttttcgccaaagaggaagcggaacagcagctcaatcgcgggctgcatcagcgaaacgtcaaccgcgtgatcctgaagagacctttctattga

SEQ ID NO: 193312 - DNA, 870 bp, Klebsiella oxytoca
atgaaatgggggcataacgaattagcgcacgatctggctgagcacctacgccgaaatactgctcgcatctgctgggaagatatgcagcttggcccatcaggtacatgccgacctgacgtttatgcaatggcccatagctatagcaaattctgccccattgtttatgaggtgaaagtaagtatgagcgactttcgcgcagacgtgaccgccgggaaatacacaaaatatttcaaatatgctggcggtgttgtgttcgctgttcctgaaggtctgctgaaaaaatccgatatccctgatggctgcggcctgatggtgcgaaaagaatcaggctggcacaccctaaaaggcccgacaatgcgccagatcgacaacttgccgcgtgacgcctggattaaattgctgatggacggcatgaccagggaagttgagcgcacacagattaaaagccgctcatacggttcctggtttgttgaaagaaatctgtcgaaaaaacatggtgaagatgtttcccgcctagtcgcgcaagcatgtatggctaaagacaggctggaaagtgaaatcaaatttgcagaggagcgcgccaaaactgttcgccaggaaagtatagatgaacagaagcgccgcgaagataatcgccgccgggaagaggaacgactcaccgatgcgcagcgggatttagccgtgctgctgggcgttgatcctgattctccacggtatctactggctagagcccttgagagcgccgttacacgactgactgaaaacgaagaaatcagccgtatgcgccgtatttttggcagcatgcagcgcgaacttaatcgcggacttgagccgcttccaggtgagcgcgcagaaggagatgcagcatga

SEQ ID NO: 193313 - DNA, 768 bp, Klebsiella oxytoca
atgagaaaaggaaccattatctgcctgtgcgatatcactggcgtcatggctgagccatgggtcgaagcaggttatcgcgccgtcctggtggacccgcagcaccctgaaacttcgattgatggtccagttgagcgcatatcggcaaccatccttgaggcgatgccgcggctatctcagatcatccgctctgaaaacgtcgtcatcgtcatcggcttcccaccatgcacggacgtggctgtttccgggtcccgctggttcgagtccaagcgcgccaaagaccagcatttccagggcaaggccgctctggtcgctgagcaatgccggatggttggcttggcggctggctgcccgtgggcattcgaaaacccggtgagcgtgttcagtagcatcttcggctcggccgattacacgttccatccgtaccagttcactgggctgtgcgcggatgacaactacacgaagcagacatgtctctggacgggtaacagcttcaaagcgccggcagagaacatgcacccgcaggtgtcgcaggcaatcgagcgtgtgaaacagcgctttggccgaatggtgtcgaagaaaaaggcgttggaagtgtttcactatcagggggagaacctgatccgcgactggtatccggacaaccgcattcacgaatgcccacccagcgacgagcgcgccaacattcgcagcgcaacgcctcttggatttgcaagggcggttttcctttcgaatgcgccccatctcaacaagaaatgggaggcagcatga

SEQ ID NO: 193314 - DNA, 528 bp, Klebsiella oxytoca
atgaccgatttcggcggttcgaaaactccaaaaaatgaacgtgactactggcaaacgccgattgaaattttcaacgcgctcgaccgcgagtttggcttctggctggatgctgcagcctctgagagtaacgcgctatgcgctcactatctcactgagctggatgactcgctgaacagcgaatggacgtcatacggggcgatctggtgtaacccgccctattccgatattgggccgtgggtggaaaaagcagccgagcaatcccgggcgcagtctcaggccgtagtgatgctgttacctgctgacatttctaccggctggtttatttcagccatgcaatcagctgatgaactcagactcataaccggcggccgtgttcagtttgttccggcatccgttacaggaaagcgcaagagcaaccccaaaggctcgctcctgtttatctggcgcccgtacatcaccccgcgacacatcatcacgactgtatcgctggctgagttaaagcggatcgggaatctggaggcagcatga

SEQ ID NO: 193315 - DNA, 690 bp, Klebsiella oxytoca
atggatttctctgagcgtcttgctcgagcaatgtcattagctgggtatacgcaaggcaggcttgccaaagcggttggcatggcgcagtcgagcgtgaacaagctgcttaatggcgccaacggatctcgcaagacagtggaaatagcatcagtgttaggtgtgcgtcctgaatggctatccactggcgcaggtgaaatgcttgctgattccatacagattacgcaagtgcagacgccagtaacaccgcaaaatggcatttatcgtgtggatgtcctcgatgtaaaagccagtgcaggaccaggtgcgcttatcacgaacgatttcatagagacgattcgtgcgatcgaatacacctctgagcaggccagatctctatttggcaatcgaccagctcatcacataaaagtaatcactgttacaggtgatagcatggatacgacgatctcacccggtgatgaaattttcgtagacatcagcgttacccattttgatagtgatggcgtttacgtgtttgtttttggaaaaacccttcacgtcaagcgcttgcagatgcaaagggatcgactggccgtaatttcagataaccctatctatgaaaaatggtacgtagagccaggtgatgaagaccagttctacgttatggccagagtccttctcaggcaatccatcgaatataaacgattcgcataa

SEQ ID NO: 193316 - DNA, 285 bp, Klebsiella oxytoca
atgagccacgctatcgatgcacatctcactgacgaagtaatcaacgccgcattcgaaaacactaacttcgggcgcgacgactttcgaaccatcctggctgaaaccgttctgaaacgtgccgctggttatcactctggctggacggcgacgaccatttgcactcgcctcaaactgctgggtaaacaggagcggccaacaaagctcggtctgacgttcgcctttcatcactactaccgccagagcgtccgtgatgcgctgatgccaaaacaggagcgtgcagcatga

SEQ ID NO: 193317 - DNA, 474 bp, Klebsiella oxytoca
atgacaactgatatcaccgaactggcgcagagccatgagctacgcaataaggttaaccaccgtctgtatggtgctcttgaatttcaggggacatcaggcgagcacgccacagtcaccctaagcattgatgagtgtaaatctatcatcgcggctatggatgagcgtcttgcgctggtagaggcgctggagaaggcgcgtcaggtagacgaagagctttgcaagctcctgcctcccggcgctgagtacatggacccaccagacggcggtgacgtcacgccgcttgaaggagtgcgtcgaatggtggctgattaccgccagcgcatcgcagagctggagtcccgcaccgtcaccgtgaagctgccggactaccggaacacttacaaaggccccttcgctgatgaagttgagcatcaagtgcgcttggcgcttgagttgttctcgtctgccgctggcatcaagtgggaagctgagtga

SEQ ID NO: 193318 - DNA, 276 bp, Klebsiella oxytoca
atggaaactgtgaaattttctgtgcaactacttaaaagcgatgactgcgtaaccttgatggcacgcggcgaggtcagcaaggagaagcttatcgaagaggctattcgccagggtgagatagacgccgatgaccgcgaacgctttgaaaaggctgaattctgcgccaataagtggatgaaggccgttccgcgtgagggttattcaacctactactacgagtcgcgtgaaagcgttcgcggggcattcaaagcaacctgtttgcaatacttatggtga

SEQ ID NO: 193319 - DNA, 228 bp, Klebsiella oxytoca
gtgagtaaagacgaattgcttcagaggctacatgctctaactacagattttcatactctggcctgtgagctggacattggtgatgaacgcactgaaatgttcgaaatctacggcgtactgcacaacctcggtcgtcgtggctacgccagccaggtagggcagcgaatgaatccgctgctctcatcctgcgatgacgatgatgatgattgggacgatggtgacgactga

SEQ ID NO: 193320 - DNA, 384 bp, Klebsiella oxytoca
atgagcatagaaaccgaaattgaactgggaaaggttgtagctttcccagcgaagaataacgacctgcaggatgggctcgttattcagcgcgaaggtaagaaggtgatgtgtctgcactccaccgtttgggttaacgaaaaggaccggaccttacgctgcaggaagtgcgaaacattgatcgaaccttttgacttcttgatgacgctctgtgaccaggagtctcgctacatggagagcgtgaaatatctccgacgggaagaaaagcagcgccgccagaacatcgagaaactcattcagattgagaagaacgcaaagtcccgaattcgccgtgccggggataagtctccacttcctctctggcagaacgagagggttgacgaatga

SEQ ID NO: 193321 - DNA, 270 bp, Klebsiella oxytoca
atgacaaaaatgagcaccatttacagcagactttcatacggcaccgggaccgcactgacgggctgcggtgtctcagcaaaggcgtatgccggggcagttaaggcagaggtatggattttggccgacaaaatagcggggatgaccctgagtgactgggcaattattgtcggtatcgcctgcaccattaccacctgtggggtgaactggtactaccggcggaaagaacgtgaggatcggctcaatggctatgacaccaaaactgaggaatag

SEQ ID NO: 193322 - DNA, 456 bp, Klebsiella oxytoca
atgaaaattatcaagtattggaaagttcagcttctgcagttgtctcagccttccagcattatcagcgcccgcaatctggtcgaaaccctattgtttgaaggtttctcaaaggagaaacccttcatcaagctaggctcaggggtaaatattgagttatttacagcccccgactcgctggaaacgcgtatcttccgagaccacctcattgacggcgtgcgctgcatcccggtatgtgagggtgatgaaactgacgaatctcagggtgagcatgctaagtctccctcgccgggcaacgggcgctacaactatgaaaccttcaaaacagcatcaaagccgctgattcaatggctgaatgaaaacgccaaccctcacgcatcggtcattgttgactgcacaggttcagaactcctcatcggggagattgccttcaacacgaaagagttcctgaaagactga

SEQ ID NO: 193323 - DNA, 474 bp, Klebsiella oxytoca
atggcaaagctcaccgacaaacaagagctgtttgcccgtgagtacctgaaagatttaaatgccactcaggcagctatcagggcgggctacagtgaaaagaccgctaaagaaactggatatgagaacctcacaaaacctcacattcaggagttgatagcagaactgaacaaagagcgcatggatcgcgtgcaaatcgatgctgattacgtattgcgtcaggctgtaaagctacatgagcgctgcatgcaggaagttgagccaattaccgatcgtcgtggcgaagagataaccgatgagcaggggcgcacgatttacggtttcgatgctaaaggagcggcggccgcacttaagttggttggtgatcacatcactgtccaagcattcaagaccaacattaaatcggagcatgctggctcaattggacttaacctgaacaaatctctcagtgagctattcgacgatgacgacgcttaa

SEQ ID NO: 193324 - DNA, 1134 bp, Klebsiella oxytoca
gtgcagcgtagtagcattcgccacctgataactggcagcgagttcatgttctatggcatcaagaacaacccaaccaaaataaaatcgcttgaaggtatcgacatctgctggatggaagaggcggaggcagtatctaaggaatcatgggatatcctgatcccaaccattcgtaagccaggctctgaaatatgggtcagctataacccaaagaacattctcgacgatacgcaccagcgcttcgtcatctcgccacctgatgacatctgcctcctgactgtcaactatacagacaaccctcactttcctgacgttctgcgcctggagatggaagagtgcaagcgtaaggattacgacctctacctgcatatctgggaaggggaaccggttgctgatagcgacatggccattatcaaaccatcgtggattgctgccgctgtagatgcccacctgaaaatcgggtttgcagcatcgggtcgtaagcgcatcggatttgatgtggctgatgaaggtgaagatagcaacgccactaccctggcccatggctcagttgtcatgggctgccagcagtggaacaagggtgacgtaatcacctctgcagatcgcgttaaaaactatgcagaagaggttaaggccagcgagatagtttacgactccattggtgttggtgctggcgttaaagcacatctgaagcgcgtttgtcgcatacctgccaccggatttaacgcgggtgagtcggtgttcaagcctgacgcaaaatatgcagacggcaagaccaataaagacatgttctcaaacatcaaggctcaggcgtggtggggggttcgtgatcgcttctataacacctggcgcgttattaaacacctggaagtcaatcctaacgacaccgagtttgtgaagcaattcagcgatgaccagctcatcagcctttcatccgacattaagcagcttgagtacctcaaggctgagctatcccgcccgtgggtggattacgacaataacggccgcgtaaaggttgagagcaaaaaggacatgaagaagcgtggcataccgtcgcccaacatggccgactctctgattatggcttttgctccgattcacaaaccattccatatccctgacgagatacttcaatga

SEQ ID NO: 193325 - DNA, 1428 bp, Klebsiella oxytoca
atgacaagacgtaaagccgcacaggcacctcgccgggaagtggcaaaaattacccaggcacatctcgataatgcggcggtggcgcatgactctgctccaattgcagagttcaaaacatatgagccgctgcctggcgtcattccagaggataaaaaaacagcaacacttgccatggacgccacgccttacgaggtgattaacgccatgtatgccggaacagaatactctggcttccgtgggtatcctgttctggcagcaatgtcacagcaggttgaatactcgaacatgcacaacgtgttcgctgatgaaatgactcgtaactggattgaggttaagagccgaaaggaaggcgaccatgacccggctattgatgagatggagcttgctctagagaagtacgacattaagcgcctgatgcatgaagccgtgcgtcaggactcgatgtttggtgtagcgcatatctttatcgatgtcggcgctatgggcgatgagctcagtaagccgctcttccttgatacaaggaaaataacaaaaggctcactcaaggcgtttcgggttatagaccctaactgggtatatccggcgctgtacaacacgcgctggcctcttcgtgctgggttctacaagccgcaagcatggtttgttatgggcgacacggttgatgagtctcgcttcatggatatcgtcagtcgaccggtgcctgacatcctcaagccatcgtacaactttggcggcctttcactcacgcagttgatggaggattacgttaacgactggcgagacgccaagaaaaacgtgatcaagattctccgcactctgcgtatgcgcgcgctgaaaacggatatggatgcccgtctacaggagccaggtcagttcgataagcggatcaggctgtttacacagtatcaggataacttcggaatatgggcgctggacatgggagaggaattgctgcatatgcagacctctctcagcgaattgtcgagtctgctttctaactaccaggaccagctatgcatgcctgcacgaatcaccaacctgaagctgctgggtaatgctcccgccggccttaacgcttcaggtgattcagagctggcaacgtggcatgaaacggtgtccgggtatcaggatggtgaaatgcgccgcccactggagaatatcttcaagattattcaactgtctgagttcggtgccatcaatgatgacatttatttcgagttccgtccgctggatgaaattagcgagaaagagcgtgctgaaatcgccaagatccgcgttgataccgtcgcggtggcggctgacagccagcttgttagttccgaagaggctcgcgaggcgctgaagggtattgagaacgccggatttgaaacgctggatggtgactatgagccggaagaagacgaagagactgaaggcagtcagctataa

SEQ ID NO: 193326 - DNA, 810 bp, Klebsiella oxytoca
atgagccggaagaagacgaagagactgaaggcagtcagctataacgccgggaacatcaagtggtatcagcgggaattgctcgcagaaatacgcgagatgaatgacgacgttaagcagcaggttctcgatattatcctctctaacccgctggctgaggattctggggtggcaatggacgccagtccggtatcgatgattaagtggcttctcgactccctggctagaaaatgggttgaccgatttatcaataaatcgcttccggtatctgatgccctaataaaaaaaacaacgaatgccgttgaccgcggactccttgcctctgcgcgagttgaggggcttacgataaaaatgcagtggactccggcgatgactgaaaaggttgatgccatcattgctgaaaacgtgtcgctgattcgctccatcccggagaaatacttcactgaagttgaggggatggtgtaccgggcagtcgcgaaaggcggtgaccgaaaaggtcttgctgatgagattgaagctaattttggtaagcgtcatggcatcgcccggcgtagggctgaggggatagcaagggaccaggtaaggaagactacagcttgcctgtcaagggagcgacaaaaggcggttggcatcaagctgggcatatggattcatagcggcggcagtaacaggccgagaaagaaacatgtgcacgccaatggccaggagttcgatttggaggttggtcttccggtcggcgataaagggcagtacgtactccccggagaggagattgagtgcggatgtacctggaaaccagttctcccattctga

SEQ ID NO: 193327 - DNA, 1599 bp, Klebsiella oxytoca
atggaatatgtgaatcttgcttttgaccgcgcatccgatctggcgaatgacgaggatagatggattaccatcaatggggctcgcgtaaaaattgacgctgatggaaatgtcattgagggtgcgggtgggaatataccccaaaaaaacgactcaaaaaaaaattcagaagatactcctgattacgtaaaggaaatgaaattaggggagcgccaaagctcttcgtataggaactgggttaactcattctctgaatccactcctgagtcgtggaaaaaaagacagaacgcagaagtgatggccctgtttaaagaggctgaaagcaacaaggaagttagaggcctgatgaaaaaatttctttccggaaactcatcagcaataagagaggtgatgactaggtacagggatgaaggaagaaaggctgttgctaatgactctgttttcgcattcgacagggctagcgttcgcacctacgacgcagacgggatgatgcacgttgcgctgactccaatcagtaaagccaatgtttgtgtctactacggaaaagaaattcctgacgctgaaaagctagggctcgaccctaacaaagcatatcgcctgctgcgtgacccggaagagttgcgcaaggccgcgccgacatttaacaacaagccggtactcaataagcacctgccattcaccgtcatcaatccgcccaaagagtccatcgttggctcaactggaacagacgcaaaattcgacccgccatatctctacaactccatggggctgcatgacctcgattccatcatgggcgtagaaactgagcgacagaaagagatttcatcctcttaccgctaccggctcgacctgacgccaggtgtgtacgagggagaggcatacgatggagttatgcgcgacatcgtttgtaatcacgtggcaatcgtgccaagtggtcgggctggtcccgacgtgtttgtttatgactccaaaccaacaggaagcatcctaatgacactgaaagataagttgatggcagtcatcaagccgtacctggctaacgatgagaagcctgaagacgtagaaaagaaagtggataaagttatcaaagatgaagctactcaggctgagaaggataacgagtctgaggcagatcgactgaagcgcgaagaacgcgagctgaaagagcgcgaagatcgcgaaaacaaagaccgcaagcgtgaccgcgccgaggacgaagacgacaaagataaaaagtcgaaaacggctgacgatgaggatggcgataaaaaagagaaagaaaagatggctaacgacaacaagttggcgatggatgcagccattaaaggtgtcgaaaaccgctttgctgctttgcgccaggctgaacgtgatgtgcgcccggtggttggtgagcttgcatgtgacaccgcagaagaagtatatcgcaccgccctcaaacaaatgggctgcgatgaccatgcaacgctcccagaaggcgctctgcgttcagtgtttaacgcgctggcaaaggctcctgcaatggcgcaggactcaatgccacatcacgttagtggtgacaccaaatccgatgtgctgaaaatgattcgcgggggtaaagcataa

SEQ ID NO: 193328 - DNA, 498 bp, Klebsiella oxytoca
atggcatttcaagatcgcgtaggaatttatcgtggcgtgggacaggtaggtcacccggcgtcaacctcaccaatcattgctgccgctggcggaccaggcgcattcaaaactgactctgctggcgtaactatcggtagttttgtattccgatcctcagcagaccctaaagttgtcaccaacgtggctccaaatgccaactcaaaagctattggctttatccagaacctggctcaggcaatcatcggttacggtcagagtgcaagcttgcttattcgtggtggcgttgagatttcgccaaaagtaggaggcgacttctgggttaaatcctcgaccgttgcaactgctggccagaaggtttttgcaagcaccaccaacggctctattgctactggagctgctggcgcgactatctcaggttatgttgaaaccgactggtttgtttctcagggcgcagcagtaggcgatctggtaattatttcttcatggagcaaagcgtaa

SEQ ID NO: 193329 - DNA, 1020 bp, Klebsiella oxytoca
atgccacaaccaacatttaaagactttatccaggttgctaacgcgcagggcattaccttcccggcgtcggttaatcgcctggcgatggatgccgaccctcagccttccctgcctgcgaacggtggtatccctgctatcgtttccaccttcatcgatccgaccattgtggaaacgctgtttactccaaaccgcgcagtagccattctcgggcgtgaagaaaaacgcggttcatgggcgcaggacagcttcatgattcagcgcatcgaagaaactggtgacactgtggcgtatgacgactacagcaatcagggtgcggtgcaggtcactccttcctgggagcatcgtgacgtttatcgctatcagacaatggtgacgtatggcgaacttgaacaagagcgctacggccttgccatgctgccttatgcagccaaaaagcaacgcgccgctgtaaatgttctcgatcaggaccagaacaagttttacttttatggcatcgccggtctgcgtaactatggcatgctcaacgatccggctctacctgcgccaattacaccaatctcggtgagcggtaatgtgctgtggagctccaagcaagttgtagataagtacaacgacattcttgcattgtatgaagacctcgtggcgcgaaccaatggcatcgtcggtgacggcgttgatatgtcatcaaaccttgtgctggcaatgtccaacaagctcagcgtcaacctgaagtcagcaaacgaaatttttgcgacctctctggaagatatgctgaaaaaagcgtttccaaatatgcgcatcgagaccgctccgcagtacagcactgctgctggcgagttgatccagatgtttgttgagaccgcgcaggggcaagaggttggctttatggcctacagtgaaaaacttcgcgctcacccgctggtgactcgcgaatcctcatatagccagaaatactccggcaccacttacggcgcggtcatcacgcagccattcttattcgcgcaaatgctgggagcataa

SEQ ID NO: 193330 - DNA, 327 bp, Klebsiella oxytoca
atggcaaaggcatcaacttatatcatcggctgcaagctgccatctggtctggtgatcagtcatgagggccagaaagttaaactggccggcgctaatgactcaatgctgattaacggtttcggtatcacgcgcgaagtccctgctgatttgtgggagggttttgcaaagacatttgcagaacagcccctcatcagaaacggcattgtctttgctgtgactgacgagaactccgccaaagatgcttctcaggagcgagctgaacaaaaaacaggcatggaacaactcgatcccaaaaagcagcagacaaaacccgacaaagaggagtaa

SEQ ID NO: 193331 - DNA, 405 bp, Klebsiella oxytoca
atgcctatcgttgcgtttaattctgcaacgttccgggccatttatcctgaattttcaaacgtagccgattcacttcttcccttcctttttgaccagtccactgattatctggataacaccgaatactcacttgtgatagatgccactaagcgtgagcgattgctctatatgcttatggcgcatctcgcgtatgtgagatttggtgacaacaaaggtgacggcggatctggtctggtcggccggatttcctcggcctccgagggcagcgtttcggtttctgctgatgtcgggcctgtagagttccgctatgcatggtacacccagagcccttacggaatgaattactggcaggcgacaaaagtctaccgcatggcgaactactacccggggagcgtttatgactaa

SEQ ID NO: 193332 - DNA, 450 bp, Klebsiella oxytoca
atgactaatggtcttgagaactacctgaaagggctggaggagcggttaaacgcaactgaggtgcaggctggtttctttcctgatgcgacatacccggatggaactaaagtcgcagtggtagcagcatcagacgaatatggcgacccgggaaacaaccagcctcccaggcctttcttcagacaggctatcgctgagcataaagaggaatggtctgacgacatagccagagggatggcttctggcctggatgcccggacggtacttgatgctgttggggcaaaaatccagggggatatccaacagtctatagccagccttatggatccaccactttcaccggtaacaatagccaggcgcaggaaccgcaaagagcgccccaataaatcaaccaaaccactggtcgatacgcgcgtaatgataacgagtgtaaattatgaggtgaaagattga

SEQ ID NO: 193333 - DNA, 351 bp, Klebsiella oxytoca; identical to SEQ ID NO: 179543

SEQ ID NO: 193334 - DNA, 657 bp, Klebsiella oxytoca
atggatgatgcggctcccgtgacagcagaggcatttatacaatggatcatcgaaaataaattcatcaacgatcgaccttgtctagaaaatgttggagttgaacttgtttccgatgttatcccttacgaagaagcgaaaattcgaatacttaatgccagccatagctgcattgcctgggcagggacccttgcggggaaaaaatacattcatgaaagtattgctgaaaagaccaattttcagctggtgaataattttattacatatgatgttatcccaaaccttactcctcacccgcttgacttagaattttacagagatattgtggttgaacgctttatgaacccctatattttggacactaatcagcgtgtggcttctgacgggttttctaaactgactgaatttatcttacctactatacgggatagtctgaatcggggatatgttccgcgatacagtataaaaatagtttctctttactatcgtttttgtaaagactggtatgcaggtctgcttccttatgaatataaggattccgttctggataataatgatctaaaagaaatattcacggcaccagatcctgttatatttttgtatcaaacgaaaggctttttggcaaacttatcgagaactgcttgtttgtttcatctttga

SEQ ID NO: 193335 - DNA, 222 bp, Klebsiella oxytoca
atgttcttgcagctctggtacccctgtctaagcgagggtttggtatttgaactgttacggactgagaccgccgcagatattgtggcgtcaccagtgattgtaatcacactcgatataattaaacaccgtggcccgcattatttcacggctggcaaaaccctctccgcggatacattacaccttcagcgagtgaaaaaactctccgcacaggtgtcatcgtag

SEQ ID NO: 193336 - DNA, 249 bp, Klebsiella oxytoca
atgaagctggccgaacacatcggcgtggccgctgccgcctgtgaactcagtacttgcgaattcagctacagcaaacagcagcatcaggcaatctcatctgagcgcgagagcgaacaggctgcggcgtcagggtctgcgggcaaaagctttatgccggttcagccctgtcagctaccgggagcacgtcctaccagtgtcagagaacctgcttatgcaggatttttacaccaacgcccctaccagaagtag

SEQ ID NO: 193337 - DNA, 258 bp, Klebsiella oxytoca
atgtttagtgaagaagcacactatgaactattaaaaagatattacaatcctgcttattttgaaggtcgaaacggtactatctggggtgatgattattcattaagtttagcaaaaatgggtatgataatgcttgagaaatatggttatggtataatacttaaacatgaatctctcacaggtgaaaccatttactacgatcgtaatcttacaattttttctgaagagaaaatcatacaagctttgcgaaaggagggatga

SEQ ID NO: 193338 - DNA, 570 bp, Klebsiella oxytoca
atgggaaaaacatctcagaaagtaatgtatgacactcctttgataagagtatgggaaatctatgatcctgatgatgttaatatcatgaaaggaatgttatttgtggaaacattatataacaagagggactctatgggcccctatcgttatcatattcagttaaattatgagtttcactctatgaaaggttgtgtaatgagtggatacttcgaaggagggtatctggataagcatgtcgatggtcaccagataacactaaccggagggagcataattttgaatgctcccagagggttaggtatagggtcacttcttttttgtgaggtagccaaatgggcgaaaacatactcaggaatcgatattaagacaatatttctttctgcattcgatgcgaaagatgaaaataacaggaagcgtaggaatagactttatgagagatttggtatacatatggtatatgatgagggtgaaaagtcaggtttttcattgccaatgaaaaccgatgatctgattattaatgagaatttcctcatagatcaaggtggaaacatcagaatcttaagggtgtaa

SEQ ID NO: 193339 - DNA, 165 bp, Klebsiella oxytoca
atgttagcctataggaaaaaccttaaaataaaaaaattcatctgcaaggtcgatatcgtgaaaaagcaacaggcgcaagcaagcaccgactggtcagggctgggatggtgcattctgattatcgtggtgataacggcaacatcattattcaccctgtttggttag

SEQ ID NO: 193340 - DNA, 1209 bp, Klebsiella oxytoca
ttgcttaggcaatcaaatttatctaggcacttagactggagaattcctacaagcgtattttatagaaaaattgtgctattactatgtagaacatgcagctaccgatacgtgaacagtccccatacacgggatgatatttatgcgaacgggcaaacggcaccactgccaaaagccactttagggttaaaacctggtcaactgttgaggtgtgtctccggcgagctggggttacgttcatgggctgaaagtcagggccatgagttgattgtcaccagcgacaatgatggcccagactcagagtttgataaatatctccctgaagctgaagtcgtgatttcacagccgttctggccggcctatttaaccaaagagcggatagctaaagcgtataatctgaaactggcccttaccgccggtataggttctgaccatgttgatttggacgccgctgcgaaggccggcattactgttgcggaagtcactgggtcaaacagtatcagcatggcggaacatgtggtaatgatggagctttctctggtgagaaattacctgccagcgcatcaaatttcggttgatggcggatggaacatagcggattgtgtgacacgaagttatgacgttgaaggcatgcattttgggactattggtgccggccgtattggacttgctgtattacgcagattaaaagcgtttgatatgccactgcattactcccagcgtcaccgccttgcgtcagctatcgaagaggagttagggttaacataccatcctgatgccggctccctggcccgttctgtggacattgttaatctgcaggtgccactctatctatcgacggagcatttttttaatcaaaaaatgatatctgagacgaaaaggggttcgtatttgatcaataccgccagagcacaacttgttgacagggatgcggttgttaacgcactgaagtctgggcacctggcaggatacgctggtgatgtctggtatccacagccagcccctgctactcatccctggcgaactatgccctggaatggcatgacgccacatatgtcagggtcgtcactttctgcacaggctcgctatgccgcggggacattggaaatccttgagtctttcctggggaacttgcctatcagagaagagtatctgagtgtggatcgcgggcagctgggggagaccggtgcgaagtcttatcaactgaactaa

SEQ ID NO: 193341 - DNA, 1065 bp, Klebsiella oxytoca
gtgggttgtccattttcacagtccgtctctcaacctgtggatgagagacttacgcgtgcagccatatttctggttgtgactattaattccggtaaagcggctgaagttaccgtgcgtactcactgcggcatactatcctctcttatcagaggcgtcgggtttcgtatatcagatggtggactgtcgtgtgtcatgggggtgagtgaaggagggtgggagcggctttttggggatgcaaaacctgaatatttgcacgtattccgtgaaatcaatggcgtacatcatgccccatctacgcctggagatttattatatcatattcgcgccgcccggatggacctctgttttgagctggcaagtcggatattgtcggatctcggcaactcggttagtgtcgttgactccgttcagggttttcggtatttcgacgatcgcgacctgttagggtttgttgatggtactgaaaaccctgtcgctcaggctgctttggatgcaacactaattggtgatgaggacacggcgtttgctggcgggagctatgtcatcgtccagaaatacctgcatgatcttgataaatggaatgcgatccctgttgagcagcaggaaaaaattataggccgcgaaaaactatcagacattgaactcagggatgctgataaacccagttatgctcataatgtactcactagtattgaagaggatggcgaggacgtcgacatactgcgtgacaatatgccatttggtgatcccggtaaaagtgagtttgggacctattttatcggttactcccgaaaacctgaacgtattgaaaggatgcttgagaatatgtttattggtaatccgccgggtaattacgatcggatcctggatgtcagtcgtgcgataacgggaacattatttttcgttccgacgaccagtttcctggatagtgttgaaccccagtctgctcccggtccacagggaggtgaggcgaggaatacaccaagttcaacggatattaaaggagacttgatgcccggctcccttactattggttcgttaaaaaaagaggtccaggatgaataa

SEQ ID NO: 193342 - DNA, 807 bp, Klebsiella oxytoca
atgaataatctacatcgcgaacttgcgcctgtttccgatgcggcttgggaacagattgaagaggaagcaacccgtacacttaaacgtttccttgctgcacgacgggtggtggatgccactgcccctcagggagcggcattgtcggccattgggacaggtcatgtggcacatctggatgggcccggtgatggggtgagtgcagtaaaacgtcaggcactgccggtggttgaattcagggtcccgtttaaattaactcgtcaggcaattgatgatgttgagcggggctctcaggattcggactggtctcctcttaaagaagcagcacgcaaaatctcggcagcagaagaccgtacaatttttgatggctatacggcggcaggtatcgctggaattcgaccgcagtccagcaatacacctttaaccttatctgctgatgcttcagattaccccaccgtgattgctcaggcactggatcagttacgcgtggcaggagtgaacggtccctaccatctggtgttaggtgaaaaggcttatacgtcaatttctggcagcaatgaggacggttatccggtattccagcatatccgccggcttatcgatggggaaattgtctggacgccggctatcgaaggtggattactgttaaccactcgtggtggtgattttgtcatggatatcggccaggacatgtccatcggttacctgagccatactgccatggatgttgagttgtatctgcaggaaagtttcacgttcagggtactcacctcagaagccgctgtaacattacttccttctgaagagtga

SEQ ID NO: 193343 - DNA, 852 bp, Klebsiella oxytoca
atgacgaaagaaatgtctgcattagcgccggttggtaatctggattcatatattcgcgcggcctacgcctgccccatgttatcacaggaagaagaacaacaactcgcacgcaacctgcaaacacatgatgaccttgatgcagctaaacagctgatcctctcgcatctgcgttttgttatccacattgcccgacagtattccggctatggtttaccgcaggctgatttgattcaggaaggaaacattggtctgatgaaggctgtacggcgtttcaatcctgacgtcggagtcaggttagtttcatttgcggtccactgggtcaaatctgaaatccatgagtacgtcttacgtaactggcggatagtgaaggtggccaccacgaaagcgcaaagaaaattattttttaatctgcgtaaaaccaagcaacgtctcggctggtttaaccaggatgaagttgctatggtcgcctgggaactaggcgtatccgtaaaagacgtccaggaaatggagtcccggatgtcggcgcaggatatggcttatgatatgtatccggatgatgaaacagatacccaccatccagtttccccttctctctatttgcaggataaatcctcagactttgccggcatgatcgaggaagataactgggatgcgcaggcgacggaccatctggctgcagcgatggatactctggatcccagaagtcaggacattatccgggcgcgctggctggatgacgataataaagcgacactgcatgaactggcggaacgttacggtatatccgcagagcgcgtgagacaacttgaaaataacgcgataaaaaaacttcgcagcgcgattgatctataa

SEQ ID NO: 193344 - DNA, 810 bp, Klebsiella oxytoca
atgatacatgcgattaaagaccatgatttatttgcgtatataaaaaacactttattacacagtgacataccggttattcgtgtgataattatttttatcctgctgcattgtgtagcgcattatctcgtgctgcctctactggataggaaagcagaacagcttcagtcatcccggctaaaaatccttactcatcatcatctttttcgttacatagtcctgaccctgcagggagcggtgttggcagcacagctatcactgattgtatctcctgaagataaactgctggatatcattattgccggggcgcgactctggatgctcacctttgctttgcttgctttctattcgtttatcgatgttggctgcgagttattcaaaaccagtgaccagttaaaaggtttaccctatcgtggcatcgaacaaagcctgaagctgacaggggcggtgatttatatcatcttattgatatctctgttatttgataaatcaccacttatcctgctcagtggactgagtgcagttgccgcggtgctgttactcgtgttcaaagatccccttctgggcctggttgccgggatacagctttccgctaatgatatgttgcgtcccggggactggattgaacttgatcagttgggtgcgaacggagcagtccaggatatcgggctgacgaccgttaaagtccttaattttgataatacgataacaacaatccctacttacaccctggtgtcaggtgcatttaaaaactggcgttacatgatcgagcatgatgcccgacggatccagcgcagcggctttgttgaataa

SEQ ID NO: 193345 - DNA, 429 bp, Klebsiella oxytoca
atgctgggtgcgtcctggtattcagataaatttcttaaccgaaaaatcattgttctgctgtttttaggtcttggggcagtctgtttcatcggctctttctctattggttcctccaatttctggctatcctatatattactggtgatagccggggcagccatgtacaccccatacggaccgttctttgcagcagtccctgaactggttcaccgtaacgtaatggcgggagctatggcattcatcgtcagtttcggagcactgggttcatttgtgggctcctggattgtcgggtatctgaatggccttactggtgggcctggagcctcatatatgtttatggctgtctctctggtgctggcggttttcctgacgctggtgacctcattcactagtcaacagatcaccacagtcaaggcaagggcttattaa

SEQ ID NO: 193346 - DNA, 303 bp, Klebsiella oxytoca
gtgagtattaaatccatacgaaaacaaaacgtggtcaatgaggtatttgagcagaaccgtgaaaaattgcttgacggcagctgggttccgggtagccgtctgccatcagaagcagagctttccggttcattaaacgtcagccgcgtcagtgttcgtagtgccgtgcaacgactgcgtgacttagggattgttgttactcgccaggggagtggaacttatattaatgaagactttacacctcaaacactgaacaatgagttgcgtcctatcatgcatctcagcaaggaagaatttcacgattag

SEQ ID NO: 193347 - DNA, 426 bp, Klebsiella oxytoca
atgagcaacatcaccatttatcacaatccggcctgcggcacgtcgcgtaatacgctggagatgatccgcaacagtggtaatgaaccgaccgttattcattaccttgaaaatccaccgtcacgcgatgagctggtcaaactcattgcagatatgggcatttcagtccgggctttgctgcgcaaaaacgtcgagccttatgaagagctggggcttgcggaagataagtttactgacgatcagttaatcgattttatgcttcagcatccgatcctgattaaccgtccgattgtggtgacaccgttgggaacgcgtctgtgccgcccttccgaagtggtactggatattcttccggatgcgcaaaaaggcgcatttgctaaggaagacggcgagaaagtagtagatgaggcagggaaacggctgaaataa

SEQ ID NO: 193348 - DNA, 240 bp, Klebsiella oxytoca
atggggcgctggcttgctggcagactcatgaaagagctggggctggtcagttgccagcagccgactcaccggtataagcgtggcggtcatgagcacgttgctatcccgaatcatcttgagcgacagttcgccgtaacggaaccaaatcaggtgtggtgcggtgatgtgacctatagtgtgcccggagttcagggcgggcatggatgcttaaatgaaccgcgagtctgtctggaatattga

SEQ ID NO: 193349 - DNA, 426 bp, Klebsiella oxytoca; identical to SEQ ID NO: 59974

SEQ ID NO: 193350 - DNA, 1572 bp, Klebsiella oxytoca
atgcccgtcgattttctgaccactgagcaggaactgaattatggtcgctatgttgcagaacccaatgacgtgcagctggcgcgctattttcatcttgatgagcgggatcttgccttcattaaccagcggcggggaaggcataaccggctgggaattgcgcttcagctcaccaccgcccgttttctgggcacctttctgacagacttaacccgggttctgccaggtgttcagcaatttgtcgcggtgcagcttaatattcgccgtccagaagtccttacccgctacgcagaacgggttaccaccctcagagagcatactgcgctgattaaggaatattacggttaccatgaatttggcgatttcccctggtctttccgcctgaagcgcctgctgtacacccgcgcatggctcagtaatgagcgacccggccttatgtttgattttgccaccgcgtggctgcttcagaataaggtcctgctgcccggagcaaccacacttgtacgtctcgtcagtgaaatacgcgaacgggcaaatcagcggctgtggaagaaactggccgcgttgccggacagctggcagaccgcccgcgtgacggagcttctggacattcctgaggggcagcgtacttcaccgctggagcaactgaaaaagggaccggtcaccgtcagcggcccggcatttaccgaagcgctggagcggtatatccggctgcgaaacctggaattttcccgactgaattttaccggtctgcctgctatacaactgcgtaatttggcccgttacgcaggcatggcgtcggtaaaatatatcgcgcgaatgccacagcagagaaaactggccgtactcacagcattcgttaaagcgcaggagactgcggcgctggatgaggccgttgatgtgctcgatatgctgatactggatatcactcgtgcggcgaagaaaacggggcagaaaaaacggctcaggacgcttaaagatcttgatcgtgctgcgctaatattggcgcgggcatgttcattgttgctggatgaacaggctgacgatgctgaactgagggagaccatattcaacagcataccgaaaagcaggctggcagaatccgtctgcaaggtaaatgagctggcccggcctcagaacaacaatttccatgacgaaatggtggagcagtacgggcgggtaaagcgctttcttccggcggtattgcgcgacctgcatttccaggcagcgccagccggagaacatacgttgtccgccattcattatctgaccgaactgaactgctcgaaaaagcgcatcctggacaatgcgcctgaacatattattaccggcccctggaaacgcctggtatacgatgcggagggccggatacagcgtgccggttactcgctttgtctgctggagcgccttcaggatgcactacgtcgaagggacatctggctcgaaaacagcgatcgctggggaaatccccgcgagaagctgttgcagggggaagaatggcaggctcagcgggtccccgtttgccgggcgctgggacatcccactgatggacataaaggggtcggttccggctga

SEQ ID NO: 193351 - DNA, 1005 bp, Klebsiella oxytoca; identical to SEQ ID NO: 53712

SEQ ID NO: 193352 - DNA, 426 bp, Klebsiella oxytoca; identical to SEQ ID NO: 188205

SEQ ID NO: 193353 - DNA, 1446 bp, Klebsiella oxytoca
atgggactcttatcaaacactaaatgggttgccctttcacagggaattaaagtgggtgttcagttattgaatattgttgttttagctcgactaataccacctgccgaatatggattaatggctatggcattagttgtaactaattttgctggtttagtaagagatttaggcacggcagcagcaataatacagaagaaaaatcttcaagaacgaactgtcaatgctatattttggcttaatgtttgcatgggtatcacaatcgctataataatagtcttatcatcaccggtgatatcaatggtgtttcatgagcagagattagttatggtcttatgcttattatccataagtttccctctcgctagtaccgcatccgcacatcttgccttattggaaaaaaaatctcgattcaaggaaatcgcttttattgaaatatcatcatctgtagttgcagtctcaactgctatcatacttgcctatgtggggtttggcgtctatagtctagtcttccagagcatattgctctcattgatgtcaactattcaattttggtttaaatccgagtggagaccaaatacaaaaactattattgatatccctgaaataaaaaaactgattggctttagtggtaatttaacaatttttaacttcatcaactatttctcaagaaatgccgatagcattattattggtcactttttatcttctgccattcttggggcctactctttagcatatagaattatgcttttcccagtgcaaaatatgacctttgttgcctcaagagcactctatcctgtgtttagtgagtatcaagatgataacgaaaaattaaaaagaacttactatagcaccttgtattacatactttttcttgtctttccattaatgactggccttgctattttgagtaagccattcattaatttagtgtttggagataaatggattttaacggcctcgattttaacttggctggctccgacaggaattattcaggctgtattgagtacgtcaggaactattttcatggctaagggtaaaacatataccttaatgaagttgggcattttgggaatggttcttcaggtttcttcatttattttaggtgtacaatttgatatagtaacatttgcaaaattttactttattgctaatgttttaaactttattcctgttatgtggtgtgtgctaaatattttagatggttctcttggtgagttttttttgaaaatttataaattaatattagcaacagtgttgatgatagtttttattaacatgttaacctcgtatgttcctttttggcagtatatagatggtttttataaattagtttcacttagtatcttatctttcttattttacgtgatgtgtatgatggttgctgataaaaaattattttctgcattaaataagtacataaatataaaaaagttaaaataa

SEQ ID NO: 193354 - DNA, 1041 bp, Klebsiella oxytoca
ttgaagaaaattgcgtttgtaatcaacgatgcatattcatatgcaggaacggaaaatatatgtaattttatgacggaatgttatggtgagtcatatgacatgactatattttctgtttctggagaaggagaaactttttatccatataaaagcataaaaaaagtaattagttatcagggttgcaaaaattcgataaaaaaaattgttcaagatataaatgaaaacaacttcgattatgtttttgttataagcatgggtaagttgagtgttatgtactctttttggagtctttttgctaacaataaacataaagactgtaagacttttgcttgtgagcatgttgctatccattcatttaatttcattgtgcgtttcttgaaatttatttttttaagattttatgacaaagtaatagttttaactgataaagaccaacgaactctaaaaaaatggggtattaaatctttgacaatagttaatcctatttctttcaagaattttaatagacagaaaaggtcgtatcatgctttagcagtaggccgactggagtatcaaaaaggatttgatttattacttgatatctggcgatccttttctaaaaataataagcattggaagcttttcatcgctggtgatggcgtactgcggcaacaacttagtgaaatgattaaaaattatgatattggagatactgtcacgttagttggtaaggttaaagatattgataagtattatgcccagagtgatatgttacttatgacatcacgttatgaagggttgccattagcattgctagaggcaaaatcttggtcattgcctgttatcgcttttgattgtccaacgggacctcgtgagattattgagaatgaaagagatggttttttaattccagtaaataataaagaactatttattgaaaaaatgaatcttttatctattgatgatgattgttattataaactaagtgctagtgcaaaagtaacgtctgctagatttgatagccaagaaataaagaataaatggatgtcattaatatcgtag

SEQ ID NO: 193355 - DNA, 372 bp, Klebsiella oxytoca
atgggcgtcaaagctgatagtttcagcgatgcacgtcacactcaggtcagtagtgaaggtgatggtaatattctgacccgcttaggcctccgttcttatatcaatgggtacagtgatattgataaaggtaaacagcgcgtgtttgaacctttcgttgaagctaactggatccataacagtaagagctttggcggcaacatgggcggcaagctggttgagcaagatggcaccagaaatatcggcgagctgaaagtcggtgttgtggcccagtgggatcctaagttaaatctctggatgaacgttggccagcaggtcgggggtaaaggctacagtgatacctctggcgtagtcggtgttaaatataacttctaa

SEQ ID NO: 193356 - DNA, 1128 bp, Klebsiella oxytoca
atgacgaaattaggcaagctggacacgatctatcaggaattggcgcagcgtatccgcagcggcttttacgtgcaggggcaacggttgcccacggaaaatagcttgtgtagtgaattttctgcctcgcgcccaactatttcgcgggcactggcaaaactgcgctcagaggggataatcagcagcactcagggatctggacattatttgatagcgcaggagaatgaagcggcgcgggcttcgctccagcatgaggtacagacatttggcattctttcgccccgcatggaagagaacgaaagtggctttctcttcgagcaaattttcaaatccattgcctccctatcgcagcagtttaatttcgatttgatctggaatggcgtgatgacgctgggcgcaggtgccacccgtcaggcggtcttgaacaaaattgatcatgttattgagcgctacctacggagtaacgttaagggcgtgttttttatcccgatagagttccatccctatgccactgagattaatcagctaattttaaataagctagaccgagacggtctgggtgtagtgcttctggatagcgacgtcgtatcctggccggagcgcagccgctgggatcttatcggtatcgataacgttgcggcggggcaggaggtcaccacctatcttctgaataagcagccgcggcgcatagattttctctgtgaacgcttttctgcgaatactgtcaacatgcgcaaaatgggttatcgattggcgctgctggaggcggggattgtgccgcaggtcagttgggagcatgaagggaatgtgggcgatagtgactttaatgaacatcttcttgagagcggagcacaggatattgtctgtgcaaatgatttcaccgctatgaaattgttgtcggcttgcggacagaatggcaggaaaatcaatgtggtggggtttgatgacaacgaatattccgcgctgctgggcattccattaaccacctataaacaaccgttcaacgacattgcacgacatgcagttttcactatgctggataggttgcagtatcccgatagcgcagggcgtcatttacagataaatggtgagctgataatcagagcatcgtgccgctggcgggatgaatag

SEQ ID NO: 193357 - DNA, 573 bp, Klebsiella oxytoca
atgtctcaatatcacgatctggtcgaaaaggtcattgaagaaaaccggactactttgctgaaagtagatgaacagcaaattgaacagctaatcgaagagattcgtcaggccaaaaccatacagctctatgccatgggcaggatgcaattatccgtccgtggctttgctatgcggctgaaacatatgggatttgatagctatgtagtatacgacaccaccacaccttatctcggtaaaggtgatctattgatcgtgcattgtgcggtcaccaacgtcgaactaaacatcattaagctggctaaagaagccggagcccgcatcgtattactcaccgcgcatccggaaaacgaacatgggcaatatgccgacttagctgtacgtgtaccagggcaaatctttggcggcgaaggggaagtgtcttccattcagccgatgtccaccctactggaacaatcactatttttattcaccgacatcgtcaccatgatgctgattgaacgctgcaatatctctatgacggagatgaaagccagccatacaaaccttgaaggtttaccccataaatttgcctga

SEQ ID NO: 193358 - DNA, 474 bp, Klebsiella oxytoca
atgaaagacggcgacatcatccaaattgcccatctggtcgaagacttagatgccacaatgaaacactacacagaagtattcgatatcggcccgtgggatgtttatacctacggcccgcataacgttatgaactcactgtatcgcggcaaaccggccgaacacatttatcaaattgccgtttgctggataaacggcgtgcagatggaattaatgcaaccggtctccggctacagcatttatgacgaatacatcgagaagcacggttacggtttacaccatatgaaactctatttcgccgactgtgagacagcgctagcgcgctataaagctcgcggctacgacgtggtacagagcggtaatatcggcgacgatgttttctactacctcgataccgaagaacaattccagggtgcagttattgagatcggcaatgccggtgcaattcccgaacctgagcggcgctatcctgcctga

SEQ ID NO: 193359 - DNA, 990 bp, Klebsiella oxytoca
atgaaaataaataataaactgaccctagctgtgctcttgagtttttcagcgctttgcaccacggtgcctgcgtacgccgccgacgaaacctattcgatggtcggtatccctaaacttcgctccgcctggtttaatgattatgaaaccggcttgaaaaaagcggaaaaagattttggcatcaagacctactttcaagctcccgcctctgcggatgaacagcaacaggtgagcgtgatacgcgacagcatctcgcagggcaataatgcgctgctggtagtgccgaataacgccagctctgttgaaccggtatttaaacaagcccgcgcgcaaaatatcgtggtcatcacccatgagtcggtcaatcaaaaagaggccgattatgatgtcgaaatgatcgaaaaccaaaaatttggcagctatatgatggatcagtttgctaaacatgcgggtgagaaaggcgaattcgctatttacgtcggctcgttgacagtacccgcacataacatctgggctgatgccgccatcaagcggatgaaagaaaaatatccacagatgaaactggtggctgagcgcttcccggtcagcgaagatcgtaatgcttcacgccaaaaaacactcgagttgatttccacttatcctgatctgaaaggcgtgctgtccttcggcagccaaggtgcacccggagcagggcaagcgctgcgagagaaaggtctggtcggcaaactgaccgtcattggtaccacctcaccaaaagagagcgcccgcttcctcgaggacggtgctattacagagtcgattctgtggagcccaggtgaagcctcctatgccatggcctacatcgccaaaatggtgctggatggcaagcgtgaccagataaaacaagggctagaagttcccggactgggcaaacctgaaatcaacggtatgaatatcatttttgataaaccgctgaccgtcaccaaagaaaactacaaaaaatacgacttctag

SEQ ID NO: 193360 - DNA, 1482 bp, Klebsiella oxytoca
atgcaatttttgtccattgaacacgtcacaaaaacctttgatggtgtgattgcgttaaatgatgtcagctttgatatcaaccagggggaagttcatgggctggttggcgaaaatggctgtggtaaatcgacgttgatgaaaattattgccggggtgctggagtatgactccggcattctgaccatcaacggtaaacagattgagaaatacaacgccatagctgccgcgcaacagggtatcggtatcatttatcaggatttgtcgctgtttcctaacctgacggtgctggaaaatatttatatcagccagatgctgaacgataaaaaggcttttgtgttctccggccggtttaaaaataaagcccagcaaatcgtccaacagctaggtattacccttgatttagaggccacagtggaagaactcccgattgccaaacagcaattggtggcaatcgctcgcgcgctgattaatgactctaaattgatcatccttgatgaacccactactgcgctgacccgtaccgaaataaacaatctgtttgcgatcctgtaccgcttacgcgagcaaggtatctcattcattttcatcagtcataagctcaatgaactactggagatttgcgatcgcatcacagtgatgcgtgatggcaaacttatcgacaccgtcccggtcggtaatctgaccagcggccagattgagaacatgatgctgggctatgaattggcgttcactgcacatgaatcacacgccagtgataccgtcctgttgagtgttcgcaacctcgctaaacacaacagtttccaggatatcagcttcgatttacaccagggcgaagtgctgggaattgctgggttactcggcgcggggcgtaccgagctggcaatggcattatttggtattgaaccggctcagtccggcgatattcatctgaacggccagcctatcactatcaaaagcattcaggatgcggttaaaaacggcatcgcctatgttcccgaagatcgcctgctacaagggctggtaatggaccaaagtattgccgccaacgccgctatttgtacgttagatcattatcttaatccgataaaactgctggacagcggcaagctgcgcgatgcggtggcgggctatctgaaagggatgcaggtgaaatttgataaccaatccaaacctattcgtatgctctctggcggcaaccagcaaaaagtcgtgttggcaaaatggctagcaatgaaacccaaagtattcatcctcgacagcccaacggtcggtatcgatgtcggtgcaaaaagctatatctatcagaccgttagggataaagctagcgaagggatgggcatcatttttatctctgacgaactgcccgaactactggcgaactgtgaccgcatcatcatgatgcgccgtggtcgattcggtaaaagttggctcactgacgaggtagataacgatgcactactgtgtgaaatggaaagccattaa

SEQ ID NO: 193361 - DNA, 1005 bp, Klebsiella oxytoca
atgggcgtattcaatctcttcaaaaaacgggaaacactgctgctggtattgatcgtgatcctgtcgatcgtgattaccagcatcaatccctcatttatgactttcgataatattaccggcctactgaaaacctggacggtattaggtatcttcgcactcggcgtgatgctggtgctgctctctggtggttttgatgtctccttcaccgccatcgctcaggtggtgcaatacgtcgttgtattctggttcatacaggctggactggacaatatctggctggcgatcgcctgtagtttgatcctcggagccttgatggggctgctgaacggcgtactcatctattacttcaagataactgcgatcattgtcactattgccaccaacagtctgttctatggcaccttatatgtagtgacacagggcaatttaatctacgacattcctccctctctgctgcaactggcggaaattaaaatcttcccgatgcaggccgcgaatggggcttggtatgggctcagtctggtgacctgcctgtggttcatgctggcgattttcctgcactttttcctcaaaaacaccgtgctggggcgcagtatcttcgcggtgggtggcaatgcattatccgccgagcgcgttggctttaacctacgccgcaccacgctatttatctataccttcgtcggtgcggtatccggcttcgccagtctgattcaggtatccatcgtgcagacggttatccctaactcgatcgtcggctccgagctacaagtcattgccgccgtggtactgggaggagcctccgtcaccggtgggcgcggcagcgtactgggcacattgctgggcgtgctgttgttcgccatcctgagtaacagcctgacgctactgaaagtctcaccgtattactacaacatgttcaccggcctggtgattctggtcagtatcacactgaatgccctgcaaatacgccgacaaaagcgggcccaggtcagagtggtagtggaataa

SEQ ID NO: 193362 - DNA, 1023 bp, Klebsiella oxytoca
atgaaaacccataccccggcaaggttgcgtctttctgcaatcttttcggaaaatctgtcgctctatttagtccttatcggggcgtttttactgatgttcgtgctcaatggcgaacgttttatccgcccgcaaaacctgctatcgatggcctatcagctaccgattattggtcttttagccatcgggatgatgatttcaatgctttccggtgggattaatttatcaattattgccaccgccaacctaaacggcattgtgattgccctgtgtctacagcattttgccaacggtcagatgagcaccgccagcactgaaattatcctgctggctattgcgctggggctgttgagttgcttgctggtgggggtgatcaatggattgctgatttcactcctcaagatcccggatattctggtgactctgggcacgatgacattgatctccggtattaacgtggtgctaaccaagggctacaccctatccggcttccccgacatcctgctcaatatagggaatggcgctagcttcggcctgcctaatgcgctgattctctttttactggctagtgtggtggcggctatcattctgaacaaaacgcgttttggtttcagcttgtacatgatggggtcaaatcccacggcaacccagtactccggcatcagtctggtgaaaaccagcgtgatgcaatatgccttctcgtcctgttttgccgcactgacatcactggtaatgataggtcagctcaactcggtgaaagccagctatgccgactcttatttactggtggcggtgctggcggcatttctgggcaaagtcagcccatttggtggatttggccgcatctccggcgtggtgctggcggtgatcattttacaaatcatctccagtgggctcaacctgatgcgccttgacccctttatgataaccgccacttggggcgcgcttattatctttatcgtggtattccgtagcctgttttcgcagttaaaacagagaataaaaaataaggaaaaagcatcatga

SEQ ID NO: 193363 - DNA, 912 bp, Klebsiella oxytoca
atgatgattggcatcgatctggggggcacaaaaaccgaggttattgcactggatgaccagggcgtagaacatttccgtcatcgagtacccaccccgaaaaacgattacgtcgctaccatacacaccatcgctgaactggtgctgctggcagaaaacagtgtgggcaggcaaggaacagtgggtgtgggtattccgggtaccatctcccgccataccggcaaggtgaaaaatgccaattcggtgtggttgaatggccagccattacacagtgatctttccgcgcgactaaaacggcaagtgatcgttgccaacgatgccaactgccttgccatatccgaagccgctgacggtgcgggagccggatataaagtggtatttgccgtcattatcggcactggctgtggcggcggcgtggcggtaaaacagggtatttatgtgggcgataatggcgtggcgggcgagtggggccataatcccctgccctggcccgatgaagaagaacagcattatttacgcgaggttccctgttattgcggcaaagcgggctgtaatgaaatctttatttctggcaccggctttgagagaacttatcaacgcctcagcggtaaccacctgaaaggcattgatattatggcgcggctgacacagggtgaaacatacgcggagcaggcgatacagtattacgagcggcggttagctaaagcattagccacactggtaaatatcctcgatcccggcgtgattgttctgggcggcggcatgagcaatgtcgatcgcctgtataccaccttgccacaattactaccgcaatatgtctttggtggcgagtgtgatacccctattcgcaaagctgttcatggcgactccagcggcgtgcgcggtgcagcttggctaccacgcttatcgctgtaa

SEQ ID NO: 193364 - DNA, 846 bp, Klebsiella oxytoca
atgacgattaagttttttccgtcccggttgccgggtgaccccctggagacgcacgaacatggcgcgatgaccctgcatgagtggatggtcaggaatgtcccgagctactcgcaggacagaaagcatcctgttgctgtcgaactggacggccgggctgttccacctgcggaatggccactatgtttgctgcggccagacagcgatgtgcggatttacccgatcccgtatggaaccggcctggaaatcgccgtgtgggtatcggttgccgtatctattgcctctacggcctatgcgctgtttttcgccccgaaaccagagctgggcgggttttcgtcaggcaattcagcatcactggacctgaacccggcaaaagcgaatacagctaagcttggcgatcctgttcgtgaggtattcggaagaaacagaatttatccggattacctggtgcagccggtcactcgctttgaccccaatgatcccacccggatgacggtcgaaatgtttgtgtgcctcgggtatggacgtttctcttataccggcggtgattttcgggtgggtgaaactcctgctctgccgttaggcgatggcttttcttataccagctatggtccgggcgataacgtggagggggaccgtcgcagcgaggtctggttcaacagtacagaagttggcgggacatcaagcgggtcaggtctggatatggctcagactgcccctgaagccagtgatattgttgctgatgccatgaccgtcagcggcgcctcagtctcgttttcaggtctcgatgtcgacgatgacaacgatgatgatgaagatgagaacaagctgcctcctggctggatttag

SEQ ID NO: 193365 - DNA, 339 bp, Klebsiella oxytoca
atgtctaacactaacgccaattttgagatgaacgggatcctgttagggcaagaagtccgtaaacgtcaaactcctcaggagaagattgccattatccagcagacgatggagccaggcatgaatgtctcccacgtcgcccgcctgcacggtattcagcccggcctgctgttcaagtggaagaagcagtaccaggaaggcagcctcaccgccgttgctgccggagaagaagtcgtgcctgcctctgaactcacagctgcgctgaagcaggttcgggaacttcagcgcctgctgggcaagaagacgatggaagttgagatcctcaaagaagcggtggagtaa

SEQ ID NO: 193366 - DNA, 186 bp, Klebsiella oxytoca
atgatcctgatgatactcgcgccacttgttggtgtgctgggggctattctgctctcattcggtgcctgggttatttacccccctgctggctacattactggcggtattttgtgcctgctctggtcatggcttgtatcccgctccctttccagtaactggaaaattgaatccggggagggcggctaa

SEQ ID NO: 193367 - DNA, 1245 bp, Klebsiella oxytoca
atgtgcaagcggacaccgttgttaactgaagcattcgggatagaggtgaacgccaagaacctcagccgccctgaagacggggcaagatttgagccgttgattggaaatcctggcgacgggcagtcaccgcattgtgccattgttgatgaatatcacgagcatgaaagtgatgcactgtacacgactatgatcactggcatgggggcccgcagacagccgattatgtgggcgataacaactgcgggttataacattgaaggtccttgctacgataagcgtcgtgaagttatcgaaatgctgaacggaacggtgccaaatgatgaactttttggcgtcatttacaccgttgatgaaggggatgactggactgatccggcagttcttcacaaagccaatcctaatatgggggtatcggtttactctgacttcctcttaagccagcaaaacagggccaaaaacaatccccgcatggccgggatattcaaaacgaaacacctgaatatctgggtcgctgcccgcgctgcgtatttcaacctgttaagctggcgaaaatgtgaagatcaaactctcaccattgagcaatttgaaggccagccctgtattctgtcttttgacctggcgcgcaaactggacatgaactctaaggttcgcttatttacccgtgagatagacgggaaacggcattactactgtatatctccgcgcttctacgtcccttatgacaccgtatacagcaatgatgttgacgatcaccgcaccgctgaacggtaccgaaaatgggttgaagcggggcttatcaccatcaccgatggggcggaaattgactaccgcgtaatactggaagatgccaaacgtgacaatcaacagacccctgttgaacaaagccccatcgatccacatggcgcgacaaacttatcccatcatctggctgacgaacagcttaatccgataactattatccagaattacaccaatatgtcggacccgatgaaagagcttgaggccgctgtagagtccggacgtttccatcatgacggtaacccgattatgacctggtgtatttcaaacgtcgtgggtaagcacttgcctggaaatgatgatgtagtaaggccgataaaagagcagaacgaaaacaaaatagacggtgctgtagctttaataatggctattggtcgcgcaatgctcaatgaagagcgcgatttcctgtctactctcgacccggatgaagggcttttaattctatga

SEQ ID NO: 193368 - DNA, 339 bp, Klebsiella oxytoca
atgcaggcaggacgattacggcaccgggtcaccattcaaaacttcacaacctccagaacgccttccggtcagcccgttgaaaattgggaagatgggaaaactatctgggccgaggttaaagggataagcggtcgtgagctgttagccgctggcgtagagcatgctgatgcgacaatccgggtctgggtgcgctttcgcagggatatttcagccacatcccgactgaaagtacgcaccggaccgtttaaaggcgcaatcttgaacgttaccgggcctccggttccggatatcaaaggtacccggctggaaattctatgcaaacaggggaccgaaaaatga

SEQ ID NO: 193369 - DNA, 1557 bp, Klebsiella oxytoca
atgagaattaaaaagcctcaccttcgtccgatagtcataaccttgtccgttggtggggttttgctaacttctatttttctgattgtcgttattatggtttttcagcgcgaaaatatagaaaaggatttgattgatgctaattcatcgtacgctatgaaaatgtcagatgtaatgagtaattatatcggaatggctcagggtgaattagcatatggtgcaaaaaaaataaaatcaactaatgacatcacctcacttaaagaagaggcggataggttaagattgcagtctggtatgtttaattcagttcttgttgttagtaataacgctgttgttctggcaacatcgccagaatcacttggtttagttggtgtccacttgaattcaaataccagtaaattggcgattgagggaaaaaaaccattcatatcgttaccttacaaatcagctgctgggaatttgattgttttgttgtcacatcctatttatgataaggatggcaattatatagggtatatcggcgggtctatatatctaaaaaaacatagtttatttagcgatgttttgagcaggcattttttcaagagcggcactgaaattagcattgttagtgatgatgggaatgtgatctttaataacaatgaaagtgttgttggtcagcctgtgggtatttctgatgatttgaaatcaaagttaactgagtctgatagaggtgagggggcctttttttctgcggggcatagatatcttcttggctatgctcatatgaaaaatactgcttggaatgtattggtttatagtcatgctgacagcgtgactactattctttttacttatgttaaaagtgtactttttttgctaattgtaataattgttgtgttttcacttatttcatatttcattgcttcccgtatttcaattcctttagaaaagcttgctatatctaccaatgctaaagatataggagattcactaggttatattaaatctatcaatgcctggtatgccgaagctgatcggcttaaaaaggcgctttttacgcatgttaaggtaatgatggaaacggttgattctctaaatgaggtggcggttagagatcctcttactggcgtgaacaatagattgggattttcaaataaaatacagagccacaagcagggtttagggggggcgcttattgcaattgatgttgatttttttaaaaaaataaatgacagtttcgggcatggggtcggagatgaggtgcttgtttctttggctcagattattaattcttgttgccgtagtgaagatattgtttgtcggtttggtggcgaagagtttgttgtttttctgccgaatacatctgtggtaatagctgagtgtgttgcggagcgtattaggagtgttgttgaaagtactgttttccctaataacttgcgggtcaccatatctgctggtgtggcaacacaagatgatcctcttggggggatcatttttttgctgaaaaatgctgacgatgctctttatcaagccaaagaagaggggcgtaataaagtgattgtatataacgctatttga

SEQ ID NO: 193370 - DNA, 447 bp, Klebsiella oxytoca
atgcctctgtatgatggtgcgatagataaattgagagaaaacctgacaaagctttccttgggagagcgggttagcattactccaattggagaactgactgacgctcagtttcagcaaataaatgactttagaaaggaacaaaacctccccgatttagagtcgaaggaggttatttatctcggacgtcatcactacaatagcagaacatctgatggatacactgttgatgatattattgaacagatcattagtgccatgtctgacagttcggaattattaagaactgtaaagggtactgttcttgaaaataaaacccaacgcgatgatggttatggtaatatggttaacgatagagccgtattagagcttacaagtagaaaacctagatctgaactatattcagtcattccccgaggggatgtaaataaaccaccaaaaagtaaataa

SEQ ID NO: 193371 - DNA, 189 bp, Klebsiella oxytoca
atgtgtacttatgaatgggctttcttcgatcggaacggaaatatgcttccctcagtagtaacaactgaagaaagaacatatgccgcgggagatgtaaaaaattacaatggcaaaaactataaaatagttcacaggatcattgatcgagtgactacagatcgtgacctcaatattgctgttgaagtttga

SEQ ID NO: 193372 - DNA, 216 bp, Klebsiella oxytoca
atgacggaactggaaaaacagttgctgagcgcattagagcagctacagcaggactactcgaaaaggctggacgagtgggagaacgccttcgcggaatggcggacgatgtctggtcttatgcaacgggagaacgcggcgctgagcgagcgcgtttcgaacttgagcaggcaggtgcagagtttgagcgatcagctgcgcctgttgtcgaaaggctga

SEQ ID NO: 193373 - DNA, 498 bp, Klebsiella oxytoca
atgaacagtcttttaacgctggcgaaggacttagagcagaaatcgaaagcgcagcagcagagtaccggcgagatgctgaaagccgcattcagcgagcacgagaagtctgtcagagcggaattgagcgaaagcgagaagagaatcagcgccgccatcctcgaccacgacaggaagctgtccgctgccatgagccagcgcacgaaaggtatgctgcgtatggtcagccagacgtggctgaccatcgtcctggtttccgcgctgctgatcgcctcgagcgcgggcattctgtggtggcaggggcagcagatgctcgacaattacatgagcatccgggagcagaaggacgcgctggagaagctgaatgcgagaacgtttggcgtgagtttccagagcgacagcaacgggcagtttctggtactgccgaaaggcgtcagggcagaaacgagctggacggtggacaacgggaagcggaacgccgtgaaactggtacgggagtag

SEQ ID NO: 193374 - DNA, 345 bp, Klebsiella oxytoca
ttggcagacaaacgcagcaaaatgctcacgatgtgggtgactgaagatgagcaccgccgtctgctggaacgctgcgacggtaaacagcttgcggcctggatgcgccagacgtgcctggacgagaagcccgcccatgccggcaaactaccctcgatttcgccggcgctgcttcgtcagcttgccggcatggggaacaaccttaaccagattgcccgccaggttaacgccggtggtggcagcggacacgaccgcgtgcagattgtcgccgcgctgatggccattgatgccggactcgagcggttgcggcatgccgtactggaaaagggggcagacgatgattgttaa

SEQ ID NO: 193375 - DNA, 3876 bp, Klebsiella oxytoca
atggcgaaaaacgatgagatcaggcagaacatcattcccctcagtaagcagtacatgacccttgctgatgctcaggctgatatcgcgaatatccccgttggctccacgacctacgttagaagccctagtgataaagccctggcatttgaagtgataaataatgggggagtgcttgagcctacttacagagctatgccgtcacaaacagctttagttcctttgcgcttggcgaatatgttcgatgatggtggctttcgttcaggcctgccgccgaagatgaaaaacgccgggttatcctatgtaacaggtaagcttgttgccattacggatacctacctgctcggaattggttgtaaaaatggagtccgtcttcctgatggtgatacctatgccagcatgctggcatcgccggtaaaaattcctgaggcgctgtatggtaagtatgtgctgatgtcggcgctggtattctcagcggatggttcttttggcgcagattcaacgtgctcatatctggctgacgcgggcctgaataatatcaccagcccggcggttccttatgtcaatttccgtcgcgacatttctgcaaatatccgctgctatggcaccctggcttttgttcctgccgacggaagtgccagatacctgcatattggtaaagcaggattaggggctccctcagattcgagatttattacgggtctgtgctatgtgttcagtgaatctgcaatgacactcgacagcgtgaaatgggacgcgccataccctgccagcgactttgcaatcaaccatcgcgaactggataaaaaatttaattttcacgggaatctgatttctttcggcgacctggacggcggagcatttaacccgctcatccgttccggctcatccgtagtttccctcaccacgcagcagtcgcttattgagcgcgggtataaaaacgccctgcaagcccgtaccggcggaacagagtttattcgcagcaccggaaattccgatctccgcgggaaaacggtttgcgggtattttctgatctacgcagaaaatcagagcgacgtcgacaacctggactacgcgaatatatttcagagcaatgatgggaatctcgcgcagatcacctacagcaacgatatcggtaagcggaaggtgggagataatttatggctattgtgggctaaaggcaccgtcaacacccatacgagcgccgtaacggaattatgcatcggctggtccaccgctccggttacagctaatcgattcgcaactgcattttatctgtcagctggatcagctgattttgatattcagcctctgctctggaggttgaccgagcgcagcgtcgctaaacgagtcgctaacgacctggatatgcaaaaccagatccgttttacgaaccaggacgttctccagtttaactttgagggcaacctgctgacgtatggagacatggatgggggaagtcttaacccaccggtgcgaggtggctcagcagtggtttccctgactacccagcagtcattgctggatcgcgggtataccaaggccatccgctggcgaacagatggctccgctactgagtttgtgggatatacaagccccacggacctgcgcggtaaatatgcaggggcttatttcctgatctatgcggagaatccgtccgatgtcgctggcattgcccgggcgcaaatcttccaggttaatggggccgcgctggccgagatctcctataccactgagcgcgggattagaaatgttggcaaaaacctctacctggtctggcaggctgggcaggtcagcacctatacggcccctgtctataccctgtgggtagggtctggtgtggcaccagcaacctccgagcgctatgccacagggttcttcctgatggctgcagataccgcgataacgatggacccggtgctgcgtcgtctgactgagcgcaatatggccaagctggtcaccgggcagtattcagtttcctctgccgagttcatcagtgaaaaaatcaccgtcaaaaacagcagtaaaattgtcattctgggtgacagttacactgagtcaatgcacgctctgaaagacaagagctatgcggcgatggtctccatgctgaccgactggcgaatcgagccctatggcgtctccggaaatgactgtgtgatgatgaaccagcgcatcatcagcaacagcccgacatttgggtggggtattcgcgatatgggggcgtctcatgttgtgattatcagtcagacaaatgatgcggcaaaacgcagcatctcctaccggtactggcaggaggacatgcagcgggttattcagtcggtcagggcgcttggcgcgaagcccattttcagcactgagcatccgcaaattgacaactgggcgtatgcgcagacccggcaggttgccgagaaatttggcgctgaattctgggatattactactgaggcgcgaaattttgagttcaatagtgatggtcgtttatgggtaggctctcaccccggtaccagaacgaacacgcaactttggtcaggtatgctgaaaggcgttaacggaatgccgcgacccagaagcggacttaaaattttccgtgtccgtcctgggtataccgttggtactgttgccgatctggtctatgacgatgtcactgaccgcgcgcagcgatttaaagaaataacgctggggcataccgccattccgacggcagaccagagttatttcgataatctgagcgtgtataacgcgatcaacactacccgtacccgctataactctgagtatgggcaacttgctcagggcacggcgctggcattcacaaattatgcacttgtggaagcaattcttccgtcgtctgctgatggagtgcagtctgtacgcctggtcactgcgggcagcgctgtaactgtgtacgccttaaaccgcctgacacagccagcgttcaccacggctatctataaggcattcacgggagttacggcgacgccagctgttggtgatgtttacagtgatgggaccacctcatttactgttgttgggcagtatcaggataaattgatttgcaatccgaatgcggccacagcaagcagcgggacgctaacgaaagtcagtggttccgggccatcatccattacctatacaggcgcagagcagggcttcgacccggcgtattacacgcactacgcggataaaaaaggaacctgggaagctgtaactggtgcgatcacgtcaccaaatatagtgaagtacatgcagggggacaaaatatctttcctgatcgccgcatcaggtagctttagcctgtcagatattcatgtcgaatatacaggacgtgacagcaaaagcctggataactggcagccggtggagcgtcgggcgaggggagcggagcttcttgctcagggcaagtttggtgatgatgaaatctccggatggacccggatcggaagcgtacctcgttatgtcccatcgggcggaaatccgccggcaggatgtacaaaggtggtagtcgttgatgacaccaattatatcacccaggactttacggcaccgactgaagcggatgccgtggagctggagataaaagtatggtgtcgtcgatgggtatcgttattcgattcctcgtcaagtttttccacttcaaccattacccctgactcatatgacctgtcaaagcttcgcgttctgataggtcaacaagccactggtaaagaagtggttgccactgaattctcttcgtctgcagctctgggatggagagagataaaattcagatactggcataccggtaacaatgcgtctccgaccaaaaacctgcgacttaccgtaatgggtgaggcagggaaacagaccgaagtcgcctttgtttccatcagggaggtttaa

SEQ ID NO: 193376 - DNA, 483 bp, Klebsiella oxytoca
atgaaacgctattcaccggaacgtaaagccgccgttttggccaaattactgccgccttacaatatgaccgtcaccgcacttgcacgccaggaagggatatcggaagctaccctttatcattggcgaaaccaggccaaacgggagggaaaaccggtgcccggagctaacaaaaccaccgacctctggtcgacagaagcgcgctttgccgtcatcgtcgaaaccgccacactcagtgaagccgaactgagtgaatactgccgtcgcaaaggcctttatcctgaacaaatcgcccagtggaagcaggcttttctccagacgccacaagcggatacccgccagtcgcaaaagcaggcccaaaagaaaatcaaggggctggagcgcgaactggcgcgcaaagaaaaggccctggcggaggcggcagcgttgctggtcttgcgaaaaaagctgaatcactattacggtgtggaggacgaggacgactga

SEQ ID NO: 193377 - DNA, 999 bp, Klebsiella oxytoca
atggataccgccggcgctcgtctgctctgtgcttgccgggaagtggggttaagcctgagcacctggcggcgctggaacggccaggctgaagaccgtcggcccacggtcgtgcgtccggtcccggccaataaactgacggctgaagaagagcatcagatagtcgcggtatgtaacgagccggaatatgccagcctgccgccggcacagatcgtgccacgtttggcggataaaggcatttacctggccagtgagtcgacgttttaccgggtgctccggcgacacgggcaggttcatcaccgtggccgcagtcgggcaccacagaaagtgaataaaccgaccacttatcaggctattgagccatgccaggtgtggacgtgggacatcaccgggttagcctcacgggttcgtggtcgctatttttatctgtatttaatagaagatatttttagccgaaaaatcgtcggttacgaggttcatgaagaggaaaacggcgagcaggccgccgcgctcctgcaccgcacggtattacgtgaagggtgctaccgacacccgttagtgcttcatgccgacaatggtgcgccaatgaaatcccagacgttgaaagcgaagctggaagaactgaagatcaccggctcgcacagtcgcccacgagtgagcaacgataatccgtatgtggagtcgctgttcaggacgctaaaatatgttccgtcgtggccgtcatcaggcttcctggatctggatgaagcacggcgttgggtcgaggagttcaggcggtggtataacgaagagcaccggcatagcgccatcggttatgtgaccccgggccaacggcatcgaggggaagatataagcctgctggcaaaacgaaaagccttgtatgagacggctcaaaaagcccgaccggaacggtggtcaacctcatgccgtcaatggcagcgggtcggggtagtgatgctgaatccggataagccagaaactgggttgaaaacggcagcataa

SEQ ID NO: 193378 - DNA, 156 bp, Klebsiella oxytoca
atgtcagaaaatcactactctcgcggcagtctgaacgccatctcatatttgatctattacttcgtcggtgcgctggtctccacgttgggtatcgtgcttggcccgttgtgcgcagcgttcaacaaagaccctaggctgtgtcccttaatcacctga

SEQ ID NO: 193379 - DNA, 834 bp, Klebsiella oxytoca
atgtctcattcaatcattaacgataccccgtacgaagccgttaaaatcctaaacgcagccaagccagattttaagccacgtattgcgtttattctcggctctggacttggggtactggccgataaactcgacaataaaacggttatctcttatgcaaagctgccgggttttccggtcagcacggtgattggtcacgcgggcgaagtggtgatgggttcgctgcacggcgtggacatcatctgtatgaaggggcgcggacatttttacgagggcgtagggatgggcatcatgacccacgcggtgcgaacctttaagctgctcggctgcgaatttatgttctgtaccaacgccgccggctcgctgaatccgaacatcccggcgggtagcttggtggttctgaacgatcacatcaacaccatgccctccacgccgttggtggggccgaacgatgaccgctttggccagcgttttttcagcctcgccaacgcttatgacaaagtccttcgcgaaaaactgcaccacaccgcgcacggtttgggcctcagtctgcatgaaggcgtgtttgtttcctaccccgggccgaacttcgaaacggcagcagaaattcgcatgatgcagcagattggcggtgatgtggtgggcatgtcagtggtaccggaagtgattgtcgcgcgccactgcgggctgaaagtgctggcggtgtcggcgatcaccaatatggcggaaggcctgagcgacgtggagctttcccacgaacagaccctcaaatgcgccgcgatggtcaccgaagattttattcacctgataagccagttcgtgaagaactgtcgctaa

SEQ ID NO: 193380 - DNA, 303 bp, Klebsiella oxytoca
atgggagtttctttagccatcatcttttgtacggtaatgttcttagtcattattacaatggtgctcagtcacccgaatagcgctaaagaggtgttagatggccccgtattatcttatgagtataagtgcactggaattattttggatagaataaaaagcacggtaaggttatttaataatgataatgacaaaacatatcccttctctaaagttttgaaaattaattattatatagcccacacaccaaaaaataaaaaaaacctcaattacaaacttcatcaatataaaactaagtgcacgtaa

SEQ ID NO: 193381 - DNA, 2511 bp, Klebsiella oxytoca
atggggagcacgaattccgaacgcattcagtttgttattcctgttgccgatatcgaggcagcggggtattccgcagattcagtaggctctgtttatcagtatctccgcagcgccggtgctgacagctatatcctggttaaaaccaataactggaatatgaacgcggatttatcgcgttatgcgcagattgaaattggagaaggtgataccagtatcagctgtaaggcactgcttgcgagcggtagcgagtcttcaagctcttattctgtgattgtctctctttatgctgcccgtgctgattattctcgatatcagagcgatttcctgcgcctgactgctgacgttgttaaccgcagcacctacggattcacgaattatccgatggagctaaaggccagcctgcccgtggggattgcaaaagacgatgcctgcctcgtactgctggatgatgcaggtaacgagtacccgtgccagttttccggcgagcagcatcccaacaagcggctgcgcgccgaacgttccagacattctgacgggagctttgctacggggtcgctgttttacaccgatacactggcagcaggcgaacagcgtaaccttgaactgcgggcatattcagttccggtgcgtgggatgagcaggccgggtctgaatgtggtcgatcaaagcaccaggacggtggttattggcggttataagtacagttttgcacggcagcaaaactggtgcctgacgtccgttaccgacccgacaggtacagtccattctattgttcactcgacacacctggcggggctgagtagtggctccattgctgaagcggctgcggctcatatgccgtcactccgtcttatcacgtccggtcctgttttcgttgaactcgaacacatcattttcaatggtggccagttaaacgtcccggcgaaatcggtacgattcaccacgcgttaccgtctgtttgctaatggcaaaatccagataaatgtaaccgttcaggctgatgcggacattgcggcgggcactctcgcgggtgtgcattcacgtatttccctaaatgacggcgtttacttatccgacaataacgcaatgtctgcatggtggactgatgcgaccagcgggaaaaaatttacggtaacggggatgcgcggtgcgggtgacgagcacagggacggcacaacgtacgggccgaccagacctgttcaggccagcattctttatcctgatggcacatcaactcgcatctatctgggctggaaatttcagtatgtaaatgatgcatcatttacaacatggccggtgccgaaggactggacgtgggtgcaggagttctggattgactgcgatgcggatgtgaccctgaacgctcgggatgttatcagcctgccgtacaaccgtccgtgtgggttcctgggcaagtcggcgtttccgacagtcatcaaacagcaactgctgcgtcgcattgaaaaccacatagacggctctatggactggtggtactcgttcgacgctgccggtgccggtggtatgccgtataacgacccggcggcagacagggtgtggcagttcgcggcaatcagttacgatattatgcgccatatccgctacggctggagtaccgtcgataagctctatactacgatggagaggtatgtccgctgggtttacagcgcaacgacaatcaacgatatcggtgcacaatatctcgcagggaaagtgttgctacagttcgcgtcccgcctgtgcgttccgccgcttgagtggctatataagctggcggtcgcggatggaaatgcaacggtcaaaacgaaactggagggctgcattaaatcattcgcagatgccattgcgacctactacgaggcgcacggtggcgtcagcctgaacggttcccagactaacactggagtatctaactcaaacgcagcagctatgcgcattctggcgctggggatttatgcaggtcaggacactaacggacgctatcttgcggcgtttaacggaattgaggcgcttctgtctgacacgacgggttatatgtacatcgaaaacgtcattaaagacggtccggctgaaatcctgccgacgcgaaactggctgcattaccagctctacgcgatgaacagctacgcctgcgcctgttatctcctgaaccgagagccagcgttcagcatgattaactacacgttgctggcgtcatctggaggtggtggttttcatgaaattgactattgcgtatctgagagtcgccgcgggtcattcaatacctatcagctcgcgatgtataacctgctgtatgcaaagtcggcatcagcaaccaacctcgcagcgaagtgcatggacctcttcgagtcggagtatggacctcagccgggatacccgaagcgcgccttcggctttgacggcacaacgtcagaaagttatgcgatcgcagatattccgtttgtggcaaacgggctggcggacatctggttaagggagcatttcagacagctaagcgacaaaaatttttaa

SEQ ID NO: 193382 - DNA, 705 bp, Klebsiella oxytoca
atgagttttgaagatatcagagaattcttttggccagttttagttgaactgaatagtgaagaaataagacaagatcaagaaaagctggataacgatatcttaattattaaaaatactgactggacaaatgaaagtgaactagcccttgatgaggcaaaaaaacttaatgaattagaaaatcaaagaagagtaggagctgagagtaaagctgcaatatatttaacagctattactgctcttgctcctgtattagtctcgttagttcccggtattattagtagtggtggaaataatgcctttgtggattttttgtcatttgcaatttttgtgtatgcacttgctaatttgcttagagctgcattatgggcttttaataccttaaaagtttcagcttccaatagaatagacacgatagatttagttagaatttgggggggagccggagatgcatacaaaaaaaatttaattgttgaaaatctttgtgctgttcgaaaaaatagagatggagtaaatcgtaaggtaacatgtattaaaatgacgcatgaacttctccttagaacatttcttgcgtttgttttactcttattgttacaaacatcgatgtcatttattcctaatatcagcattgccaatcaggtctcttcaactacatgtaatgataaacaggatattgttcaacatcctgttaatatttatagaatatag

SEQ ID NO: 193383 - DNA, 264 bp, Klebsiella oxytoca; identical to SEQ ID NO: 193301

SEQ ID NO: 193384 - DNA, 246 bp, Klebsiella oxytoca
atggtcgaaattaccgacgcccagcagattcgtctcaacctgctttcaaccctgaactacgacaccgcggcggcaaaactcgctgtagaatttgttcaggacagcccgcttaagtaccagctattcatccagcaatacagccgcgtcacatcagaaactgaggtagttgcaaagacgatgaaagcggtgcaggaagcaactgaagcgctgccgctcttcgataccagcgctgagcagtcaagctag

SEQ ID NO: 193385 - DNA, 495 bp, Klebsiella oxytoca
atggctggaacggcggggcgttccgggcgtagaccaaagccaacggcgcgcaaggagctggccggaaaccccggcaagcgagccctgaataaagaagaaccagtattcacccccatcaatggcgtagcacctccggactggtttgcagaagaggaactcccgttagcatccatcatgtgggagctgacgaccaaagaattatgcggacagggcttgctctgcgtgaccgatcttgcagtactggagcgctggtgcgttgcctatgagttctggcgcagggcggtaaaaaatatagctgttgatggtttatccatcactggcgcaatgggcgggaaaattaaaaaccctgaacttacggctaaaaaagaacaggaatcggaaatgagttctaccggttcaatgttggggctggaccccagcagccgacagcgcctggtcggtctggctgggaagaaaaagaacgaaaacccattcctgaagatgatcacgccatga

SEQ ID NO: 193386 - DNA, 693 bp, Klebsiella oxytoca
ttggtatccgcattggcctgcgggatatccgaatcgctgtcagaatccgaatcgctgtcagagtccgagtcgctgtcggaatcggagtcgctgtcagagtccgagtcgctgtcagaatcggcatcgctgtcagaatccgaatcgctgtcagaatccgaatcactgtcggaatcggcatcgctgtcagagtccgaatcgctgtccgaatccgaatcgctgtcggaatcggcatcgctgtcagagtccgaatcgctgtcggagtcagagtcagagtcagagtccgagtcgctgtctgaatcggagtcgctgtctgaatcggagtcactgtcagaatccgagtcactgtcggagtccgaatcactgtcggagtcggaatcgctgtcggagtccgaatcactgtcggaatcggagtcgctgtcagagtccgagtcgctgtcagagtccgagtcgctgtcagagtcggagtcgctgtcggagtcggaatccgagtcactgtcagagtccgaatcgctgtcagagtcggaatcgctgtcagaatccgaatcactgtcggaatcggcatcgctgtcagagtccgaatcgctgtccgaatccgaatcgctgtcggaatcggagtcgctgtcagagtcagagtcgctgtcagaatcggagtcactgtcggagtccgagtcgctgtctagactggccccatga

SEQ ID NO: 193387 - DNA, 474 bp, Klebsiella oxytoca; identical to SEQ ID NO: 121234

SEQ ID NO: 193388 - DNA, 1032 bp, Klebsiella oxytoca; identical to SEQ ID NO: 189860

SEQ ID NO: 193389 - DNA, 780 bp, Klebsiella oxytoca
atgagtgtattaattacagtgtatatcacgacacaaaataggcctcagttactaaaaagagcattgctctcattaaaggaacaatcatataaaaattttgaggtgatagtatgcaatgatgcatcagatgaagtccataccgatgattacgcaaaagttataaaagagtttcaaaatatttttcatgagtttaactatattgtaaatgaaacaaaacaaggggcatgtgtaagtagaaataaagcaatacaacttgcacaaggtgagtatataacaggattggatgatgatgactattttcacagtaaaaggttggagcgttttatcaattttatcgataaagataaattttctttagtatgttctaatgttaagcttttagatgataatattattaataaacaacctgaaaaactcggtgatggaggaaagataattacatttaaagatattaagcagtataattgtgttggtaatcaaatattcgtaaagaaatccattcttaatgctgtaggtggttttgaccctgacatgccagcatggcaagattatgatacgtggtttagaattataaaagattttggtgaggcatataagttaaatgcctgtacaatgtatttagatgatggtgctaatagagaacgaataacaacaagtagcaaagcatatataggatataagaaatttatagagaagcataaagatagcctggatgagaaagattttatcagtctgaaatatatctgtctcttatacacatctgacgctgccgacgaatag

SEQ ID NO: 193390 - DNA, 501 bp, Klebsiella oxytoca
atgtttagggatatgactctttttgttgatgatgattcaactgcctacataatttatgagtctgaagggaattactcgatacaaattgcagaattaaatgatagttacaaggggtttactggtaaatattccagagttttagttgggctaaagaatgaggcccctacaattttcaagtataaaaaaagatattatatgatcacttccggtttaaaagggttcagccccaccgatgcaaggagtgcgtatagtgataatatttttggaccgtggtttcctttaggaaatcctacgcgttcaactaatattgatgatatcaggaaaaccttttcttctcaagggacctttgtaattcagaatgttggccctaataataaatatatctttatggccgatcgttggaatataaaaaatctgaaagatagttcatatgtttggctacctatttattgggataatggttctccagtaattgagtggaagaataattggaagtattag

SEQ ID NO: 193391 - DNA, 312 bp, Klebsiella oxytoca; identical to SEQ ID NO: 193252

SEQ ID NO: 193392 - DNA, 900 bp, Klebsiella oxytoca
atggcttctgctgtaacggaattacaatctttggctgaaaatgttgagacagacatactcactctttttctcaaagcaaagagtattgctatgagcatggaggataatgattttttagaatggttgaattgtgaaataaacggctaccaagtaacaggaaccataccagattatcgtgttggggtcgggaaaattagtgcgtgggatgtagagctaaaaagaacacttgatttcgactttggaaaagcgacaccagagcaaattaatgttttttcgacttacaagattgctaaccccatctccacgattatagagttagctgaagagcgtgtggagtggcaactcatgatgccattggaattaaaaaatattttacttaaagagcgggggaaaggtattgagctttactgggatattcacattggtaaaattcaaggaatactctttgctgttcgaaacaagattcacgactgggcaactcttgttataaccaaaagtggggcgcaagatgttaccatgcttgctaatgataaggtggtttcagttatgactgttaacaatattaataactttaacggcaacgtgcataatgctggtgctattggtgctggcaataccggagatattcaccaacagaacagtattacttcaggtgattttaactcccttgcgcgtcagctaaaagagcaggggcttgatgatgctgatgtcaaagagttggagcagcttgttaaacagactgctaaaccgacttcaaaagatgaggttgaaaagggctttgggtcttggattggtaagattacgggaaaggctttcactggagggcttaaaatcgctggtgcagccgctcctgctttactaactaatgcgctttgccactactttaacattcctgtctga

SEQ ID NO: 193393 - DNA, 174 bp, Klebsiella oxytoca
atgggcgaccgcctgcagtacgtgaacggccgcaactatcagaggattgataacggcgtcggcgtgagcttccagctggattatggtttccgcgttgactatgaacacgtcttcacgtcgagcaccgacaacctgggcgatatgaacctggtgcgtctgcgctacgacttctaa

SEQ ID NO: 193394 - DNA, 654 bp, Klebsiella oxytoca
atggaagatttaaaacaaaaaaaagaaatcatttcaaaaagaaaaatactatttgttgaaggccgggatgaggttttattcttctctgcattatctaaaaagataggattgcacagtgaaatccaagtcatagatttccaaggcaaggcaaatatgaagaacttcatttccatggcctctaaaactgagggtttcattgaaactgtaatatcgtttgcaataattcgtgacgctgacaaaaacttcaaaaacacagcaaccgaagtttcagatgcaataaaaagcatattctacattgaaaacacgaaaaatggggaaatgatacagggtaagaatatcaaagctggcttttttattatgcccggaaatgaaatgactggagagttagaggatttagttttatcctcctttaaggggaataaagtatcagataaaattgagaactatcttgatgaattaaaatcaatcacgaaaccagacgacgaaagctcaccatttattttccccaaaaaatcatccaaagcaaaaatacaaatttatttctcgagcatggaagaatcagatgcaagaatgggaatttcagcggaaaggaaatatgttgactttgatcatgcatcctttgttgatattataaaatttattcaatctatgtga

SEQ ID NO: 193395 - DNA, 1107 bp, Klebsiella oxytoca
atgataaaagaaatagaaatatcaaactttaagagcataaaaaatataaagttagaaaagttgaagagagttaactttattgctgggaaaaacggaagggggaaaacctcaattcttgatgcaatatttataacaaatgatttaacatctcctgattgccttgttaaacctgtagtatttagaggtggcacaccaaaccttacagcaggtgagttatggtattcatactttagaaaccttaacaaagagaataaaattaagatagcaattaacgactataatggggctaaagaggaaacaataatatctatagaaagaaaaacgaaaggctttcaaaatataggtctcgtaactagtgatagtatagacaaaaacaacgtatcaccgacttccttccaaggaggtgaatctctaaaaattaaaaaacacgataggacaaaaaacgaaaactcatctctaagaatagatgtaacccaacagattaacggctcgcaaatatcatcaaatgttgttaaccatggaggaccaatagaactaaaaccgacaacatacattacaacctcaaatgcaataaacaatgctaatacaatattggtcgtgggcaatctaataagaaataaagatataaaagagattgtcatagatatgaaaaaaataaataaaaaaataatagatatacaaattggaatattagaaaatactgcagaaatactttttgacactggtgagaataagcttgttagcctttcatcaatgggagagggaaccggaaaacttctaacactcctcgcaatttcatatagcacaaaaaatggtgtaatcctgatagatgaaattgaaaatggcatacactactcattaatgccatcaataataaaaatacttactgaacaatcaattaaaaaccaaaatcaaatatttatcacaacccatagccttgatgtgataaatacaataagtaacttatacgcaaacaaagagatttcggatgaaatcctttctttttctagaataggtttctcagaagcaaaagatgagacattattaagtacattctcacttccggaaataaaattatcctctgatgaaaattgggagataaggtaa

SEQ ID NO: 193396 - DNA, 297 bp, Klebsiella oxytoca
atggcgaacctacgcaaagaggcgcgcggccgcgaatgtacagtcaggatcccgggttactgcaacggcaacccggaaaccagcgtgctggcgcattatcggctggcgggtacgtgcggcacaggatgcaagcctgacgatactcaggcggctatcgcctgcagctgttgccacgacttgatcgacggacggaagaaaaccaccgattacacccatgatgaactgcggctgatgcatgcggaaggtgtgctcagaacgctgtccatatggaaaaaagaagggctggtaaaagcatga

SEQ ID NO: 193397 - DNA, 1242 bp, Klebsiella oxytoca
atggcaagaaaaaccaagccgttaaccgatacggaaatcaaagctgccaaacctaaagatgccgattatcagctgtatgacggtgacgggcttactctgctaatcaagtccagcggtagtaagctctggcagttccgttactatcggcctctgaccaagcagcgaaccaaacaaagcttcggagcctaccctgccgtctcgctttctgatgcacgtaaactcagagccgaatctaaagttttattggcgaaagacgttgatccccaagaatatcagaaagaacaggcgagaaattctcaagaggccaaaaccaatactttcctgttagttgccgagcgttggtggaatgtgaagaaagccagcgtaacagaggactatgccgacgatatctggcgctcgcttgagagagatgttttcccagctatcggtgatatcagtgtcactgagattaaggctcatactctggttaaagcagtgcagccggttcaggccagaggtgcattagagacagtccgacgcctttgtcagcgtattaatgaagtcatgatttacgcgcagaacacaggcttgattgatgcagttcccagtgtaaatatcggaaaagcgttcgagaaaccgcaaaagaaaaacatgccaagcatccgcccggagcaactaccacagctaatgcaaactatgcgtacggctagcattagtatgtcaacgcggtgcttgttcatgtggcagcttctcaccattacccgaccagccgaggcctctgaagcgagatgggatgagatcgattttgatgccaacgaatggaaaattcctgctgctcgaatgaagatgaaccgggagcatacgattccattgtctgatggagccctcgctattcttgcaacgatgaagtctctcagtggtggccgagaatttatctttcccagtcgcatcaaaccaacccagccgatgaacagccaaacagtgaatgccgcacttaagcgtgctggattgggaggcgttctcgtttctcatggcttacgctctatcgccagcactgctctcaatgagcagggatttccacctgatgttattgaagcagcattggctcatgttgacaaaaatgaggttcggcgagcttataatcgtagcgattacctagagcaacgtcgtccaatgatgcaatggtgggctgactttgtgaaaaaggcagatagtggtagcctcactgaagttgaatttacaacattaaagctcactggatag

SEQ ID NO: 193398 - DNA, 348 bp, Klebsiella oxytoca
atgctgctttccttccactttctgcaattatggcccgagctggaattgaagggtgtcacaggagccaccggtaaaaatggcgtgataactcactactggctggaagtgggggattacgctattgatatcactggggaccaatacaacatcatcaacgccagtaaactaaacgaagatatcgtaagaagcaggccatttgtgcctgttcacgtcgctcaccgaaaggacagctatctctataatttatttagaattcaagggaaggaacgtttaatctttggatttccgacaatcggtgacgatttcgtcgatgagatggaatgtgattatcgccagcttgttggctga

SEQ ID NO: 193399 - DNA, 681 bp, Klebsiella oxytoca
atgagatcacctaatgagttatctgaaaaaggatttgaatcccttctgctggatgcagaaaataaatatagatcccggatgtcgcgatatatgcttcgtcgctcgcttgcggtggtatatgattttcttgagaagaataaccgcatattcgccgtgtttgctgtcttgagatttgctcagtcccatgctgccgatgaacctgatttaccattgtgttttcaaagagatgatgagaaggctatcacccgagccttagactccctgaaaagccagctacgggctgagcacctgcgttcaggcagggctggtgaacctgcattacccgcttatatctgggcccgagaacgtaataccagcgaacatccccactaccacctagttctgttgtttgacagagaggtttatgcttatctcgggaattataccgaacctgatgctgataatatggcgactcgtattcagaaagcttggtgcagcgctattggacttgattatcccgattacgccagtcgggttcatttcccgaagaaccacacagcctggttcacacgacaccacgcattaacgttaagccctgattattatgacttcctgctacgggtcgcttacctggcaaagaacaacaccaaacatttaagtgacggttaccggaacttaggcacaagtcagataacgtcatag

SEQ ID NO: 193400 - DNA, 1515 bp, Klebsiella oxytoca
atgagcaataaatttaaaagcaaaattaatcatgaacttaacctgaagtttgacatactaccacgccacatcaggtattgggcttcgcatttgcactacataactggagtggctatcgaaataatccttgttacgttattagcctttttagggctggcctgtcaggatttgtactgtgttcagttaaagaataaacagcgatttcctctggccttatatctgctgctgctttcaagatctggcagtggaaaatcaacaatattcagattgttgaaggacccttttgcacaacaggaacgggagtttgaagatacttatcgtgctgagcttaaagcatatgagcgaaaaaatattctttgggaggcagagtttgaagtattaaacaggctttataaaaagactctgagcaagggtgaagatactaccgaaacgggtaaggcgcttgaagagtacattggtcgaaagccggataaaccagtaagaaagatcattatcacaacgaatccgacaagcgaagctctcgcaaaagcaatcgggctagagtatcaaaataaggcgctttttaatgacgaggcaacagcagtatacaaggggagtgtgttcaacaaccccgcgcttctcaatacatactggtgcggagacaaaatcacgatagacagggcatccagtgaaagttttgttattgaaaattatgtattttcatgttttttaatgatgcaacctcaaccttataacaataccagcagacagaaaagagtaaacatcagagagactggattgcaggcgcgtacactgatgatagacatggagcagattactacaccgtgcatcatcagtgaccattatactcatagtgagtcagtgctttctgaattgtactcagtgataacgcggcatttaaaagcgggtgtgaggcgaagagaaaatgatgatgagttaataacactgacgttgaccccggatgctcaggagctattgggtgcaacttcgttaagtttgcagcaaaagatgaaacctggaggctccttgtatcactacgatgatataggtgctcggattatagagcaggggctcagaatggcaggcatttttcaagtttctggtgaccctgattcgacaatgataacaaaggaaaatttgttatcagctttgaatctgatggactggtttgtcaatcacgccatcacgaaaattgattctacaagagagttgagtgatgaagaaaaaatattattctggatggagtcgcgccttgttcaaaatggttcttataatttcagtagaaatgtcatgatcaaaaatggaccgttatcaaccagatgctctgcgcgcttgatgccagcattggctaagcttgaatctaaaggaaaggtacaattatacgaagaagcaggtataaattatgtcaaatttaccggttcaaaaatgcatcctgtcgaactggcagagaaaactaacacacccgtatacctgtctggatcactggcaatgagcaagcttgttaagcctgaataa

SEQ ID NO: 193401 - DNA, 1827 bp, Klebsiella oxytoca
gtggggactcatgcttttgctgatatgatgtatcgtctttaccagtgctttggcctgtttgaaaaggatgacgaacggcgtgaagtgcgtggaaacagcagtttttcctttcatcagaatttttttgatcaaggctataacgatgtaataagaataattgacagcaatgaagtcttcagcctcgaagaaagacgcgaagttttttacaaatacgagcaactatataacgcgctaatgcatattccggtcttttctcatctagataatcgccaaatcacaaagcgctaccttcaggtcgcattgcctcccatagtagcattagacgtctataattctcttccccccgatgatgaaatgcatttctattaccatattcatcgttttttgatcagcacacactgcccacacgaaagagctgataaaagaaagatttatgcaggagtgaaagaatatctacgggaatatattcgcacacttgattttcactacacggatcatctgacatcacttattaatttcattaataatattaaagcaagtagtggacagaaggaagcgactataaagagagtaatagaagattgccgttcagagtataatgaaagctacattcctgaaaagaacataaaagtcaactcactaaatttaaataaaattgaaagggcttatctgtcgcttaacgtgctgcttgcattcgaacgcaagacctcagcagtcaccgcggtatccatgcattaccgacacacagtgaacaatggcattaattataacaatagttatggtattttgtgtcgatatatctactctaaggggtatgacgaaaaactgttacattacattactcttccattttataatatggctatccggcccgtttcggtaactatagaggaaaaaccgtatcgttatgtacacgaattaaaatggcttatttttaacactaggaataacaccaaatattctaaatgggatttagccgaaatagcatcttgtttcaaatccgcatctaactcagatgtactaataccctacttccaacttttgcaagtcatcatttttctcagtcaggataaaacagatgaagcattccgacttataaacaaaatcccattaactaccttaccgattggttacctgccctcagccttttcagttatcaaactggcattaaaagtgaaactggaaagaaaaaaaataagaaataaaacattactgtccgtgataaacagcaccttgagcaatcaaggtgctgttaccgaacttattgctgtaactcagggagaaactgatagtaatcttgtattatgcgcagataacatgacgatcatgcgtgcaataaaaatgtacaaccacctgataagaaaggtaagttattcatctgaagattcactatctgatgagtgtccacaagctatattcgggattcttgatgaaatagaatgtgcgctgggtaaattaaatatccttattcgcgaaacaggtgatagcattgacagtaatgaactagccgggcttatagtgaaaaataaaacactaacaactcgtgaattgaatgaaaacctggttggcgtacttgataaatgcacactttataatttcctgagtagcatcaatgtttttattagttatttgagatgccctggagaagaactaggacacatcaggatattttccggagtaacagaaaagccaagacgtcttcggggaaagatatgtgaggctttgaggattgcatcagaaatacgtagagagggggaatttaagaagaagggaaaaacgaccagacgtcaacagaaaagcgctggcgcagtccgaaaaagcaaatga

SEQ ID NO: 193402 - DNA, 1548 bp, Klebsiella oxytoca
atgtcagaaccacgtctgggtaatctgattaccgttttactacctgcgcgtagttacaagatcaactgcgctttgaccactgaaaaactgatgcctggaattgaacagtttgcatgtcgcttgctgctgatttttgatcagctctatcccagcgagttacagaattactttggtctaaccgatcgtgagcgagaggtattgcttgatggcttgctggctaacagactgatcaacattaaccctgatgggcatattgaggctagctcattcctacgtaagcatgcagctagtaatggtgggaagccaagtttagttaagtatcaagaacgtacggaggaagtggcattcgatctattaactctttcgatatgtaaaccgcaaccgaatcgtcgttttacttctggactgccagagctattgcctcggcatcagatcgggggagatgctgctgcggtaacagaggcttttagctcccagtttcgccaccatcttttgctcagccgcaacagcgagtatgagcgtcaaaggactagattatataagataatgggctgtagttcgcatgaaatggtgcagctcccaatagagatagaggttagctacgatgcttctgctggtagcattgagccgcagaaatttactcgctcctatgaatatttaggtaacacccgactgccgctttcaaacgagctggaggctcatatcgcagattttttgggagaacataaactagatgaatttggtatcgactgtgaagatttctgtaaactagcaaatgataaagtgttgttacaatttgctaatggttataagttcgactattccggctggatagaggctcgcgaacaacggaaaactggctacggtacttcattgactaccggcatgttaggggctgtttatttgccgcacaactctaagctgttcattagtatgttgcataatgcattacgtgattatgtgggtaaaacagctccaaaagcgctgtggtatagcagtaaagtaccactgtggggagctaatggcagtcaactttcgcgttttaatcgcgatctaggcgatatacttggtaattatgccgatgataagattgcccgcatttcgcttttacacccaagcgctgatgaaggtgagaaacgtcaagaacgtaagcgacacttaggtcgttttcctaccggtattggccttacttcagaggctaagtttgatcgtttggagatcctcttaattcctgatgtgattgctttggtgcaataccacggtcaacctaattctgatagtgcattaaccctgccgattggttatataaccgttgagccagagcgtttagaattacttaaaaacctaatgattaagcgaattgaaggggttgttgcaaccatcaattggtctgaatcaaaacttgaaaatttaacttcgctattacctgttgagtttctgattaaactgaataagaaaagtggtgaagatgtggatgctgcaatacaaaaaatgcaaattgctaaccgtgctgaaaccgcacgggcaattttatcgctgcgcaagtag

SEQ ID NO: 193403 - DNA, 4959 bp, Klebsiella oxytoca
gtgaagtatcagatagtaggtggtgcaggcctgcaccgcagcgaaaccaaaacagttgatatgatggttaagcagttaccagatagttggtttggctatgctggcttggttgttactgatagccaaggatcgatggaaatcgatacgctaattattactgctgaccggctgctattagtcgagcttaaagagtggaatggtaacatcacatacgaagggggtaagtggctgcaaaatggtaagccacgaggcaaaagtccctatcagatcaagcgtgagcatgcactgcgactaaaagatttgttgcaggaagagctatctcgtaagttgggttactttttgcatgttgaggctcatgtagtgctgtgtggcactgcaggtcctgagaacttgccatcaagtgagagtcgctatgttcatacccgtgatgaattcttgactataggcaaccccaaaaattacgaaaagctggtgcaggacactaacttttctcatctttttgaggggggaaagcctcggccaaattcagatgaggcattaccgatcattaagtccttctttgaaggcccaaaagtcaggcctttaccacttaaagaaagcggttatcttgcgaacgataagccattctttagtcaccctcacatggtctacaacgaattcagggctacccacaaagacaatagtcaacacagaggtctgctgcgtcagtggaactttgatgccctgggtgtggcaaatgcaatgcaaacattatggtctgagatagcgctgcgtgagactcgagtcggtcgcttggttcgtcatggcagtgcaactatgcaggattatatgttgcgtgcggtaagggaattatccgaggaggatataactgatgatgcccgtgagctgtatgaattacgccgtagttttagccgattggatgagatactagatagcgaagctgacggatggagtaagtctgatcgtattgatcgcgttcgtgcattattggctccattctctgaattacatagcctaggtatcggccattgtgatattgacccgcacaatctatggtacgcaggggatcaaaagagcattgtcgttactggttttggcgcagcctcgctggagggacataatagcctagaggcattacgtccgacattgcaaagtgctccatatactctgcccgaagatgcttttgaagaagcagttgagccctatcgcctagatgtattcatgttggctgtaattgcttatcgtatttgttttgcaggcgaatcgttactgactcctggacagatgcctgaatggcgagctccattaactgatccttttagcggcattttaaatagctggtttgaacaagctcttaaccttgagccaagtaaacgctttccacgtgcggacataatgctcaatgagtttaatgcggctactaaggaacatagccaagaatttgatgaagctaaccagatttatcaagagttaaagcaaaataaattctttcgcgaagggatgaacagcgttggtgtgttaattgagtttcctccgcttcctgaacagttgcctatggtttaccctgcgcttgctgccattgctacgactggcagcatcagttatcactgtgaacaaggtgggaaagccctgcaggtaaaattgtgggatggcgtgattttgaatcctcagcaacctggtgttaaccgccgtatccacgcttttaagcagcgaatcgataagcttacgcatataaatctgccaactcctaaggtgcgttcctgtggactattaggacaaggcggcttgtatgtagtgagcgagtatgtggatggtctaccgtggtcacagtttattgctgagaacgttttagaacaatcccaacgtttcacaattgcggagacgttgatcaacaccattcatgcttttcatgaaaaacagttacctcatggagatctttgcccagagaaactgctggtacaagtcggggagcagacagcaattactctgattggattgcttgaattcagtgatgaattaactgcagataatcgctaccagccagataatcctgaaagtactgatgcttttgggcgagattgctttgcagtatatcgtatggtggaggagctatttagtgaagatatgccagtaccggtgcaagctgagttagaacgtgcaaagcaaaccgttgacggtatacctatcgcgctcgatcctttgctgcagtcacttcgagcaccggaacaagctgagattaagcaagttgtggagtctgagtcacaggataatgtaattcctgtttgctggggcgcagatgattggccgcaagaagtgaagcttctagaacaaaatgatgggatctatcattttcactgtaactggtcagctaacccacgctttgcgcatgaattgcgttgtaacatcactggcctaggtgagcggctattggtagacctggatcctgataatcgcactattaatagaatagtgtataaaaaaggattatcgatcgaagaaagtataaaggctggtaaatattcccaagctaaaattaatactcaactttcattacagcgtggctcacttaatcagcgcaatacttttattgaactactgtttaatctcgagccagtaattgacgccatcattgagcgggctaatcctaatcaagagatggatgaagatgacttcgatagtagtgagtcaagtccagttgagttgtggcaggcattgtctgacacagaagtagacctacgagatatagtcaacatcgattcaactgactttcaggaatcaccaagtggttgcttactctacccatatactacggaatccggtgctgacctcagctttgaacttgatgataagatcattgtttatattaaagataagcgtgaatcagtgcagttaggggagttgcgactaagtgagactacgccgaatctattggctattcgctttgatttcgatgctgctcgtaagcgaattagtagcggcagccagctacaattggagtcgatccgtgacaaatcatcaagagagttgcgtcaaagagcccttcaacgagtaattgaaaacaaagcagagatccagcatctgccacagtattttgattaccaccagaaaccctgcatgcagcaaatgcaaccgcggccatccgcggagacattacgcgagctttatgatcagcctggacaacgttttaatgaacagcagctcatggcgtttcaacagttggtcgagttgggacctgttggagttctgcagggaccgccaggaacaggtaaaacaacctttatttcaaaatttattcactatctgtatcaacattgcggtgtgaataatattcttctggtcggccaatcccatgcgtctgttgataatgttgccatcaaggctagagagctctgccatacaaaaggaatggaactggatacagtacgtattggtaatgaacttatgattgatgagggtatgctaagtgttgcaactaaagctcttcagcgacagattcagcataaatttcaccgtgaatatgacctgcgagttagctccctaggaaagcgtctagggatggctccattattagtcaaacagttatgtcagttacatcgtacgctgaatcccttgatggtgacatatggccaatatagccgtgagctggataaagtagaacagacaaagagcagtagtattagtcatcaagagcgactgactgaattattagaacaaagcaatcagcttaaactgcgaacacaagaaattattaactcaatattcgatgacagcttgctgaaaactctcgtctatgatgagaccttgataagacagttggctgagcaaattgccatacaatgcagttataacaatccagagaaccttgaacgttttctgcagctattggaaatgagccaagagtggatggatgtattacgcggcggcgaggctgggtttgatcgatttatgttcaaaagtaagcgattggtttgcggaactcttgttggtgttgggaatcgtcgactagagctagctgagtctagttttgattgggtaatagttgatgaggctggccgagcacaagctgctgaattgatggtagcgctgcaatcaggcaagcgagtgttgctggtaggggatcataaacaattgccaccattctatcatcaacagcatcttaagttagcctctaagaagttagaactcgggaaagggatcttttacgagtctgattttgaacgcgcttttaaagcaacagacggcgtaacactcgatactcaatatcgaatggtagaaccaattggcgagttagtatcggagtgcttttacgctcaagatatcggtaaactgcattcatcgaggaaagtctcgccagattggtattcccagttaccaagtccttggaacaaaactgttacttggatcgatagttcgagccctaatgaagcaggtgcagaagagcataagggtaatggccgttactataatcaacgagaagtccggctactgttagaggctttgcagtcattgtcgagcgatgactgcattgcacagcttgagcaaactattaccacagagcagccatatcctattggtataatcacaatgtatcgtcagcaaaaagaggaaattgacaatgctatcagtcgggctgaatgggctgcatcgttacgtggtttgattaagatcgataccgttgattcatatcagggccaggagaacaagataattatcctcagtctggttcgcgataaccccaacaaactacaaggtttcctgcgcgatgcgccgcgaataaacgttgctatttcgcgagctcaagaaaggttattgattctgggagctaggcgtatgtggtcaaagaccaataatgattcagcacttggaaacgttcatgaatttattagtaaacaggttgccgtagatgaacccaactaccaaatcctgtgtggtcaaagtctgcttggagataacaactaa

SEQ ID NO: 193404 - DNA, 864 bp, Klebsiella oxytoca
atgaataatctgggagggttgcagtccttgcagggctcacttaagggcttaccagaatgggcctcagaacgggtcatgcagcaaattcgtcagctcacaaactacgagccagttatcggcattatggggaaaacaggggcgggaaaatcgtcgctgtgcaatgccctgtttgccggtgaagtgtcgccggtcagcgatgtggcggcctgtacacgtgaacctctgcgctttcgtctgcaagtcggtgagcgctatatgacgctggtggaccttcccggcgtgggggaaagtggtgcacgcgatactgagtatgctgcgctgtaccgcgaacagctaccccggctcgacctagtactgtggctgattaaggctgatgatcgggctctggcggtggatgagcatttttaccggcaagtgattggtgaggcataccggcataaggtgctgtttgttatcagccagtcagacaaagctgaacccaccagcggaggagaacgattatccacagagcagaagcaaaacatcagccgcaaaatctgcctgttgcatgagctgttccagcccgtgcatccggtgtgtgctgtgtcggtccgtctacagtggggactacgggtgatggcagagcgcatgatccgttgcctgccgcgtgaggccagcagcccggtggtgtcgcaactgcagcatccctttcgcacaacggtagtccgggagcaggcccgtgacgatttcggtgaaaccgtaggtgcagtacttgataccatcagtgctttgccccttattcccgccccgatgcgggccgtcattcaggccgtgcgcggcacagtggtgtcggttgcccgtgccgtctggaatttcttcttctga

SEQ ID NO: 193405 - DNA, 696 bp, Klebsiella oxytoca
atgccactgacagagcgccgctacgacaggctggcggtcaggctgtcgctgattatcagccgtcttgtggcgggtgaaacgttagagatgcaaaaactggcgaccgagtttgatgtgtcggtccgtaccctgtaccgggattttcgcgaacgactgatgtacctggacctcgaatgtcatcagggatgctatcgcctgcggaccggtgcaggtccgcagggtgaactggatgtgctgacttttgcataccgggccgggctggccgatatctttccggggctggaccggcgtctggcgggcgcactgctggcatcggatggaaccccttgcctggtgtggcagtcaccacagccgataacgaccaccagcccgctggtattttatcgactggtcagcgccatcaccggcagccagcgtgtattgctgctcgcggacggtgaacgttgtgacggactggccccgtaccgtctgatatttctcgacggctgctggtacctcaccggtgaacttaacgggcatataaccgtgcatcctctggcgaccatccatgcagtgacaatcctgaacaccacttttacccctcgaaaacgactcagcctgttaaccactcaggcaggctttatccgggcacttcctcacttcagctgtatccgtgaagttttgtcacaggctgccgataacgggggatcgggatga

SEQ ID NO: 193406 - DNA, 225 bp, Klebsiella oxytoca
atgacatggcattacgagataaatggcgtacgtcacgacaatgtgaccgaagacgacatcaccggcctgattgttcacggtgaactgactgccgccactctggtttggcgacagggaatgacggagtggcaaccgatctccgccaccccactagcttcggtgctacttcagagcgccatacgcgagcatacgcccacagcccctgacgcatcaggggctttataa

SEQ ID NO: 193407 - DNA, 909 bp, Klebsiella oxytoca
atgaaaagaaaatctttctctgcaaatgtgaaatggagttggttggcattgtctgtggcactgatggccccgactgtagtccaggcaaccgccaaaacggcggtagaagccaagaactgtcagtcagaaaacaatacatgcccatatcctttcgacctgtacaaaaccgacccagcgtacaaaaagtcgtttgatgagaccatgaatcagaatggtttaccggcgatgctcgacgagatgaatggtccagcgggtccgatggaaccagtaaaaattgacggtaaagtctacctgaaaggttttatgtgtgaagacggtaactgtggtaaccacaatctgacattcttgtaccagcctgacctccataacttcgtgggcttctacagcaacggtaaagatgggcaatgggttaacaccccaagtgatggtgagctgaaagtaatacgtgcattagtcaatgggactgcggaaccaacacacacgccaaccgccactaccacgtccaatgatgcaccaccagcgaataccatctgggaatttaccgggggtaacggtgacactctgtggaacatgtgcggcggtaaacataacagttgtgtgattgttggtaataccaaacacgtggccgccgtgttaaatcacaaatctgcaagtgggtgttcattaggtgatttttacatcattgacagggatgaccgttcctggcaacagcgagatactggaacctgtagtccaaatgcttgggtgcgcaaaggctccattaaaggtggtcaatatctgtctgttgacatcggcgtcggtgatgaaactgttatccagtaccctatcggttactggtcagacatgaaagagttttccggcccgaaccgaccatcctgggaaaaagcaaaacaagctgctaagcagtag

SEQ ID NO: 193408 - DNA, 240 bp, Klebsiella oxytoca
atgtctgaacctaaatggttaccaccgggacctttcatccgacagcaggccgaagcgattacccgccgatatcacaacatcgccattgaagacgaccaggacagtcacttccgtctggtggttcgcgaccccgaaggccggatggtctggcgggcgtggaactttgaaccggatgccggtacggccctcaaccggtatatcgggcaggatggcatttgcagagcattatccaccgactga

SEQ ID NO: 193409 - DNA, 459 bp, Klebsiella oxytoca
atgacaacacagacacagcacgagtttgttcccgctaacgaaccgcagttcaccctcagtgccacgctggtacccgacgaacagcgtatcaacttctggccacagcacttcagctccattccgcagtggataacgctggagccacgaatttttgtctggatggaccgcttctgtgacaagtacagcggcggtatctggtcgttttacacactcagcaatggcggggcgtttatggcacccgatgctgaggatgacgataaatggcatctgttcaacagcatgaatggcaatggtgctgaaatgagcgcggaagccgcaggcattgctgtctgcctgatcgaatacagccatcacgcctgtcgcaccgaatgcgatgccatgacggagcactattatcgcctgcgggactatgccctccaacatcctgaagcccacgccattctgcgtatcatcgactga

SEQ ID NO: 193410 - DNA, 318 bp, Klebsiella oxytoca
atgagcaaaatcacatggggtctgcagcgaaatatcacgccacacctgggagcccgtctggtgcaggaggggaaccggctgcattatctggctgatcgggccagtatcaccggtaagatcagtgacgccgaatgtcttaagctggatgtggcatttccgcattttatcagtcagatggaattgatgctgaccaccggtgaaatgaacccttgccatgcccactgcgtcatcctgtatcacaacggtttcacctgcgaagccgatacccttggcagttgcggctacgtatacgtcgccgtttatcccactcagcgctaa

SEQ ID NO: 193411 - DNA, 687 bp, Klebsiella oxytoca
atgctgatcgtgctgatcgccgctccgctgtcgattctgctgattggcccgctcggcatctggatcggtagcgccatttccgcgctggtctatacgatccacagctatctcggctggctgtcggtggcgattatgggcgccctgtggccgctgctggtgatgaccgggatgcaccgggtctttaccccgactatcattcagaccatcgccgaaaccggcaaagagggcatggtaatgccgtcggaaatcggcgctaatctgtcgctgggcggttcgtcgctggcggtggcgtggaaaaccaaaaacccggagctgcgccagacggcgctggcggccgcggcttccgcgattctggcggggatttccgaaccggcgctgtacggcgtggcggtgcggctgaagcgaccgctgatcgccagcctgatcagcggctttatctgcggcgcggtggccggtattgccgggctcgccagccactcaatggcggcgccggggttgtttaccagcgtccagtttttcgacccggctaatccgatgaccatcgtctgggtcttcggcgtcatggcgctggcggtagtgctgtcgtttgtcctgacgctaatgcttggctttgaagatattccgcaagaagaagccgccgccgacgccagacagcgccaggccggcacccaggcttctcacgcctga

SEQ ID NO: 193412 - DNA, 285 bp, Klebsiella oxytoca
atgagcatgatgcaaccggaatggcattccgccgacattatcgcggcgccgaaaaagcgtggaacgtcgctttcagccgtttcccacaaatccgggctggcgtcctccacgatggcaaacgcccttaaccgccactggcccaaaggggaaaggttgatcgccgaagcactggcgttgcgccagagaaaatctggccttcccgctataactagtcaggccagagatggggcttcggatttccatttccagaaaagcaaaaacccagccataggctgggttctctga

SEQ ID NO: 193413 - DNA, 894 bp, Klebsiella oxytoca
atgctgctgcccatacgagtcaacaagcggttcttgaatttatttagaacacttacattagacaaagcaccacggcaatctaccgtaaacttacatgttctaaacattgagagtaacagttttgtttataacaaattggttgaggaattaagagacttaatagtctgttacgtacattcgaatagaagaatagctgagtttgaaaaaaatcatccatcttttagtcccaaaccatatttagaggcaatacagaaatttcggacctatacatcaaatgaaggtgagttaggcgaactactattatatgcatttcttgaatcaggtctaaacgcacccaaattgctatccaaaatggagttaaagactgatgcaaatgattatatcaaaggttccgatggtatacatttattagagatcgacaataattatcaactaatctttggcgagtccaaaatgtatttggacttactggagggggctcgtgaagcgtttgactctattgctgactttaaagccaacggattaagatttgaacgaggcctaatagatactcatgtgataaatgaaatggttactgaagaaggatacgagacaataaaatctatactattaccttcaggaaatgatgggccaaaccttgatctatcttttggcgttttcctaggatttgagttacctgttaatgatacacaattatctatgaaaaacaacgaattccgggattgggcatattcatttgtaaaaaataatgcttctcgcgtaattgatacgatagaaaaaagaattataaagcataaactctttggtcacgattttcatatatacattgtccctttcacagacatagatatcactcgtaaaaaattaatccaagaaatgctaacaattggataa

SEQ ID NO: 193414 - DNA, 2589 bp, Klebsiella oxytoca
atgaacgaaaaagatatagtaagaaaagttccattagcacagcgtctttcgatggacgcttatacaagtagctactttaaagagatctataattacatatcagctttatatgacaattgtttatttaataataacggcattcagaaacctatatttattgacacaacaaaaatagaaaaagctttacgttttgctgatattctgtctcattcacctgttgaaacccatcgaacaaaatcatttgaaattataagtaaaatagctgcatttcattcagatgatccttattttaaaatgataggttcggcggtcataaatcgtttaggtatatttgcagcagataatttaatatcacaggaagtacacttaccgttagaccgagaaatagaatcatccataaaaaaatcattccaaagaactagtatagatggattattttttacagacaaacaatatgaactttatcaatccctaattaactcaaacactctaagttttgccggccctacgtcaatggggaaatcgttcgtcataaatgaatatataaaacatattatttttggtaatgctaaaaaaaatatagtgctcatagtcccaactcgagcattaattagccaaagtacattaaaattaaaaaatgaactaagagataaaattgatggcaatcagtataagatagtaacaacatcttacatgctcagaggaggtattgatcatagtaaagggtatattttcgtattgactccagagagattagttagcttaattagttcatctcctgatataattattgattatatttttgtcgacgaagcacaaaaacttactattaaaaatgatacacgaagtctcgtgacctattccgcgatcgaacaaacattaaatttaaattcaagtgcaaaactatttttctcatcaccaaatttatccaaccctgaagtatttaatgatttatttaatcgggaccatgctaaagtttatcgcagcattgaaggcgctacagctcagaacttgtactttattgacttattaaacaacaagtttagttatgttgataaaaacaaattaattgatatagataatgttaatcagacttatacatctgctaatgatcttatctttcagattaacaaagggaaaagtaagattatttacactggaggtatcgataacacattatctcggacaaggggttttctacgttatataaagaaattacaaagtaaaaagaaacctcaaaattttgatctagcatctcaggtccgagaatttgtgcataatggctacgaacttgctgaagctatagagtatggagtagcatttcatttcggaaatctgccacaagcaataagagatcttattgaacatcactttaaaattggtaatatagattacttgttctgcacatcaactcttcttgagggggtaaatttacccgcacgttcagtatttattttgacatcaaaaaagggtactagatattttgaacctgtggatttttggaatctcgcaggcagagcgggaagactggccatagagttagctggtgatatattttgcgtaaaagatgaaagtggaacttggaatgataaggcggtaaaaaaattaatcctatccaataaaaatgaaattgaactgactcccagcttttatcttaatgattctaaaaggattaaagaactagaacaaataataaaaactggttctactgaagggattcaaaatagtgaatttctcagaacactaagtgatatggtaaggattgataccctacgaactgacaaagccaataatttaccgcttatcaattatttcagaaataatggaaataacgatatattacactatgccttgaaaagcataggtaatattaacatacctacacatattttacttgcaaatagccatattgctattaactcacaacacaatgcatttaatagcatcaaaaattattcaattgacgaactaaagttatcatggaatcctacaaatgatgaaataaaagaaaaattagctctcatattcaatatttatcaaatagataaatatagtaaaggattagatcgtcttaattttaattcaattccatattacgcagtcattttatctaagtggatgcatggtaatacattaagtgaaataatctctgacgcgattatttattacatatcgaataaaaagaatatctatctttcagataagactcaagagccatttaatcaaaataattctattcatataacaaaattagtaaatgatacaattaaagatatagaattaaaaataggttatcagctacaaaattatatttcacattattgtcaacttctttcacttatttttgaaaataaccctggagcaaattggtcacaattcatagagtttggctcgaatgatcctattgtatggcaattgcaatttatgggattttccagacattgtgcaatatttttaaagaaaaacttccctaaacaccttaaatatgatcaagaaaacaatcagttatacatattaaacagagccgaaatcaagtcaaaagttaaacagaacaaattatattggcttgaaattcaggccctgctttaa

SEQ ID NO: 193415 - DNA, 1143 bp, Klebsiella oxytoca
atggctcaatttaatcactttgaactgtcgcttctgaatcccagctttgactcccctttggtcgacgcgctgacggaactggagttactccggcatctgcggctggaaactgacgttcacccaatcctgtttgcgcagttgaaggccgttttccatatgctggagagtctgggttctgcaaggattgagggaaaccacactacgcttgccgactatgttgaaagcaaggtagaaggaacccagagttcgacggatcagctcaaagaaatcaataatattgaagccgcgatggagttcatcgacgaatatctgaacaatggcgatgagataacggaatattttatccgcgagttgcatagtctggtagttgccgggctgcaacaggaaggcgacagaacgcccggcgcatatcgacaacataatgtcagcatcgctcagtctgaccatttgccgccggatcacatccgcgttgatgattatatggcggaactgaccgcctttattaaccgtgccgataagccaaagtacgatctgatgaagattgcactggtgcatcaccgttttggctggatacatccctttggcaatggtaatggcagaacggtcagactgctgacctatgcgttgcttatcaagtatggttttaacgttcaggctggcgggcgggttctcaatccgacagcggtattctgtaacgatcgtgagcgctattacgccatgctttcgttagccgataaggtaacagagcaaggactggaagagtggtgcttatatgtgctttcggggatctcctctgagctgaagaaagtcgaccaactgacaagccacgctttcctgagcgaaaagatcctgtatccggctatcgatttttcgtcggaaagagggctgatcaatccgctggaatcgaaggttctgaaacgtgccgttgagctggggacgataaaagcgggcgatctccgcgccgttttacctgacctgaaaccgacgcaggtgacttatcagctcggtaagctgattgagcgaggactgcttcagcctgtagaagagggggcgcgtacctatacggcgaagttttctaactcgtatctgatacgtggggtgattaaggtactgcgggaagaggggtttattcctgatttgtaa

SEQ ID NO: 193416 - DNA, 1446 bp, Klebsiella oxytoca
atgagcgactttgaaatcaacggaaagcttgtctattttttagaaattcttgaaagtattgaggatgccttaccatccttaaaaaagaatctggtcgaagaatataataataagaacattgcatatgaaaacttcattgaggttcatgctaaagaaatcgaaagaaaggacgatgggaaaatagtaagttttttaatgcacaggagcaaaacaccagagttaaggaaacttcgtaaagaaagagataaatcaagaaagttactccttgttatcccgagtaattttttggtagcaatcgtaagtgagtatgatgcttttcttggagatcttattcgagagatctacaagaataaaccagaaaaagttaatagtttagagaaggaatttacatttaaggaaataattgaatttggaagcatggaatctatcaaggagtttgtaattgaaaaagatattgaaactacattgagaaaaagtcatcttgagcagttaaccgctctagaacgaaaatttagtatagatcttacgaaagacttatccttacttcctaatttcattgagataaccgagcgacgcaacttatttgtgcattgcaaaggtatagtttcatcgcaatatataaaaaactgcactgaaaacggtgtaaaactcaatgatttaaagattggcaataagctatatgcaacaaatagctatatcttccaagcaatagatgtattttctgaattggcaatcaaacttacacatgtactttggaacaaagtttttaaagagagctcagagaaaataggtgatagcattcatgatatatcttatgagcttttatctagaaaaaaatatgagctattaaactcactgaccactctatttttatcaaagcctttcagttcaataggtgaagttacaagacgagcactattggtaaatcactgtatcgcattaagagaaagaggccagaaacaggcctccgacaaccttcttgatagttatgattggtctgcgtcaagtccaattttacaaatggctgaaagaattcttaaagaggattacaaaaagtctgcagtatatatgaagcaggcgtatcagatgggtgttcttaagaaagaacatattgaacaatggccattatttattcatttcaaaaatagtgatgaatttaaagatctttatgatgaactctttggtaaggacgaaactatcaatgtaacgataagtgaagaggatattcaatcgaaggaagctgaagctgaagcacaggcacaagcacaggcacaagcacaagcacaggcacaggcacaggcacaggcacaggcacaagcacaagcacaggcacaggcacaggcacaggcgactttagaggcggaagaagatggggtgaatggggtgcaaacggaaattatgtcaattccacaacctgaatcccagactgagtctgaaaataagtaa

SEQ ID NO: 193417 - DNA, 141 bp, Klebsiella oxytoca
atggtcattaacgccagttcctatttacgcaccgatatcgtcatgcttggcattttgctactgggtggcattggctatgcgctggatttactgctgctggggctgcagcgcctgtttgtaccctgggcggggaaagaataa

SEQ ID NO: 193418 - DNA, 519 bp, Klebsiella oxytoca
ttgcgacaggacggctttcgccatagccctgcactgcactgcaaaacagctttccggcacgtcgccggtgtcgcgcatccagtcgcgcacggactccgcacgtttcagggagagcacctggttagactggtcatcccccgtgctgtcggtatggcccgccaccacaatcagccagccgggcttcgccttaatccccaccagagagttcaccagcagctttgtcgagccaggtttcagcgcccattttccggtgtcgaacagcgacatgctgtcgagacgaagggttttcggaccctgaatgattttcttaatgaccggaggcggcggtggcggaggtgcccagtcactgactgcggcctcaacgggcggaatcagtcgcagtccctgatacagacccaggcgataacgcagtggctccccgcgacgttgccagtcgtccagcaatgcgccatcggcccgcaggcgctgctgcgcacgaagtttcggggcaacaggctgccccttcagctggtgatataa

SEQ ID NO: 193419 - DNA, 990 bp, Klebsiella oxytoca
atgaaaaaaatgttgtttgtcatgccggcactgctgaccggctgtacggggttttccccactgagatcacccgcgccggagctccaggtcccggcactggtgtttgttgacgggcagatacgcagctcagcagaaacggtggcacatacccagcagcaggtgcaggcgaccgtgccggcgccatcccgcgcagccccgatccccccgacacccgcgactgctacctctggcgtgccggcaatgtcgccttccacctcgcatgacacactgaccggtcccgcagccccggcagcgaccacggcagctgggctgcgtgtaaccggcacaccacaaaaaccggcggttatcagcctgcccggcgtcagtaacctgacaacagagcagtggatacgccgtattctgcctgatggctggcagctgcagtacgaaaatgccctgcgccagacgctcagcacccgacacaagactatctggcagaatgatgaatggacacgggtactcgagcgtctgctggtctcacaaaatattcagggccatctggactggcatgcccggacgctgaccctgtctcgtcccggcgttcagccagcagtccccgtgacatcttccgcccctgctgccacgccagcgccgcgtaatccgttccggcaggggcgtgaagacgatacctccatcccccctccagccccaataccggtcgcacctgccggcccggtctggaaagccgaacccggcagcaccctgcggaccaccctcacgcagtgggcctccacggccagctgcagtggtggcaaatggctggttatctggcccgtcgcggttgactatccagtttctgcgcctctgacctttaacgggccatttgaacaggtgatgaccgggctgtttaccctctatcagaaagccgcggttcccctgtatgccggagtcagtcgccagcagtgtgtgatttccgtcagtgataaaccttttccgggaggcacgccgtga

SEQ ID NO: 193420 - DNA, 177 bp, Klebsiella oxytoca
atgaaaattgcaatcgtaattgcttcaaatggtttactcgccagcgaattggtcaaagtagcagaacgtactgttgggcagttagaaaatgtcagggccatagaatttcacgatagcgaaagcattgaggaactcgtaaaggggttcgaggttcaatcgtgtaaaaaaccacgttaa

SEQ ID NO: 193421 - DNA, 729 bp, Klebsiella oxytoca
atgcgtactggaactgtagaggaaattcacaattttctaagtgaatactatgttaactccgaagatcctatatctccaccaggagtgaaagatgttgggttactggaatcagcttgtgcaaggccctttgcttctgctggcgggcaggatgcctttggtgatgtttaccacaaagctgcagcactgttccatgggattatttccaaccactgcttttataacggaaataaaagaacagctttattatcagctctttacttcctgagtgaaaataacctttggttagaaagatgtaatgatgaagaaatgtttgaatttactcgtcaggttgccgctcatgaaatttgtgacaaaagggatggtgagatagatgttatagcagattggtttaacagaaatactcgccgaatcgtgaaaggagaaaaaccgctcaactttgcaggtttacgagaaagtttatcccaatttgatttccatttggaagatgaagggcaattagcattcatctataaaaatggtgaggtcattgagaaggttctaaaaaaaggaaagcagggtatgcaagaatatgatcaagcatatattgctgaacttcgaaaacgtttagatttgacacctgagcatggggttgatagtgctcgattttatggacagaaaggtttgacagaagatctaaatgaatttatgaaacttcgtgtaaaagtttttgattggctcgctaagatctag

SEQ ID NO: 193422 - DNA, 141 bp, Klebsiella oxytoca
atgggtgaaggctatatgaaaatttttttcacgtacgtgatcggagcgttatttttcacctctttactccggcataaaagagaaattggcaataatctcaggcattgtgcgtggttgcgtggtataaaaagccctcattaa

SEQ ID NO: 193423 - DNA, 1833 bp, Klebsiella oxytoca
atgcccgaaaccaccataataaaactcatcgctccaaccttaaacggcctcaccgccgcgaccgcgcgcaccgaatcgcaacttaacggcctgaccaccgcgaccatcgccgctaccgcctctgcgccgttaacccttaataccacgctggcggcccatcttaccgccgccataaacagcgctgactacgacgggctgatcgccgaagcgcgcctgcttccggcaaacggcaacgctgtccgctatcagtttgtgctgcgcccgtggctgtggtggctgacgctcggcaacaacaaccgcgttttccagaacctcagcgcgcaggagatcgtcgcgaaagtgtttaaggatgccggatttagcgactacacattccagctcaaaacccaaccccaaaaacgcgaatactgcctgcaatataacgaaagcgacttcaattttgtctcacggctgctggagcaggaggggatcttctggttcttcacccataaagaaggcaagcacacgctggtgctggcggatgataatagcgccttcccggccatttctggcggcaaaaaggtgaagtatcaggcaatatcaagcggcgcccgggaaaccgggataattcgccaggtagagctgcgtttacaggccatcgcgcagggggcgcaccccggcaatgatcaatctgagcagccgaaacagcttatcgccgaaagcgactgcgcagcgctgatggcagggcactggtttacccttgccgatcatgacgacaaagcattaaatatcgactggctcatcaccgccgtcagccatgaatatgacggtgaacgctatcgcaaccgctttaccgctatcccgaaagccacgccgtatcaaccacggtacgccacgccaaagccgtttatgcctacgcaaaccgcaacggtggttggcaaaaacggagaagaaaactggaccgacaagctcggacgggtaaaggtgcagtttccgtgggatcgggaaggcaaaaacgatgagaccagctcctgctggctgcgggttgctaccgcctggagcggcaacggttttggcgcgcagtttatcccgcgtatcggccaggaagtggtggtgagctttatcgacggcgacccggataagccgctcattaccggctgtgtgtacaacggcgcgaatgctctgccgtatgcgctaccggcgaatcaaacccagtccggtattaaaacccgcagcgaaaaaggcttcaacgaactgcgcttcgatgacaaaaaagatgccgagctgctggcgatgcaggcgcaaaaggacttccagctcaacatactgaacgacagtcacaccaggattagccacgatgaaattcacagcgtcaaaaacgatcgtacccgcaccatcgaagagggcaacgaaaccgtcaccctgaaaaagggcagtcgcacggtgaaaatcgacaagggcagcgacatgctggaggtgaaagagaaacgcagcgtaacggtgaagggcgatcaggaacacgccatcgacggtaatgagacgcataaggtaaaaggcaactacacgctcaatgttgacggtaatctgacgattaaggtcagcggcacgctcaccctggagagcggcaaaaccctggacataaagagtggggcgggtcttaacgccagcgcgtcaggcagcatgaagctggatgccgccagcatcgccagtgaagccaaatcctcactgacccagaaagcggcaaccatcagccaggaagctaaggctactctgaccagcaaagccagtgccacccagaccgttgacggcggcgggatgctggtgattaaaggtggtctggtgaaaattaactga

SEQ ID NO: 193424 - DNA, 1131 bp, Klebsiella oxytoca
atgagaaataaaattgactttattccatctggcgacgaattaaaaaatctagttggacaaatgaattgtacagccacaataattaataacatattgcgggagagaggggttttctgctcttcttcagaaaagaccataacggttcctaatctaataacttcttttttgagtcctgaagagtcctatgaattactccaaagcattaaaacaaaagaaaaattagataaagttaattttcgtaattttgagattgataatgacgctgaacttttagaagaacttagtggatgtatcgatgttgatgatttaataagtaatgaatatactaacattgaaatttctgattttaacgattttacatcattagatggtaaatcaaataattctataataatggagttcgagttatgtcgtaaagatatattagatgattggtatattaccgagaaatttttcagaggttctgtagaaattaagaaagattatgatggcgaacgtgctcaactattaatgaatgttaaattgaatcatacatcgccagaaacaaaagaaatatctgaacgaattgtgtcgttagttgaaagtaaactccttaaagatcaaatcatcaaagactcccctcatggcgggaaagtactctttaacgattttgaaaatgaatatcgtgtatcatttttaagcgaacttgctaaacagcacattgggtatgaattttactataaaaaaattgatgatgttcatttcaatccagataaagatgcagattactctacacaacctcaattagtaaccaatttccttgaaaaagatattgagcaatatcgggttaaaggggatcttgataaaatcatatcaataaaatggaaacatattcacccatacgttaaagtaactaaagtgttagctagttatacaattgcacatgggaaatatgagggcgattgtaaagtctcatatgaatttagcgattacgggcgtaaaaactctctcaatccagaattatgcattactgttgtaaacataaaaatgaaaggggcctctcaagagaggttgaatgaaatacaagacttaataatgcgacaaatcgagacaagaaaagctgaattactccgtaagtacaaaaaatcataa

SEQ ID NO: 193425 - DNA, 921 bp, Klebsiella oxytoca
atgggtgaattttcaaaatacgttggtgaagtaggcgaagatattgtcaatgattttctaactctatttggttggcgaaacatgtgcaataataaaaaagtagattgctgtgtttcaacacatgaaaaaataacacatggtgtcgatgctttatacgtatatgattctctacttcaaaaacagacattagttagtgttgttgtttctgctaaatattctgcatcatcttacaccagtgtcaaatcaacctttagagatcattttaaagatattgccaacacaattgaatgctacaataaatcacaactaaagaggaacattacaaaaaactttaaaggcagttctcgaaaagaagatattggtgtattattttatttaaacaatgatgagaatgaagaaaaagataacattaaaggtaccatagcaaataccagaattgatagcacattaaaatttaatacaattcatgtcattgataatgcaagagctaaattcttattcgaatcattaaacttcattagaaaaaaatataaagattgtgattttttttgcaataatacgacattaaatatagcgtcttcaaaaacacacacaaaaatcatgccagtagaatatatcacatcaccaataatccctatatccgttgcatctgataatggtcgaagatttattttactttgcgatttcgattttagtaaagagtccctaattcttgttttcaatttagccaggaaattatgctctgacttttcaagtcactatgaaatatacttcaaacaatataacgcgctcaccgatgatcctataatagatgaagttaaaatgtcacaaataaatgaagatgatgacatcatagagagcatagatgtacaaatctcatcttataattctaacttcaggaatatcaaaaatgagaaataa

SEQ ID NO: 193426 - DNA, 369 bp, Klebsiella oxytoca
atgttcagaacagaagacatcatcgatgagataattcaatggattgattcaaacttacataaaccgctgaagatagaggatgttgctgcgcgggcaggatactccagatggcatcttcagcggatttttgtgcaggtgaaagaagttagccttgggaagtacataagagatacgaaacttaaacttgcagcaaaagatcttattgatactaatgaatcaattatggagatcctttataagtatggattcgattcccaacagacatttacgagggtcttttccaaaacttataaatccccacccatgatgtatcggaaaatcaataaattgaccattactaaagataggtccaaatctttacctttataa

SEQ ID NO: 193427 - DNA, 288 bp, Klebsiella oxytoca
atgttaaaaattaccggtttagacaagctacaaaaagagttgaaagtggcccagttggcactgagtgagttggatggaaatttaggtactgtgcattttgacccacaagatccagccagtattgaaaatgcaattcaaaagataaatcaaatagttgacgagcgagtttctcaatactcatccaattcgattattggtccattggccgagcaaatgaagcaagcatatcgtgaaaatttgatccaaaaagctacaaagttcagaattaaaaataacgaggaaaattga

SEQ ID NO: 193428 - DNA, 894 bp, Klebsiella oxytoca
atgtcaaaggatatatttgcagatattaataatgccgttctggacctacaggcttcacaggcacaaacctttgaacgtcctttaaaaaaacttgctcaacttctgaaacatcctgatcttgagccttataataaagaattagttgcagatcttgacttagagagttttcttgaaaagagtgcacaatctgcgagatctatggtcggaagtgcaactcttgactggccagaagatcccagaaaagagctaggcctaacactacttttaatctggaaattaggcgcagatcctagctatgccgtccacttcagtattaatttcttttattctggtaaaagaattatcagcaatattcatgcgctcaccggtcagttaatcattccctttattcgggactacaaaaactacattcaatcgaagggaattccccagaccatgttaactccccctctatctaagaaagtatttattgttcatggtcacgatgagggttcccgtgaaaaagtggctcgctttctggaacgccttggtctggaagcaattatattgcatgaacaggctaatcggggtcgaactgttattgagaaagttattgaatacggcaacgtgggatttgcggttgtcctacttacccctgatgatgaagggtgtgtaaaaggtggtacgcttgaacccagagcacgccaaaatgtgcttctggagttaggtttttttattggtcaccttggacgagataaagtctgcgcccttaaaaaaggggcagtagaaatacccagtgatttcgccggtgttgtttgggaaccgatggatgataataatggatggaagcaatctctttcccgagaactcgaggctgctggccatgtaatcgactggaacaaagtgatgcgttaa

SEQ ID NO: 193429 - DNA, 831 bp, Klebsiella oxytoca
atgaacttatcaatgccttggagtttagctggacgccttttcaagtggatatgggataaaattactcgattatggttactaaagacctatcaaaaatctcacgaatacaaagctagtcgtcttcggttaggagcgcgttgggaaccacttggcgagtacctggagtactcgttgcgcctttctagttctgccgatcatgaaacagtaaaatcctgtatagcttttcgggcaaaagaaattctggtagagaatattaaactttattttgaagcgtctggacatggtattcgttaccagcagaaaattgatttggtaaatctggaccaatctgtcctgattgttcacttagatcaaattcctcggcaggagcttgtggaggcttctgagcgcggtatatttttttcgattaccgaaacgcagttaactcaatgcgtcattacgttagccgggggccaaaaacagcaaccctttgattcaataaggtcccatctaacatataactggttgctaaatgacaaatgggtgcgacgctggggagagttatggaactgtaataccattgagcatgcgaaaaccgaaatgaagtcttattggcgttggcgattgggagaatttaaacatttttccctttacagtgctgggctcggaccttatccctggaatggaatattacgcaaaagcctgtgcaagcttttgatcaaccaccatattatcacaatacagttctggctggcggtacattctggacggtatgttcttggagatggaaaactgaagctcaatcagcgacgaattagaaaagtgaaacccagcaaagcttcgaacctttga

SEQ ID NO: 193430 - DNA, 1404 bp, Klebsiella oxytoca
atgagtgaggggaaattgccggaggggtgggttggctctagtttaggagacgtgcttgatgttaatagcggagtaggtttcccgataaaattccaaggaaaaaaaagtggtgattatcctgtatataaagtaagtgatatatcattggctgtaactaaaaataatggaaatttaattaccgcagggcactttatatctaaagaagaggccatagagcttaaaggtaaaatattccgtctaggttccactgcttttgcaaaaataggtgaggctgttaaattaaataggcgggcaataattcaatcacctggtttagctgataacaatgtaatggttatcagtgcagtactacatgaaatggataaatttatattccatttcatgaatactatagacctttcagaacaggctagatcaactaccgtaccttccatcaggaaaggagatatagaaaatatacaattggctctccctccgatctccgaacaaaaaatcatcgcagaaaagctcgatacgctgctggcacaggtagatagtaccaaagcacgtcttgagcaaattccacaaatcctgaaacgttttcgtcaggcggtgctctctgctgccgtaagtgggttgctgattgattcaaataaaagaaaacaccatccattgtgtagtgaatggcagtgggcagacttaccatcaacctgggatgttcacaaatactctgaacttgttgatagtagactaggaaaaatgcttgataaagctaaaaatgttggctctgcaacaaaatatcttgggaatataaatgttcgctggtttggttttaatttagaaaaccttcaagatatactaatctcagatatagagcgaagagaattatcactcgagccaggtgatgttctaatatgtgaaggtggtgaacctggtcgatgtgctatatggagtgaacctcaggatacacctgttattttccaaaaagcattacatcgagctcgtgtaaaagaaaaaatcatcccagaatggttagcttataatttgaaaaatgattcaaataacattagcttatctcagctttttacaggaactacaattaagcacctcacaggaaaagcactggcaaattatcccatcagagttcctccattagacgaacaacacgaaatcgtccgccgcgtcgaacaactcttcgcctacgccgacaccattgaaaagcaggtcaacagcgccctaacccgcgtcaacagccttactcagtcgatcctggcgaaggccttccgcggcgagcttaccgcccagtggcgtgccgaaaaccctaatctgatcagcggtgaaaacagcgccgccgccctgctggagaaaatcaaggccgaacgcaccgccagcggcagtaaaaaaaccacgcgaaaaaaagcctaa

SEQ ID NO: 193431 - DNA, 795 bp, Klebsiella oxytoca
atgaaagcagatattcagaagtccgttaccgaaattatcgacaaatcaagcgtagaaattgatacaggagagcgccagaacattatcgatgaggcgatccaaactgcgctggaacacatcgccacgtctgtgagtaccgcacctcttgcggaaggctcgaagtacatgcaggtctgggttcgttttggagagtccccggagctgcctggtgttaagcagaaacgcgcggcactcgtcacgttcactcgcgagatgaaagatgcaacgatagaagtacgcgccggtgcatggtacgacggccgcgttgtctacaccaatcaggcggtgtgcgatgaaggtgaacggtttgaggatattgttgacgcgactcttcgcgcgatcaaaggcagagccagtgtagatgatgacccgtccatcgcggcgttcctgagcattgtcgaactgcctgaagttaccgaacgcgttacagctctgacaacaccacctggtttgctggagttggtggtcagtggtgataccaaaaaagccgttgagcgcattcgtgaggtggaatacggcatcatctgcgatatgtgccgcagcgacttagacctggtgcgcatcattgtcgacgcgggtcaagcatgtgacggtgtactcgccagttttgcagggcaggtggcacgcctggccaacgagctgccgatgattaaacaggaggcaaaatcctacgccgtccaccatgccaacgatttattggagccataccggttcgaagccgctcaggacaaaatgactggctgggcgacctggtaa

SEQ ID NO: 193432 - DNA, 516 bp, Klebsiella oxytoca
atggttagaagcatgtccacaagaacagatttgtcgaaaatcccgtctatctccggaaacaacggttattcgctgcgctgcccggaagtgaagatcaacggccatgaggcccattgcagctatacagtctgccagcacaccatcctcgcctacaaagagaagcgtctcccggctacatcgttccagtcctgcgctgcggccattgctgctggaaaatgccaggcgctgaagatgatggtcgaagagatccgcaaaggcgaacaactctacttcatcgatatggctgcgcttatcaaagaagtggaagagcaaaacgaccacgccagaacgcttacccggaagcgcaacaccatgacgattaacagtctggttaaacgcacgaagaaaacagaatcagccaaacccgaaaccacgtccaccgattcactggcgcccgtcactgacgtgtacgcggcactcattgaagaagcaaccaaaaaaacacatgaaaactcccgagcgaccgatggaggttaa

SEQ ID NO: 193433 - DNA, 1323 bp, Klebsiella oxytoca
atggaaaaactgatcgccctaaagcacaagctggatgccataaaaacgatgggaaccaacgccaagaaagaggcactggccaaccttgatgaatttgagcagagcatggtctcgctaatgctcaacccattcattcgattcggtgtgaagaagtacaaagtggccgagccactcgatacttccgtacccagcgaccagaaggtagtcgagctgctggagaagctggcggcgcgcgaactgaccgggaacgcggccattactgctgtcgaatcactcgttgcctcaatgtgcgctgacgggcaggacgtgtttcgtcgcttcctgctgaaagatccgaaagccggcgtcggtatcagcctgtgcaacaaggtgttcgaaaacccaattccgaagtttgaggtacagctggcgtctccgtacaaggagaaaggcgacaaatacccatttaaaccaaatccaaaggccaagtggccaatgatcggcagcctcaaactcgatggtctccgggttatctgcgaagtcatcgttgacgaggaagaggtgaacttcctgacgcgtaccggcaatccgattacgtcactcgatcaccttaaaccagccatgcttgagcgaggcagactctccggtttcaagcatatctttttcgatggtgagggtactgcaggtacgttcaaccagtccgtgtcggcacttcgcaagaagaacgtgaaagccattggtgccgtttaccacatcttcgatttcttcttaccggagtggcgtgctcaggcaaaaagcaaagagtacctgaagaccggcatgaagctgaaagagcgcctggctatgctggtggcgttgttccgcaacacttgcggggaagattacgcgcaagatgtccacctgcatccgttctacatcatccatagccatgaagactttatcgaacgcttcatgaagcgcctggacgagaacgaagagggggagatgggcaaagatccggattctgtttacgagttcaaacgcacccgcagctggtggaagctgaaagacgaggattccgaagacggtgaaatcatcgacttcgagccaggcgacccggactctggctttgcgcatacgctgggtaagatagtgattcgtctggagaacggcgtcatcgttcgtgccagcggtatcaagcataagtacctggatgagatctggaacaatcaggagaagtatcgtggacgcatcgttgaggttcactgccatgagaaaacgccagacggtagcttacgccacccacgtctgaagtggccgaaatgtctgcgagataccgaagaccgtattggagataaagactga

SEQ ID NO: 193434 - DNA, 177 bp, Klebsiella oxytoca
atgctcggctggatgattgtatttttggtcgtcggcattgttatcggcagtctggttacgtccagctgcatcaacgattacgtaaaagccggtgtcatgcagagacgtggccgcatttaccgcattgtagatatcacgtacacactgaaggatattaaggatgatcatgctaagtaa

SEQ ID NO: 193435 - DNA, 213 bp, Klebsiella oxytoca
atgatcatgctaagtaaacgggagaaagaaactctgcgtgaaatcagccagtggaaggagttctatgccaactggaagccaaagacccgcgccaaactggaacgtatgaatcttgtcgctaacgtttcgccaaagggatgtgtggagaactatcaactcactgaaaaaggacactcactgttgcagcaattgactgaggcgggggcgttctga

SEQ ID NO: 193436 - DNA, 153 bp, Klebsiella oxytoca; identical to SEQ ID NO: 133855

SEQ ID NO: 193437 - DNA, 306 bp, Klebsiella oxytoca
atgagcaatttgacctcattcgactggtggctggcaacctaccttgtggcggccggcttcggatatgccttttacattggtcagttaatcgtaaagctactgctgatcagatttgccagccataaacgcatagatgacggtctgtggcgcctgggttctctgctggagactcactacggcgaactgaaggagaacgaaactatcactattcaagcgaagcgttttacggccatcatcacgagaacgccagaacagaaggtgagcttgatcaaaaagatagcaactgaacgagttacagaaaaataa

SEQ ID NO: 193438 - DNA, 870 bp, Klebsiella oxytoca
atgaggctttacataataggaaacggatttgatattcgacatggcttgccaacaggatacaagcactttaagtcgtatgtagcaaaacatgaccaagaactatatgacgcgatagaagaatacctgcctgctggagacgaatggaacgagttagaaagtgctttaggcgcaattgattatgagcttatccttcaaaacagtgagatgtttttggcttcgtacaataccgatgattggagcgatgcctatcatcacgattaccaatatgaagtagataaaatcacacggatgctgtcagctcgcttgaaggagcaattcgctgattgggttaaagggattaacataaccgatgcttgcaattctgagcaatacatcccgcccatatcaagagaaagcctctatttttcatttaattataccaataccttgcagcagatctatgccgttccagacgcgcaaatcatgcatattcacggcaattgtatttacgatgacgatctcatactaggtcacagttttagggttgaaaagtcactaaatccatatatagggccggatcaagatacaagaatagcagaggcatacgacagcatagacgaatacttcggtaatacattcaagcccagcgaaaacataattaaagaagagagcgtttttttctcgtcgcttaaaaatgtggatgaggtcattgttttaggccattcgcttgccgaagttgacggtgaatacttcgctgaaataaataaaagcatccaagaaaatgctcgatggatagttgctttatatagaggtgaggaaaagtcaggcagcttagaagattatgatgtcagagactcaaatatttcttacgtgcagtatgaagatatctga

SEQ ID NO: 193439 - DNA, 1392 bp, Klebsiella oxytoca
atgataaattatactgacgaatcaacttttattgaaaaatacaaaccgtttagaaaattttggacaattttatcacctcactttgtatttcaactgcattcacttgccaaaatgataaggggtgaagacccaattcaagaacaaccttccaatgatgaaatttttcttgaagagtatgaaatctgtctcaaaaattggaaagacgcacagaaacttatatcttttgagattatttttcggttgcgagatataaaaaaattggaagttgaaaaaaaagagcatcatcgaaacaaggataaaaaaaagaaagaaaagtgtattgatgaaataaatttaaaaaaaattgaaattcttattcttcgccgttgtattgactcactaatttggagcatacttgatgaagatcactcgagtttgcggcgtttacctattaatacaggcaatgacaatctatcagaagataacataattgattctatggtcgcagccgatcttatcaatcaggacaaacacgccgtagcgattgtctctgacatgagtacatttgttcatgtgggggatttagtcacctttaatccactggatggctttcaactcgtggaagttaaaacaggcaaaaagaataatgagctttatgaagctgccgaattttctgttatctcagagtgtccgaactttgaagaaaacttcattagcaatatgcctgaaaatgatgttaagcaatttaatcgcataaaaaggcaaatcgttcgtggtatgaatgtgctggaggcgattaatactggcgagggctttgacaatcttcatcaatctaaagttaaaatcgatgagatagaccatccatctgagttttatacccaccgtttagttaaaatgtgggagattattcgcggaggaaaaaattgggcaattgatactattgatgaatgtttgttcttaggtatgtaccgtgattctaaaatgggttttgttgccttcaatggatggatggatggcctcgatataaaaagccctgttgtgaatataaacgattcattctttgaccctttgtctcggccatttatgagtttgcatctgccaactgaaatgctctccgatctcatgtcgggacaaataatcatcgtcatgtgttttgacaatgaacttttttttcaccgtgctaacaaagcgtacccaggtttatttctccttagcaatacggcgagaacaaaacaaccattagaaaatattcttcatgttggttcgcaagggatagcttcttacgtagatgggcataccagctttttaggtaatggtattgaatcccgaatccttttcgatcagcaacgacccgacaacattattgagtggagctatgctagaagcgatctcaaaaagcaacatgaagcataa

SEQ ID NO: 193440 - DNA, 774 bp, Klebsiella oxytoca
atgggaaacaaacgtaaacaggcgcgtcgcgcagctcgtcaggcactgaagtcaaagccacgcatccacggctacgaaattgacacaatcatcgttgacgagctggctgcagcccctactctgccaccaaaacctaaacgcgacaactctcccatcgaagcgcgtaacgaggcccaggcccactatcttatctccctcgataccaaacctctgacgttcgccactggtgaagccggttgcggcaagacctacctggctgctgccgtcgcagcgcagcgtctgctggataaggaagtcgggaagatcatcgtgacgcgtccggtattgcaagcagaagaagatctgggtttccttccgggcgacatgagcgagaagttcgctccgctcttccggcccgtctatgacgtgctacagaagcgtttgggtggctcgttccttgaatattgcttaaagccagaggtggccaaagtagagattgccccctttgcttacatgcgtgggcgcacgttcgagaacgctgtagtcattctcgatgaggcgcaaaacgttacagcgtcacaaatgaaaatgttcctgacccgtatgggcgagaacgtaaccgtcattgtgaacggagatgtgacgcaatgcgacctgcctggcaatgttaagtctggtctggaagatgcactggagcgttttaaaccttcctcccatgttggccttattgagtttgcgaccgaagactgcgtgcgttctgagctatgcaaagtcgctctggaagcctatcagtaa

SEQ ID NO: 193441 - DNA, 204 bp, Klebsiella oxytoca
atgaccaaagagtacctgccacaccagaaacgtgttatggatgaacacgaagaactgtgtggccgcatacaagaactggaggcgtacattaccggcgacgagtttgctcgcctgctgtatgtcgaccgcatcatcctcattaagcagctggacacgatgaaggcgtatgacataattcttcgtgcccggatcgctcgtttttaa

SEQ ID NO: 193442 - DNA, 366 bp, Klebsiella oxytoca
atgaccgatatggatatcgaaaacgagattgtggccaaaggcaaaacggccgcgcgtgttaccccggaacgcattgaagctgttatctcaggcgagttttactttaccggcgcggacggatatcgcagctcaccgttgtggctgaagcaggaagagcctgaaccggccccgcaatcactcgaactgctgaccttctgcgttcttgtgctggagaacggctacaccgtaaccggcgagtctgcgtgcgccagcccggagaactttgatccggagatcgggcgtaaaattgcacgccagaacgcaattgccaaaatctggcccctggaaggctatcttctcaagcagcagctgcacggggtgaagtga

SEQ ID NO: 193443 - DNA, 246 bp, Klebsiella oxytoca
atgaaggtcgttatctacggacgcgataattgctcatactgcaaacgtgcggtcgagctggcgaagcagctgtacggccacggctttggcgattacgaatacatcgatattgtgtctgccggcatcgacaaagagaagttgagcgacctggttggcaaaccggtggaaaccataccgcaggtgttctttaatggtgaacctatcggcggctatacagaatttgctgcttttgcgagcactctgtaa

SEQ ID NO: 193444 - DNA, 609 bp, Klebsiella oxytoca
atgcgtttagaaaattgcctggaagatatgagtgtcattagcaatgcccttgctactgtgacctctaacgcctcgcgcttttcaactgcaaagcctaaagctaaatctgggcgtgcctttattgagccgcttggctatcgacgcttccgtggcacggtgaagcactctgcgaaatttgctggattcaaagaacaagcctatgtgagaaccgcaggtatccctgttcaagagaacagcgatgcggcacagctggcagagatcgaaagcaaactcgcagaattgacagcgaaacacgttcgcctggctaatgccatctctggatggaaagcggaaaagattcgcagcagcttcggtgaaagccgttacgaagaactgaagaacgttgacctgaccattcgtggtttggagggattcgttaacaagttgattcgtgactctgagcaacctcatccatacttgaagcgcctgagcgattctgtaactgagtatcgtttggctatctctgatctgctattgattttaaatcagtgttttaacgacgtagacgtcatcgaatcgcagacaggcctcattgatgaggacgtcttcgccaacttctcattccattga

SEQ ID NO: 193445 - DNA, 411 bp, Klebsiella oxytoca
atgaaggtcacatggaacagtgatagttacgcccaatttttacagccgaccttcgatataaagcctgacttaaagatcacgttactcgacgatttcacgtcgcttaaacaaggcatgtgcccagccgtattaggcaaagatggcccgtatacggctccgggtgctatcgtgtcctcccgcgtttatcacgttcatctcttgttcacgaagcaagaacgaaccagcagccgcaacagattcaattgcacaagcgaccgcgcactcgtttacagtcaacatgcacatttccaagatgtgtatagtctattagcaatcttcccgggcaatgcacatcagtatgcgaaagatccaaaaatcatggccgatatcgctgcatacgccgccgcatttcaagctctcactaatccgtga

SEQ ID NO: 193446 - DNA, 1107 bp, Klebsiella oxytoca
atgaaaaacacctttgataaagcacgcgcagcagaaaacacctctcgggaagccatcgagtacctcgaacgcgcttccggtttgtcggcagtgtcgaccgccaatttcgacggagacatgtcgttttcttccgccttcatgttattcactcgcttatctttactgataacgagacgtcgacctgaaatagccgttcattgtgttttgatacatgtaatgccgcatatctctgaagtaaaggtaagtgatataagtagggtcttggtcaaccaactggtgaacccactgatactggaaggtaagatcgtccagggcagacgcgtattctccctaatgaaacagttcctgagctggtgcgcttttcaggggctgattaatacatcgccgttgaatgatatgtcgctcaataaagttgccggtggcgcgaagccagtaccgcgagaacgtaagctgaccgacgccgaggtctgggtattctggaacgtctgggattacttcaatgtgtgcgaaggcacaaagtgggcggccaggctctgtcttgtcgccgccagacgacccgatgaagtgctccgggccagaaaggatgagttcaaccttcaacgtgatgtatggaatcaaggtacgcgaaacaaatcggccagacagcacgcgctgccgttaagcccattgatgcgccaatgcgtagaagagttgtttgagtacgggaaaggcagccagtggctcgttccttcgaataagaagaagggcgtggatacgccaatgtctaaggtggccattgcccaggcactgagaaggatactggaacgacctgagttgatggaggttgagtcattcaccccacgcgatctgagacgtacagcgcgtagttatttccctgctctggggattaatcaggaggtggcccgtaagattatgaaccacagtcttgaagggatagatcgcgtctatgatcgccacgattatatggatgagatgcgagacgccttgaataacttctcaacgtacatcgcatctatcgttaatcaaacagacttagacgagatagaccacaaattcaagggagatcgtctagccacggagcttattcgtgtaaatttctcacagtga

SEQ ID NO: 193447 - DNA, 387 bp, Klebsiella oxytoca
atggctaccaacgaaacagagatcaaacaaggtcgctacgcagcttacattgactcgttaatcacaatctcgcctaaaagtcaggctaccattgccaaagaggttgggtacaagaacgccaacaacctctccctcatcaaaagcggcaaaatcccacttccagtcgataaggttcgagctttagccgaagcactggaggcagatccggttcgactgatgctgatggttctggaagaacgtcatcctgagctgcttgagttttttcgcgaagagggcactgcacctctctccgctgatgaaaaactcgttctagaagcgttccgtaaccgttttgacggtcaacagggtgcgtcagaaaaggtggtagaagccatcaagtcactgtga

SEQ ID NO: 193448 - DNA, 213 bp, Klebsiella oxytoca
atgaaaaatataacttctaaattgaccgcccttgaggttggacacgcatatgcgattggactggatggcgtcgcgacgatcctgacagaactagaatctgaagagcttcccgtggagatggttgatacgacggttttcacttttgagctaaaaaataaacatttcactctcatcaataccggttgcggctcccttgccgtgagaaccatttaa

SEQ ID NO: 193449 - DNA, 2373 bp, Klebsiella oxytoca
atgtccaaagccatgaccagatctgtgctgaaagaggtacaggactttcgcgactgcgtaaaacgagttgtagcgatgctatcaggcaaacagatacctgttgcagagcgaggtaatgaagcatatgtccgctacaaccggcgcggcgaaccagtgctggtaaacatcccatctatatcggacgacgcgtcaccaaccctcatgaacgcagtacgtggttttctcgaccatgaggtagcccatatcctctttactgatccgaaagtcgcaatgaagatgcgcgagaaaggaaaggctccgtctaccgggctttggaacgcgctggaagacgtttttattgaacgcagaatgggacaggtattcaacggaactcgtcgcaatttgctggccacacagaacgtggtgatcgacaaatacttcaagggcaaagtttcagaggcggtttcaatctgccacggcaaccagcgtgaattgttcctgaaattcttcctttgcccggtcgttcgcgcctgggatggccaaagccctttcatcgactttatggaagaacactggcacctcatcgagaagcctgtggccttgctcaaagagcatggtatcgacgtggccgttcgcaatatgtcgaacacagaagactgcgtgaaggtagcagctgctatcgcccaaatcatgcaggatatgaaagacaagccagagggcaaattaccagagcttaaatcgtctgctaggaagccgtcgaagagtgaggatgagtcagaggaaaccccagaagccggtgacgaaccgactcatagtgaatcagcaccaaagcgtaccaaaggcgaagacgacgacaaggaagagcaagaagatgatgcctcagaagaggaagagtctggggattctgatttgcctgaatcagtagataagaacttacctacagaagataaagaaattagtgatacagaaagtaaatatacagaagcaggcgaagaggaatcaggagacacctcagaatccgatgatgccggcatggaatcaggtgattctgatgacgaaggtggtagtgatgacactggctctccaacgcctggtgatggcattcgcgaagacgccgatgactccgatggttatggctctggcgccgctggcgatggggatagtgatagtgatgacggcgaagactccgatgccggtcacggggagtcggaaggagaaggcgaagaggaagatgatgccgccgatcaaacagacggcgaaggtaaagaaaatgaggatgctgcggaagcgcctgaagacagtgagtcaggctttgttcctgctccggatgaaatgactctggaggacgcactcaaggcgctcgacgagatggaagacggaacaggcgaaatgaccgaagacgcactgtcggccaccatcagcaaagagcttatgagcacctcactttctgagtatcgcccatacgatcgttcatacgactttatcgggttgattgatgaggctgaagagcatgtaaagcgcaccagaaagacgttcggcgcaatcccgatgcactcaccggtcgatcgctaccgcatggttccggaaggcagaaagctctttgaactgaaaatcgaaaaacatctgtcagcaggcgtttcttcgactctggccaaagacctggagcgagctatcgccagccgcaaccgagttcagtttatcccaggccagagacgtgggcggatacatggcgcgaacctgtatcgtctggcaatgaacgacgaccgcgtattccgcaagaaagaagaccacagagcggtgaacgcgtgcgtccagcaggtgatcgacttgtccggctcaatgggcggcaggaagattcagctggcaatcgcaagcgcctacaccattgcggatgctctggatcgtatcaatgtgcctaacatcatcaccggctttaccacgtttggtagcccagattatgaaaccatgtcgaagcgcgggtttactcgtttcgaggcgctaatgctacccattatcaaaaactggaatgagaaagccaactctccagagatccgcgcccgcatgggctgcgtgtgtgagacattccccctgctcaataacgtcgatggtgagagcgtcgcgcagctggcgactctgtttgcagggcgaatggaggacaagaagatcatgctggttatgagcgacggggcgccatgtgctgcaggcgacgggttccatcagcatttgcgaaccgtcaccaaagaaattgagacgttgagtgacatcgatttgatggctatcggcgttctgaccgacgcaccacggcgttactacaaaaattacgcactggtaaacagcgtagaagagttagggccgtcagtcgtcacagaactatctcgtatcattcttgggtaa

SEQ ID NO: 193450 - DNA, 1236 bp, Klebsiella oxytoca
atgaccgctactgcactacagcaagaagaacatttgccggaagccatcgtctgcaagtggtgtggcaaatcctttcattacctgaaatcccatatctctatgggccgctgcgagaacattcctgagtccgcgaaagttctggacgtggacgaggtggtgaaaatgtacaccactgcgtttccggatgaaccaacgatctctcgcacggcactggccaaactcaatgagaagcgtgccgaaaagcattcaggtgaaggaaaagtggcggacattagcgcacatccgggctacgcaggaacggtcgaatacaagaccgaactggtggccgcgcacgagctgcttggcgtaacgatcaaagagctgggaacgccacgcggaaaaccactacaggtgacagtcaacgtcaacacgccatatccggagttcgtaccggaagcgaagaagaactatgtgtatggcgacttcgacctgattaaagacatcttcatgatgctggaaatcggaatcccaggctatctctggggccatgcaggaaccggtaaatcttctcttcctacgcagctatgcgccctgctgaatcgaccactgatccgcgcacagcatacggcgtctatggaagaggcacacgttacaggccagatcctcgctcgcgatggttccacctacttcgagcctggtttgctggcgctggcgatgaaaaatggctgggtgtacctcgctgatgaatatgacttcgcgttcccgcagattctgggtgtgtaccagccagttcttgaaggagagccgctgatcatcaaagaggcaactccggactggcgccgtatcactccgcataaacgctttgccttcattggcactggcaacactaacggctctggcgacgaaacgggtctctatcaaggtacgaacatccagaacgcggcgaacttctcgcgcttcggcattgtttcgaacgtgaagtacatgagcactaaggctgaagtcaacatgctggctgaggctggtgttatccgcgaatacgccgagaagatggtgaaattcgcgaaccttgtccgtgaaggttatgaacagcatctgatcagccagccaatcggccctcgcgagctgctgctgtccgcaaaaatcggaatgatgcgcggtgatttctctgccggcatcgaaaagtcgtttatcaataaacttccatccacgtctgcacaggcagcgcgtgaagtggttcagaagatcttcggttaa

SEQ ID NO: 193451 - DNA, 3519 bp, Klebsiella oxytoca
atgaaggctctgatggtcagaactgacttctccctgggagagtcggctcttaaagcagaaaacgcggtgaaaatcgcgaaagacgctggctacaccgctgtcatttccgctgacagcatgaacattgccagtgtgatccccctgcagcgtgccgctggcgacgacatggctgttatttgtggtgttaagctgaatgttgtcgacgatccgacatacgagcaccgcgctcgcctggcgaaagagtcagggagatgtatggaatcattggtacgtgatcgcagctactgcttcacggcactgataaagaacgagcaaggttatcgcgacgtgtgcgaactgatgaccttagccaacaagcgcgagcaattctactttgtcccgcgtctggcgcttgaccagctggcggccgcatatgccaaaggcaacatcatcctgctgacgtctgacattggcagtgtattccagcgccgggacttcgcaaagattatcgggacgctggtgacagctggaggacgcgataacttctacagcgtggtttatccgcaccctaccccattctacgaccagattaacgtccgggcgatgaaagtggcgagcgcactgaaaatagagccagtggcgttctatcccgcttattacgaagcggtcgacgacgctgacattaaagacattgcgcacatggttacgaacaacatcaaaatcgaccagccgcatcgtctgcgtattccccaccagcgagataacgccgttaatggtcgccgccatctccttgaagcgctgaaagccttctccgttcgaatggatgtgccggtaacagctgcaatggcctcaacaacgcaggacaccattattgaagcctgcacatggcgctggcatgaattgccaccagcactgcccaagatggcagacgacgagcctgcaacgctgatgaagctggctgtcgcggggctgcgcaagcgtcttactaccaaagagtttggctacacaccaccggcttctgagcaccgtgtgtatgttgatcgcctgaagtacgaaatggacactctgacccgcctgggcttctgtggctacttcctaatggtgcgcgacctgatgaatcacagtcgtgaaactggcattcctgtcgggccaggtcgtggttcctctgccgggtctctggtggcgtggtgcataggcataaccaacgttgatcctatccgtcacggtcttctgtttgagcgtttcattaaccctgaacgtctcgacttgccggatgcggatctggacttcagccaggcacgtcgtcatgaggtgatcgagtatctgaatgaacgctatggcgaagattacgttgccggtattccgaacttcacctatctgggcgctgcttcggcgctgcgtgacactgcgcgtatttacggtgtcgacgctgcggatatggcggtatccaaagagttcaagaatctggaggacgatagcctgtcgctggaagagctgcgcgagcaactggccagcctggacaaatacgccacgaaaaacccggaagcgttcaaagcggcgtgtaagctgcaaagcctgatgcgtggttttggccgtcacgcagcggggatgatcgtcgctggcgttccactggtagagcgcacgcccgtcgagctgcgtggcaatgctcgctgtattgcattcgataaacattactgcgaggcaatggggttgattaagctggacgttctcggtctggcaacgctcgatctgctggatagcgcgaaacgctacatcaaagagagtaccggggaagacatcaatctcgatgctatcccactggacgatcgcaaggttctggatgggttcgctgcagggtacacgcagggcgtattccagctggagtccggccccatgcgcaagctgcttaaagatctgggcggtggcattgagccaatgagcttcaaaaccgttgtcgccacaaccgcactcttccgacctggcccgattcaatccggcatgttggacgactatgtctcggtggccaaaggcttcatggctccacagtcgctgcacccggtactggacgaacttaccgcggaaaccaacggcgtgattctgtatcaggaacagacgatgaacgcgacacgattgctggccggcttcacgatggccgaagcagatggtgtgcgtaaagcgatcggtaaaaaggatatggaaaagatgaagagcatgggcgagaagttcgtcgttcaggctcaagcgggttggatcgacgttgagatggaagacggcacaacgcagcgtattcaccgcgcggaacacttcaaatgtgaggacggcgcactgcggacggtcgaagaagcgctggaggcaggtgtgaaattgcctatggctgctgtacgcgttacagggtcacaaccgggcttgtctgagacgaaagctaaggagatctgggatgccttcgagaagaacggtgcgtatcagttcaacaaatcacactccgttgcctactcgctgatcagctatcagtctatgtggttaaagacacattaccctgctgagttcttcgctgctgcgctcaccattctgggcgaggataagcaccaggggctggttaaggatgcgctgacctatggcattcgcgtattgccaccagacgttaacgtgtcatctaaccgaattgagatccgcacgctggaagacggcagccaggttctgtatgcgcccttctctgctgtgaaaggctgctctgagaatggttgccaggccatcatgagagcgcgtgagaaagttggcggcaaattcgagtcacttgagcaatttgaggaagcggtcgagaagcgtgcgtgtaacagccgagtacgcgagtcactgcaaaaagtaggtgcgttcgcatcgattgagcctggcagtctgccagcgacagatccggaacgactgcgcgaccaggcagagttgatgggcaatctggtgatcgacgctgtaaaagcctctcgaccgttcgagatgaaccctaagcgctctgctgaagtgaatgtactgatgactcgcatggcggctgaaatgggtctgggagacgacctgatccgcccaagcattggcattaagccgaaaatcatggtcattctggacaacgcgaacggcaatgatgggcgtaccggctacttcatggagaatggctacgacgacttcaaggcgaagttgcttactgcaggcgatttgcgcatgggcgatctctacgtcaccggcgtgtgcaaaaaggtgaaggacaaagagaaggactacaccaaagacgagatcggtcagttcaccgactttatgcgtgaagagatcaatctggtgcgtccgacctatgtgttgacgtgtggcagccgggcgacgtcactcttcaacaacaagagcaaaccatccgacctggttggacgcaaagagtatctgccggagctggatgtgaccgttttctacggatttaacccgaacattttgtactttcgcccagaagaaggcgaaaagctggaagcaattctggcagaggtagcggagactattagcaaatga

SEQ ID NO: 193452 - DNA, 564 bp, Klebsiella oxytoca
atggcgctttataacttcactctgactctctcaggcgtaacctatgagaccgaaggattggaagatgcgctgtacgaaagcggctgtggcgatgcgattgtttgcgcatatggaaactccgtctatgttgagttcgaccgcgaagccgaatcgctggatgcagccattgcatcagcggtcgacaatatcgaatctgccggtatcggcgcgattgtagaatcagtcgactcggccttagttggcctgagcgatgtagctgaaatgacgggcatgtcccgacaagcaattaccatgcttaaagatgggcttcgtggtggtggcgacttcccttgccctatccagagaatccagggacagtccccgctgtgggattgggctgatgtggctaactggcttgaagccaatggacgccttaaagaaaacgcagagctggcacacaatgctcgcgtattaagtaagtggaatttggcccttcgcaatagcgtctcaaaagactttgttgagattgaacatatcgcttcttcacttatcgcacgtcgacgtcatcacgccgaatgcgcatga

SEQ ID NO: 193453 - DNA, 1029 bp, Klebsiella oxytoca
atgtctaagtcattacttgatctgcttaacaagacccgtggcgatattgcttctaaacgtggcaataacgttgatttgacccgtctgaaagacggcaataactatctgcgcatttttccgaacaaggacgacccgaatggcgtgttcttccagactttcggtatgcactacgttaagcatcagaatgaggaaggcaaagatgtaaccaccgcctacatctgcgaacagcacacccacggccacgcttgccagctgtgtgagatggttatggaaggtcgtgctcgctttaagggcaacaaagcgatggaagagcgcattaacagtatgcgtgctacaccgcgttatctggtcaacggtgttctgtctgcgcgtgaagactttgcggacgcagagaaatgccagctgattgagctgccgtctacggtcttcgacgatatctgcaaagtgatgtccgaagatattgcggatgatatcggcaacccactgagcaaagaagaaggctatgcgttcctgattaagcgtaccggttccggtcgtgacaccaagtacgacgtatccccgaaacgtaaagtctacaaaggcgacattcctgagaagctctggactacccaacacgatctgatcgcatacgcgaaccaggctgacgaaacccgtctgctgtctacggctcgcactatgggtcgtctgattggtatcgcggctccggcagcaacaatgtcctctccggccatttcttccgctgcaaaatcagctgctgctgaactgccaggctttggctctatcactggtcatacggaaggtgcagctgctgtcgctacagcacacactccggctccagagtccaccagcctggttgatgaagagatcctgcgtgccgctgaagctgagttcaagccggaaactaaaccggaagaagttaaagctccggaagccgccgcagctgcaagtgcttcagcatctgctgccgctgcatctgcaccagctgacgaaggtctcgacgacctgctggctgaactggacgctctgtaa

SEQ ID NO: 193454 - DNA, 267 bp, Klebsiella oxytoca; identical to SEQ ID NO: 86104

SEQ ID NO: 193455 - DNA, 201 bp, Klebsiella oxytoca; identical to SEQ ID NO: 86102

SEQ ID NO: 193456 - DNA, 831 bp, Klebsiella oxytoca
atgaagaaaggtttactggcggtggctttggctgctatttgcacaatgggtctgaccggctgcgatcgcgtggaaccgggatacgttggcattaaggtaaacaaattgggtgaagacaaaggtatcggtgaagttgtcggcgttggccgtcagtggactggtctgaataccgagctgtacaccttccccactttcaaacagatgaaaacctacgatgagccgttcacattccagatgagcgacggtacagccatcggccacaaaattggtgtggcatatctggttaatcgcgacaaagtaactaccgtattccagacctatcgcaaaggtgttgatgacattaccgacactgatctgcgccagaagattgcggactcactgaaccgtctggccagccgcatgactaccgacacgttcatcgacggtggcaaggcgtctctgctcgacaatgcgctgaaagacattcaggcagaaatgtcaccggtaggtattgaggttattagcctgtcatgggtgggcaaaccagactacccggacactgtcatcgaatctatcaatgccaaagtgaccgcgaaccagaaaacgctccagcgccagcaggaagttgagcagcgcaaggcagaagcgaacatgctgcgtgaacaagccgaaggtgaagccgacgctatccgcaagcgtgctcaagcagaagctgatgccatcaagttgcgcggtgaagcattacgtcagaacccgaacgtcatggagttggaagccatcaacaaatggaatggccagttgcctcagtacatgactgaaggggctaatactccgtttatcgcgttgaagtaa

SEQ ID NO: 193457 - DNA, 372 bp, Klebsiella oxytoca
atgaaaaattacagcgagatgacggactttgagattaactgcctggtcgcggaagccaccggccatcgaccgcttatctcacaatatggctggaaaggctcacaggaaggcgattacacagcagtggtcgccatcggcccgaacggagccggaaccttcgactggtgtaacgatccggaagatgcgtgggacattatttatcgacacagaatcggcgtaatccccgccagacagcctggcgagtggagagcggcccacagaaaggtggatagctcaacgccacaacatctgatccagaaccctaaccctttcagagcggcaatgaccgtgttccttttaatgcaggagaaaaagcgtgaagaaactgtatga

SEQ ID NO: 193458 - DNA, 411 bp, Klebsiella oxytoca; identical to SEQ ID NO: 112347

SEQ ID NO: 193459 - DNA, 276 bp, Klebsiella oxytoca
atgaagattttggttcgaatttcagccagcaccgactatgacgtttacccgctattcatggtcaagtgcgatgggctgaacgatgaagaaattcaagcggcaattgagcgcaatctcgttgagtacactggcatggatgcagattctgtgtatgtcgacgatgacggtgtttgttggcacaacggtagttgctggtacgtcgacgacacgatgccggtaagcgatgaagacgcggctcatcttgagcgtatcttaggcatcagcacttttgagtga

SEQ ID NO: 193460 - DNA, 180 bp, Klebsiella oxytoca
atgaaaactgtattagacactttattacttattgtctcgatagcttttgtgctcgattgcatcttcaccggagcaatccgtaaagcgctggcgcctgttaatggcgcgatggttaatgcgctggccgtagtgctggtattcgactcagcattcggcgttatcaaaggagtcgtggcatga

SEQ ID NO: 193461 - DNA, 336 bp, Klebsiella oxytoca; identical to SEQ ID NO: 86096

SEQ ID NO: 193462 - DNA, 213 bp, Klebsiella oxytoca
atggcggttacactggcaggtctggaaatcgaaaaaacaagtggctactggcgtgccaaagggtttaagcagaccggcgtgctggagcgtctggaacgtgaggacggtgtcattgtccaccagcgtcgcgaatggcgcatgtacgatccggaaacaggtaagctcacgacgaaggccgggacactctggggtctgctgaagaaaatccactga

SEQ ID NO: 193463 - DNA, 1056 bp, Klebsiella oxytoca; identical to SEQ ID NO: 86094

SEQ ID NO: 193464 - DNA, 645 bp, Klebsiella oxytoca
atggatctcaaacgcacgcgctgggttcgccgtcttgaagatggctcctacaccattgaatcgaacactagcctgaacaaacagaagttgctctgcgacctgtgcggcattgcgtcgaagtgcccgattaacgaaacccggctcaaactccacgacgccggggcgcacttccacctgaacagctgcatacgttacgtgccactgctggcatttcgtaaaccgatcatcggattagacgcaccctacttcaacacactccgctctggtgtaacatggcgagaccgggtcgaacctggcaagctcgtttgtctggttgaggctgatactggaaatatcatccggttcgggagagtcgataaggtctactccggcccggtggatgagatgctgcggaaacacagccggtttaaccatctctgcatgggtggagagaagatcgagaaggttggcgaagtgatccgcaaatcctacggacacttcctgaacgacgacagccttcttacggccatctacattcgccatgtcgatcgggagttcgatacggagtatcacagtgctgaagagttgaatcttgtcgaccctcgcccaaaagctggggtaatcgacatcagcgtagcgcgtcagaagccctctgagacgttttaa

SEQ ID NO: 193465 - DNA, 495 bp, Klebsiella oxytoca
atgagtgaattttattcaagggcagcaactgtggcagacatgccatttatcatgggtgagttcgaagacggcgcacgcaagggtcacttctacgaagagatcctcacatcaaagggtggtaaaacctttgagaagcagaccaggctggccatccagacgaacgagcagggccaatactccgggcattatatctacatcctgctgcgccgttctgatgacaaaaaagcagggctaatctggttctgtgccgcactcgatccaaccggtgcgccacgacttgaactccgtgccgtcagtatcgtcaaagagctgcgcgggaaaggctatgggtcaatgctggtgtccgacatgatcgattcaaacccgagccagccgatgatggcgaagtgctacgtcaaatcctcgcaaatggccgacatgctaaaacgcagaggttttcaccttttcgacacgtcacccaaaggcacgcagatgctgtttcgcgatccaaagtaa

SEQ ID NO: 193466 - DNA, 504 bp, Klebsiella oxytoca
gtgaaacgcgtaattatagggacgatggccattgctctgatcggatgcgtgccaaagccgcctcaagatgaaaagtcagctggcgggtacgttgatatttattccacttcaagcgtagctattgcccaagacagagccgacaaattgtgtggaagccatgcctattatgtctccaacgacaatgatttaaccaaagtcatgggtaaatacgcgccttcattcccaaaaatccgtttcaactgtgatcttgaaatggccgcttatctcggtagcaaagaggcaaaggagatcaagatgaagcgcatagaggaagcctacaaggagatgtacaaggcccaatatgagctgaaagaagtgcgccgtaagaacgctgatccgaagaagctggagtcctacacagaacgcgatcctgacggcactattcgcagctacagcttcttgaacggcaagtcgtgcgaatccatcgtatacccagacggcactggcaaaacaacttgcgattaa

SEQ ID NO: 193467 - DNA, 1086 bp, Klebsiella oxytoca
atgacattgccatacggggtgatatcagatccccattatcatcgttgggatgcttttgcgacaacaaacgctgacgggctgaactctcgactggagatccaactggacgccacgaaagaagcagccaaagccatgaaagctgcgggctgtaagtacatgctggtggctggtgatactttccatgttcgtggtgctatatcaccttccgtcctgcatttcgtgactgaaacttacgagtggatcatcaaagagttgggcctcgaagtggttatgctggccggcaaccacgacctcgaaaccaacgattccgtatacagcgccaatgcagcggcctctctgcgctcaatcggtgtggaaatcgtctgcggcaaacgtcctcactccatcaaagtgggcgacgttaccgtccatctgattagctggcgcaataaccacgcagagcttatcagcgacctcaaaacactgcgttccgggctggatggcgacaaccacgatgtcgttgtgcatacctcaatcaacaaagcgatccccaccatgcctgatgtcggcatcgacgcacaggaactgaaagatatcggcttccgtttgttgctgtccggacactaccacaaccacaaagaagtgctgcctggagtggttagcatcggggcgctgacgcaccagaattggggcgatgttggctcgctggctggcttcatgatcgtcaaccctgacggcacattcacccaccacgaaacctccgcacccaagttcgtcaaccttgaggacgatgtggaagacgaccaaattcgtggtaactacgtgcgcttccgtgccgttgtggagagcgatgaagagggcatcaaaatccagaacgtcctgaaaacaatgggcgcgaagggtgtcgtctgcaacttcatccgcaaggcatcgatgatggaaggcactgccagtactgcggagaccagcaaaatagacagcctgggcgagtccgtcgcggcgtactgcaagatcgttcacgacactgacggcggcttcgacctgagcaagctggacatgctgtgtcaggagatcctgaccgaagcggagagtgcggaggcaatgtga

SEQ ID NO: 193468 - DNA, 162 bp, Klebsiella oxytoca; identical to SEQ ID NO: 112338

SEQ ID NO: 193469 - DNA, 1917 bp, Klebsiella oxytoca
atgaaatttctaaagctccaggttgagaacttcatggcgttagccagcgccgaagttgagttagaccaacgcggtctggtgctcattcagggtgttaacagtggcgactcttctgctgccagcaatggtgcgggcaaatcgactttgatgaacagcctgatgtggtgtctgtatggcgaaactgcgcatggcgtcaaaggtgacgacgtgctgtctacaggtcacgagaaaaactgtcgtgtgatggtgactgttgaggatgaaggaaagcgttacgccatcattcgccaccgcaaacacaaagagttcaagaaccggctgatcgtccgtggcgaagacggtgatatgaccaaaggcaaagacacactgacgcaggagttcgttgaacgcctgattggtgcatcgaaagaggtgttcatggcgtccatctacgccagtcaggaagcaatgcctgatctgccgggtatgtccgacaagaacctcaaaaccatcgttgaagaagccgctggcgtcgaccggttaacgcgagcctatgccattgctcgcgagcgtgctaatgcagctgccgcacgcatggatgttaccaaatccaaaatggacgcctgtctcacgcttatcgagaccgcgcagtcagagattgaggcggccaaagcgtcctctgatagttgggagcgcgatcgcggcgaacgtctggacaaggcccgcgtcgatttggctggcgcggaggtaacgctgtccgaagtcgtgatggaaattcgctcgctgccggaacagatccgggatacggaaaacgcgattgctggcgaacgcagcaagctggcctccaaagaagagcatgacgccaaactgctgaaggtgcgcggtgcgattacggagatccgctcaagcatccgcacttcagaagcagcacagaacgagtcgatgaaccgtgctcgctcgtttaaaaccaaagcagaagaggttggcacaaaggtcggagcaccttgtgttacgtgcggaaagccctactgcgaagaagatttgtccaccgtaaaggagagtttcattgaacaagcgcgtaatgagatcggccaggcgcaggcatcagcagcggcagtggctcaacacaaagctcgtcttgagaaagcgctcgacatcgagtctgcactggtcgcagccacacccgacgtatcagaaatcatcgccagaatcgaacgcctgaccaatgagctaagtgcgctgcgtcatcgagaacgtgaagttgtggccgtcgaagcgatggtggcgcgggcacgtaccgacatgaatcgcattatggcagaggtaaacccatttctggccgttattaaacgtcatgaagacaaccttgctgccaataaatctaatcattcagtacttaaaaatgagttaaagagtattcaggagcaggctctgttgctggagaaagctcgccaggtttactccccagctggtgtgcgttcacacatcctgacctctgttacgcctttcctgaacatcagaactgcggagtatctcaacacgctgtcggacggcaacatcgttgccgaatggtcgacaatggagacaacgaagaaaggcgagtatcgcgacaaattcaatatcagcgtaaccaaaacaggctccagcaaatccttccagacgttgtctggtggcgagaagcgtaaggtacgcattgcgtgctctcttgctttgcaggatctggttgccagtcgcgccagtaagaatatcgagctgtttatcggggatgaaattgacgacgcgctcgacactgccggtctggagcgtctcatggggattctggaagccaaagcgcgtgaacgcggcacagtgatgatcatttcccacaaagagatgaaatcgtggttccgggaaaccatcacagtcgaagtcaaagagggtcgcagctatgtcgtttaa

SEQ ID NO: 193470 - DNA, 747 bp, Klebsiella oxytoca
atgtcgtttaacttgagccgaacgcagtttttgcagatgtttgccgtgatgcagtctataaagctgataaaccaccatacggcaaaagcagctgcgcctgcacttttgtggaaaaacgaaaacatcaatgacgaccagttctcggtattaaccagtctgttgtcatcgactccgttgatgccgagtttgtctatgctgccgtcaggaagcactgcgccgatccttattaatccatttacggaaggtggatatctcccacattctgggccggggttcgttgtgattcctgaaaccggaacgctgaacatccaagaaaatgcgctcttcaatgcgatggagacgcacatcagcaccgcattcactaatctgattcgacacgctaacgcacgcgcggatcacgttgcaatgccgggtgctgctttcgccagcttctctgttgactatgaccgacacgcgccaatttcaaagcgggcgaaactctgcttttacgaggagggatgtgaagtagcgattattgaagtacttctcccccatgtattcagcgcgaatgaaacggctgcacgccatctgatcgacatcatgcggcatttcatcggcgagagcatgatcgatgcagacattgctgcaggcgttctaaccaacgatagcattcacgttgttagcgacattccgaagccgccaactcgcgagccggaaaagacacttgaacagaaactaatggaatgcccaacctgggctacgtggtaa

SEQ ID NO: 193471 - DNA, 870 bp, Klebsiella oxytoca
atgaaatttacgaaactgaccgatcatctgaaacttgccgcagacaaactcgtgggatttaagcctgagccttacgagttgaatcctggttttggcaaggcaacggaaagcatctacttgatggttgaccagttccacacactgtttcagcacccacgccgtgccattccagatccggcattactgcgtctgcgtgccaagctgatccacgaagaagcagttaccgagggcatcccggcagccaaaaatggggatatcacggcactgctggacgcgatggctgacttcctttacgtgggcgtcggcacaatggtggccatcaaaggcggtatctctacaggtatgagctactacacccaagagcagagtgttgatcgcttcatccacaccatcatggttccaggcaacacggtctttgacgacatggccatcccgtttgaagaagcaaaagaagctgcattaatgctgaatgcgctggctgacaaactcgaagcgaagccgattagcgattccgaattggtgcaggagctgcgccgcgtgatgaataaaatctacgttgcctgcatgatgacctaccgcctggctgattttctcggtatcgatattgttgagctggtggcagaaatccatcgttccaacatgaccaagctgtggccggctgacgccgaagagcgtcgtgtggcggtagagaattgcaaatacgacaaggaagatctgggcttccgccacgctgaagggactgacatgatgattggcttcagagtttctgatggcaagatcctcaaatccccaacctacagcgatgtggatctgactcgctttgttgagaaggcgaaagcctcatctctttacgagatggtaaaaaaataa

SEQ ID NO: 193472 - DNA, 1104 bp, Klebsiella oxytoca
ttgtctaccctactgaatcgagactttacgaacggtcagtttgccagtggttcgtatgccaaagtggttgaaacggtgctcaacactggcgttcacgcgggtgatcgcaccggaaccggcacaaaaagcgtttcatatgtcccttcctactacatgctgacgggcggctctgttccacttatctccggaaaagccgtcaacctgaagtcgttactgattgagctggagtggtatctcaaaggaacgggcaacatccagttcctgaaagacaatggcgtcaaaatctgggatgcctgggctgatgaaaatggcgatttaggcccggtctatggcaaacaatggcgtcggtgggaagatacccgcatcgtgagccatagcgagtatttgagcaaaatcgacacgttccgtgagcgcgggtacaaggtcgaggggtatctgggcgtaagtgaagatcgcgttgtgttgtcccgtgaaatcgaccagctacagcgtatcgttcacacgcttcgcaccaacccgacagatcgtcgcatcctgctgaatgcctggaatgttggcgaactggaagatatgaagctgccgccatgccatttcgtgttttcactgtggagtcgcgagctggactttgagacccgactgactatggccaccgacattggcatccagcacaaccgccacggccacgagtccatttacacccagatgctgtgtcttctggaaagagatggtggcattactgagaacatgctggacgagctgggcatcccgaaacgcattctgaactcatgcctggttcaacgcagcgtcgatacctttgttggtatgccgttcaacatcgccggttacggcattctcacccacttcctcgcgaagatcaccggccatatggctggcgcattcgtgcattttggctttgacgttcatctctacgacaaccacatggaaggcgttgaggagctgatgaagcgcgagccgcccaaagagtccgacccggttgtcatttttccgcatgaatgggtcgaactggacgacttcaaatgggaaggtgtgcaggtgtgcggctacagccctcttccgtggatcaaggttccagtggcggtgtga

SEQ ID NO: 193473 - DNA, 396 bp, Klebsiella oxytoca
gtgttgtgtgaaattgaaggtgtgctggcgagagccagcaatcgcaaagcagtgtctgatgcggatgcaggcgctctcattgccggtgatgaactcatctttcccaccagccgcatgttgcgtggttttgctcgctccggtgctgaagtggtgcttatcagtagtcgtccggaagcgctcgaaggcccaaccaaacgctggctgaaggacttcggcattgattatgactggctccacctggttccgcgcggtgtcagttttgaaacccatatcaagcgcacgctggcagagcacaaaggcgacttacttatcgccgcactggttcatgatccgcgtctgcgttctgcgctggcagattctcaccagcgaccaaccatctatgaggtaagccaatga

SEQ ID NO: 193474 - DNA, 477 bp, Klebsiella oxytoca
atgaagatgattgcagctgtcggccgcaactatgaaatcggcattggcaacgaacttccctggcgttgcccgaccgatctgaaactgttcaaacaactcaccaaaaacgccactgtcgtgatgggacgcaagacgatggaaagtctcaagcgcccgctgccagagcgccataacctcgttttgacgcgctctcgtgggtatatccccaatgggttctaccccgctggcatcgatgacgttttgagactgccagatccggtatgggtgattggtggcgggcagatttactcgctctttatgccacacgtagaagagatctggctgtcgcatattggcgtggatgtgccgggcgcggatgcgttcttcccggcgccaatgatgcgttctttagggttcgtaccagtcgaaactgcttatacccaacgtgcaaatgaggatgagcctggctttttgcagatcgtatacagaaggtcgtaa

SEQ ID NO: 193475 - DNA, 645 bp, Klebsiella oxytoca
atggattaccggattggaatcactggcgcacagggcagtggaaaaacaaccctggcaaaatacatcgatgcgcattatggcattccgtatgtggatgccggtgttggcaagctgatgagcagtctgggggtgaaggttggcgagcgtttgcctctttacgaacgtcttcaggttcagatggagattgccagacacatcgagatgatcacccgcggcgttgaaggttttgtcatcgaccgcacgccagccgatgtcatggcttatacgcttgacctggtcggccagaccaacgaagaccgctgcatcgagctggctctcgacattgagcagttttgccacaaagcggccatttccaacttcaatgctatagcgggacttcgcccgggcgttgagctttccagcaaagatctcgcgcgtccccagcgaggatcgcttgaccgtctctatgttgctcgcatcgatgcacttatgtgcggtgagctgacgaaaatcaacacgcttccccaaaccggcgatctgcaggtgttcgttatctctgaaaagtgccgcacggttgaagcgcgagccagatcggtattgcgagtgctggacagagccgctgaaaacatcgagcgccgtataacaggacgagtgaccttccactga

SEQ ID NO: 193476 - DNA, 420 bp, Klebsiella oxytoca
atgatagatgaacttcccctctcggatgaattagatcgtaaagcgattgaagcactgatccgcattgctgacgaacaatcccgctctttgatgagtgaacgtgaagcacgtctggctatccgcgcagtgtttgagtccgttcaagggcttgttggggaagaggttggcgaagccatcaatgtggcgatgtcgcagttcaatggcggcaccaagcgccctctgtttcctatgcacctcaaactctcaggcggtacggttttgtacgtgtccgtctgcctggagaccaaccaaatccagatcctcaacacatcaacgggcgaatggcgcgagccggtcgtctgcgaaagtggcgaggacgcactgaaaaaggctgctcagtttgtgcgtggcgcactgctgaaaggcgcgaagaagctgtaa

SEQ ID NO: 193477 - DNA, 543 bp, Klebsiella oxytoca
atgaccacgattgtcggtggcgtcgatattgagtccacagggctggacttcacatccggccacaaaattatcgaaatcgcgataacccgttatgaactggaaacccagaagcacatcgacagccttgagatgcgcttcaacccgcgtcgcagtatcgatccgaaggcgcaggcggtgcatggcatttcactggaagatctggcgacggaaccgctactggctgaccacgcaggcaagattgctgcatatatgggtgcatgtagcgcgttagttgcccataacggagaggcttttgaccttccgttcattcgccacgagttcggcagctatggggtgaaattgccggatatccctctggttgacactatgctagatgggctgtgggctaccgaagatgggaagcgtccacgcctagaagagctggcgttctcacttggcttcacttacgaccgtgagaaggcccacagtgccctctacgatactgagctgatgatgcaatgttttttcaaagctcgggaaaaatatggttttttcgatttttaa

SEQ ID NO: 193478 - DNA, 1107 bp, Klebsiella oxytoca
gtgaacattgatgtaaatgccattttgaacgatgcagtaaaagatatgcccatagctaacatcatcgtgataggaaagactggtgtaggaaaaagttctctcattaatagtgtatttcgtggagactttgcgagaactggggtaggccgccctgtaacagaaaatataaaagtaattaagaaagaaggcgtcccattacaaatcattgatactcagggactggaagtcgcggattacgataaaaccagattaaacattgaaaattacataaacgaacataacaatagtgaagaatcagagaattacgtccatctcgcttggctatgtattaatgacaccggtcaacgttatgaaaaagctgaactaaacatagccaagtttttgataagtaaaggaataccggttatagtagtactaacaaaaacaaacagcttcaaaaacaatgaatttgcgaaagaagttgagattgcatttaaaaactatagccatgcagtctgtctgactcgtgcgattgaagaaacgatttatgatgaagatgaaccagatgaaatcataggaaaaagaaaggttagaggcatagatgatttaatccaaacatcgtatgaggttattccagaagcacaaaaaaaggcattttccaatgctctttcaattaagaacaaaaaagcattggatataaaaaaagagcaagctagtaaagaggttattgccgcaacagtcctcgcaggtgcggccgcagcaaccccagttccattttcagatgcatttaccttagtgccaattcaagtcacaatgattgcaaaaatcagttatacctttggaatggatgtatctaaagcggcattaacaacaatggtaacgtctttaataggtgctggtggtgcagtttttttaggacgaacaattgtcacagggctattaaagatgatacctggtgtaggaagcctcgttggaggggcgatttctgcaacaacggcaagtgcaatcacaaaagtcctgggtgatacatacgttctggttctgtacaagctcgcaacagagtctaaaaccggagaaattgattttgaaatggcagccaagttactgaaggcaaaagtttcattttaa

SEQ ID NO: 193479 - DNA, 135 bp, Klebsiella oxytoca
atgaaaaaaaatcttcaaaagcgtgaggtaatttattgtaattacctgaatttattcgttttctacctgataggttttgccagaatacgctcaacacaaacgcggaaacgcaccaacgaaaacataaggagttaa

SEQ ID NO: 193480 - DNA, 843 bp, Klebsiella oxytoca
atgagcgcagttaccaacactgttaaaaacgatgacctggatgaactgacagcaatgctgcaatctctcgacgaaccagttcagaacgctgcgaaaacgagcggtgtcgacgagatcgacgatcttctctctggtctggacgatgcaatcgcaaaaccagtcgaggcggtggcggatgaggtcatgaatgcctgctctaccggcgatctgagtagcgttctggaagagcttgagattgagcacgaatcggtgaaggttgaggaaccagaacgtgaccttattgcggaggtggtgaacgagccagtgcctgaacttgacgctcgaagtactgagactaccggtacagatccaactcctttaccttcagtggagtcagagcctaaacctgaagaagagcagccaaaacgccagaaggcaaaatcagagcgtgcgccggccaaacctcgcttcacgctggaaggcaaggacgaatcgttctatgcgacagccggtctggaaagtgagagctttactgccgcatttgaaggagcgccagtcaaagcgaaagacaagatcttaaaccttttgaactggtttagtggtgggccggaaatcagcgtctacacggtaatcgcaatgcgccacatccttgacgcgaacacagcgaccagcaatagcattaaactgtcgctaatgagcaacccggagaaaccatacccgctcaacacggcttcgactcaggctggccagatgatggctgtgtttccagccactggcatcgccaccagggaaggtggaaatctaacccttaataaagagtcgccgatcgtcaaaaaattcatagcggagtattccattggatga

SEQ ID NO: 193481 - DNA, 594 bp, Klebsiella oxytoca
atgatcgcagccgaaaaaatcaaaaagcgagagcgtgatgcctctcttcgcgacctttggcgcacaccgcagtggttgtttgtcgccatccaacgttacataggcgtaaagttcgatgtggacgtcgcctgcaacaaagataatgctctcctgccgaactttatcggtgttgagcgtgatgcgctcaagtgcagctggggagaacctggcactgtggcgttccttaacccgccctactccaaaatcaccccctggatagacgcagccattcgcgagcaggcgcgtggagtgacgacggtcatgctgataccacaatccctcgatacgcagtggtacgaacgtgcggctgaatgcgccaacgaaaccgtcatcttgtctggcggccgcgtggcgttcgttgagccggatgttgaacttgggctggtggaggtgaacatcaaccctggtggcagcatgttgcttatcttccgtggctactgtcaggaagctgggcacaccatcagcaagataccgctggcggtgatgaaaaagctgggtggttatgatcctgccaatgttgtcaggaagaagagaccacgtaaaaaggcagcgtaa

SEQ ID NO: 193482 - DNA, 231 bp, Klebsiella oxytoca
atggtatacccgacgaacgtcgtagcgctcgttgagagcgattttctggccaaagtgcgcgacatgatgaaagatcgcgataaggctttcagtctctacgaatggtcgctcaaatgtcttcattcaggcgagcacaaagagctggtggagcagctgttaggggaactcatcaatgaggtgtttgccctgaacgtccagcttcatggtcgagaaaataatcaatcgaaataa

SEQ ID NO: 193483 - DNA, 609 bp, Klebsiella oxytoca
atgacgaccaagaccccagcccggcaacaaactggctgccgccaaaagtccaaagccagacaccaaacccaccagcaatccagtaccaacttcaaaacccccgtagtcgagttcaatccccagctcaaaaccgtaaaagtattcagtgatggctcttgcctcaaaaatccgggcgggccgggcggttacggcatcgttctccagtatcgaggcgaagagcgcgagctttctgagggtttccacagcacgaccaacaatcggatggagatgatgggcgccctgattgcgctggagcgtctgaagtacccctgcaatgtgatcctgcattccgacagccagtatcttaaaaacggcatgacgctctggatgaaaggctggaagcgtaacggatggatcacgtctgagaagaagccagtcaaaaacgtcgatctctggaaacgtctcgatgcggccgccagccgtcacaatgtccgctggaagtgggttaaaggtcatgccggtcatcgcgagaacgaaatgtgtgaccgcctggcgaagatcgccgcctactccgcagctgatatgcctcacaagcgtgacattggatttttgtcacaaaatgataggtag

SEQ ID NO: 193484 - DNA, 495 bp, Klebsiella oxytoca
atggcacgtcaaacgcctttcacttctttcaataaacgtccccgttcaattcgcctggttctggccgagctgtttagcggtcgtgtttctgcacgccttgcggaactggaagaacgagtgtttgagctggagaagcgcattgatgcgcaagctaccgccatagcaaatctgggtgcgacagtaggcatggggaaggtgcgtgattccgtcgcctctcgtgtgttgcgtgaatcccaagcacacaaggacagttctcatggaaaattttcaacgaaatcgactgaagccaatggcctacggagtaattttagcaaccctggcagcggtagccgtaccagccggtcagagtctgttgataccggacacaactacttccaccacaaccttgcagacgacacccctgccagaacgacctcctgtctctctggatgggatgctgctggacacgattctagctcgacctgcaactccggatcttccttctgctgtgactga

SEQ ID NO: 193485 - DNA, 2070 bp, Klebsiella oxytoca
atgaaaggtaacgttctaggggatatcagagcagaacacgatgccaaaatgcttgaagcctcattctggcaaacaactgattataaagctcttttagagtcgtatgatcgatgcatagttgtaggtcgcagaggcactggcaaaagtgcattagtgcatatgctgtcaaaacattggcacgcaaaacctaaaacgcatgtgatgaccattagccctattgaagaacaaattattggtctaagagatgttgtctcacttttcggtgaaaattatttgcatattaaagccggaagcaaactagcttggcgctatgcgatttatatggaattactttccgaaatagcaagccactataagatgaaaaatgatctagactataaaagtgtagagaaacacttattatcttggggagctaaaagacaaaacataagtggtaaaataaggaaaaaattaatatctatccttgatactggaaaagatgttaaaccggctacaagaatatcagatttatcagataattttgaattagatttactagaagaggttttattcgaagctatttcaaaatcaaaccatcaattcgttatttttgctgacaggctagatgaaggatacactccagatgatttaggggttgctatcgttgacggtttcattcagtctgttattgatataaaacaaaatttgcaagaaaaagttatcgcatttgctttcgttagagacaatatccatagagccatatctaaaatggaccctgattttaccagaaacattgaaggacaggtattaagattacattgggacgaatacaatctcttcaatttggtttgtaacagaatgagagttgcatttaactcaaccatagaaaataacacgcgagtttggaatgcgtacaccgctaatgaattacagtcaaatacgggttttaaagaagcacttaagcttacattatatagaccgagagatatcttggtattattaaatgatgctttcctgagggccgcaactcacgatcgcacaaaaataataattgatgacataaaagccactgcaaacacaatatctcaaaacaggcttaacgacttactaaaagaatatgaaaatgtattccctgcactagatatatttacatcgctttttggcaataaaagaccagattttaccatcgcggaagcctctgaaataataagccaagcatttgatataaaagaagttaatgacaaaatgaaattacaggacatccttttgtttgaaggtcctgttcaggtgatccaacgtttgtatagtgttggtttttttggattatacaatcagcagtcctcatcatatgtgttttgtcatgatggaaaagaaccagaaaaagagtttacaccaggctccaagcttctgctacatccttgctattggcttgcattaagtgtacatgagtcagacattactcctgaaacagctgacgatatccacgatgaatacgatatcgaagttagctccgtatcagaagaacaacgaaaacaacggatcggtgctcttcttcaagaattaaataatatcccagaaggtaaggaaggggctgttgattttgaagcatgggctttgaaagctattaaaatattgtttgcgacgaatttgaccaatattgaactccattcaaacaaaaatggtctacagcagcgagacattattgcaacaaaccttgccgacacacctgtctggaaaaggatattgactgattaccaatctcgacaagttgtattcgaaatcaaaaactacaaaacgttaggtgctgatgaatatagacaagtaaattcatatttatttaaagattatggtaggctagctttcattataaatagggatcactctgaaaacttagaaaaacataaagagctaatctgggtaaaagaactttatgacaaccataacaaattggttataaagttgccttcaaaatttcttgagcgacatctttctaaaatgcgtagccctcaaaaacatgatgaagttaacaaacagctaagcaagttgcttgatctatatattagaagctatttaaataacaagtgtaagtaa

SEQ ID NO: 193486 - DNA, 942 bp, Klebsiella oxytoca
atgagattaaaatactcagcactcttactcgccgttgccattacaggctgtgataacaaaaaagacgtgatcggttgttcctctgaaatgacccagtcagctctcatggatttaataaaaaaatctgcttatgaagatctctctgaacaggtcgacaaataccctgacgtcactaatcagaccaaacgaagcgctttggacaagattaaactgaccatctctgaaatctccacaacttcaagtgacacgggcagcacaatgaaaacttgtgaagggaccgtgacgatgaccctacctgcgaacgagtacgcacagctttctgatgcttacagaaagaactttaaccgtaatctcgacaagcaaatggaaagcctgtctttggataacaacgcaaacgccttttcaaaacgcatctcctacaccgcacaggcaaccgacgatcagaaaaacgtttttgtgaaagctacttctaacaacccaatatcagtgggtgccgctgcactgacatcgctttccatcatcaacccgatcgttgagcagcaaaaaatccagcaggctaaggatgcccagcgaagtcaaattgaagcggaacaacaagcacaactcagggcgcagcaacaggataaatatgaggcggagcagcaggttcagcaaaccattcaacaacaatcctaccagcagcctcagcaacaaaaagctgacaaccttgatcagtcccgaatggcttttgcgaatgctgactctgatttgaataccgcttggagcacattaacaccagagaagaaaaaagagttgctgccttctcagcgccagtggatcaaaactaaggacgctatgtgcggcaaagtttcaatgcagggaacagatgctgaagtcaagaaaatggtcgactgccagacgcaaatgaccctttcaaggaccgcgttcttcagaaatcaatag

SEQ ID NO: 193487 - DNA, 405 bp, Klebsiella oxytoca
ttgaaaattactgaagcctacaagacagctattatcagcactgcgcacgttaccgcggaagactttgaacaactgccaattgcctgttttgacccaatcaccgatcgcggactgaactgggcacacggcacagaatatgattggattgttcgtgccggaatgcgtgacaatagctgggcagatgaactgcgtacattcaacatctccgaagcggcgatcgccaatatcaagatgatactggatgccgcttacgacgtggttcctgttgatcgtgatgccgagctgggtaagctacctgatcatctccttatagccaccgtatttgacaacataccagctgagttaaaggcactggccaatgagtggggatggatacggaagttagagagcagctctatgcgatag

SEQ ID NO: 193488 - DNA, 219 bp, Klebsiella oxytoca
atgtacaagcatttgaacatcagcatcaccctttgcggagaagagacatttactgacgaactccagatctctctggatgacgttatccgctctgcggatgtcgctgggcgcattggtacgctgattggcgaagggtatcgcgagggcacgtttgattttcatatcgaggacaacgcaatgtccgtcgcgtggaactgcaccacgtcagagtccagataa

SEQ ID NO: 193489 - DNA, 213 bp, Klebsiella oxytoca
atggatatgcctgtgattgtggaagtatggagcgtggactcgctggctgagtgtcttgatggcgtagggccagcactaacccgtaaattatggtcgtttgtaccagctaagggagagtcacccaaagggaaggatgtttggcacctgctgactgatgaagagaagcgggagctggtggccgcagtgaaagaggagttccctgacgaagattaa

SEQ ID NO: 193490 - DNA, 255 bp, Klebsiella oxytoca
atgcctgatttgaagatcgtagagctgaagccatcgaaagagactgacaacaataacgttgaagtcatccgcctgctggaagatgcactccagtacgccagagaaggcaaaagccagagcctggcgctgctgatgatcaataacgacgagagtgttctggattgctggcataacggtgggcgcccatacgtcatggttggggcgatagaatcgcttcgcctggacttcatcaatgccaatatcgagcgcaggtga

SEQ ID NO: 193491 - DNA, 207 bp, Klebsiella oxytoca
atgcttctgctgttcatcgcgagctgcatgataagtggctgcgtgattaagacacagacttccggcgtgctgttttgcgatgcagcaaaccctatttatgtcagtaacgacgactgtatgaccgaagagacggaacgcgagatcctcttccataacacgatgggggagcgattgtgcaactggcaggacaggcaagccttgaattaa

SEQ ID NO: 193492 - DNA, 525 bp, Klebsiella oxytoca
gtggccgatctgaccatagagatgttttcagcacaagccgtttacgatttttcgggcttcgactgcggcgaaccatctctgaatgatttcctgcaaaaccgcctggtacagcaacacaacgggcgtatattacgtggctacctgcttcttaccaaagatccggtgccgaaagttaagggtttttacacgctatccgggagctgttttgcaagacagacgctaccatcgaacacccagaagcggaaaatcccctacgcagatgcacccagcgttacgcttggccgtctggcaatagatatcagcctacagaaacaaggctacggggaggttctcgtaacgcacgcgttgaaggttgtttatcaggcttctcgcgcagtaggcatatacgctttgtttgtggatgcactaaaccaaagcgcaatgcagttctatcagaagtttggattcatccctttgacgggggcgaatgccaactcgcttttctaccccacgaaaagcattgaagagctgtttgaagcagagtaa

SEQ ID NO: 193493 - DNA, 270 bp, Klebsiella oxytoca
atgtcagcactgaaaaaacagcgcatcgatctcagattaaccgacgacgacaagagcatgatcgaagaagctgcggcaatgaccaaccagacgattactcagtttatggttgccagtgcctctgaacgtgctgcggaagtgatagagcaacatcgccgattgattcttagcgaagagtcctggaatctggtaatgaatgctatcagcaacccgcctgcaccgaatgataggctgaaacgagctgccaagcgtctacaaagcatggagtaa

SEQ ID NO: 193494 - DNA, 2439 bp, Klebsiella oxytoca
atgaaaaccaaaacctccgatgctttactggctgctgaggtgagccggcgtggtttaatgaaaaccacggcgattggcgggctggcgatggccagcagcgcttttaccttacccttcacgcgcattgcccaagccgcagataacctcaatcccgccagcgaaacggtcacctggagcgcctgtacggtgaactgcggcagccgctgcccgctgcggatgcatgtggtgggtggtgagataaaatatgttgaaacggacaataccggcgacgatagctacgacggtctgcatcaggttcgcgcctgtctgcgcggccgctcgatgcgtcgacgcgtctacaacccggaccgcctgaaatatccgatgaagcgcgtgggcaaacgcggcgagggcaaattcgagcaaatcagctgggaagaagcgtttgatactatcgccagcaatatgcagcgcctgataaaagagtacggtaatgagtccatctatctgaactacggaacgggaaccctcggcggaaccttgactcgctcatggccaccggggaaaaccctgattgcccgcctgatgaactgctgcggcggctatctcaaccactatggcgactactccaccgcgcaaattgccgcgggactgaactacacctacggcggctgggccgatggcaatagcccgtcggatatcgaaaacagcaaactggtggtgctgtttggcaataaccccggggaaacccgcatgagcggcggcggggtgacctactacctggaacaggcgcgggagaaatctaacgccaggctgattattatcgatccacgctataccgataccggcgccggacgcgaagacgagtggatccctatccgcccgggaaccgatgctgcgctggtctccgcgctggcgtgggtgatgattaacgagaacctcgttgaccagcctttcctcgacaagtactgcgtaggctatgacgagaaaacgctgccggaaggggcgccggccaatggccactataaggcctatattctcggtcagggcaaagacggtatcgcgaagacccctgagtgggcatcgacgattaccggcattccccaggcgcgtatcgtgcagctagcgcgcgaaatcgccagcgctaaacctgcctatatttctcagggctggggcccacagcgccatgccaacggtgagctggtctcccgcgcgatttccatgctggcaatcttaaccggcaacgtcgggattaacggcggcaataccggcgcgcgtgaaggttcttactccctgccttttgaacgtatgccgacgctggataatccggtggaaaccagtatttccatgtttatgtggaccgatgcgattgagcgcgggacggaaatgaccgcgctgcgcgacggcgtgcgcggcaaagataagctcgacgtgcctattaaaatggtctggaactatgccggtaactgcctggtcaaccagcattcagagattaaccgtacccatgacatccttcaggatgacaagaagtgcgagatgattgtggtcattgattgccatatgacctcctcggcgaaatatgccgatattctgctgccggactgtacggcttcggagcagatggattttgccctcgatgcctcctgcggcaacatgtcatacgtgatttttgccgatcgggccatcaagccgcgttttgaatgcaaaaccatctatgagatgaccacggagctggcgaagcgcatgggcgttgagcaacgtttcaccgaaggccgctctcaggaagagtggctgcgtcacctctatgagcaatcccgtaaagcgatcccggcgctgctgccgtttgatgaattccgcaagcagggaatcttcaaacagcgcgatccggaaggccaccacgttgcctataaagctttccgcgaagatcccgtcgccaatccgctcacgacgccgtcagggaaaattgaaatctactctgcgcagctggcggaaattgccgcgacctgggagctgaaagaagaggatgttatcgatccgctgccgatatacagccctgggtttgaaaactatgacgatccgctggcgaaaaagtatccgctgcagctgaccggttttcactataaagcccgcacgcactccacctacggcaacgttgacatactgaaagccgcctgccgtcaggagatgtggatcaacccgcttgatgcacagaagcgcggtatcgccaatggcgatcggatccgcatttttaacgatcgcggtgaagtgcatatcgaggccaaagtgaccccgcgcatgataccgggcgtggtcgcgctgggtgagggggcctggtataacccggacgcaggccgcgtggatcaggctggctgcattaacgtgctgaccacccaacgcccgtcgccgctggcgaaaggcaatccatcgcatagcaacctcgtccaggttgaaaagctgtaa

SEQ ID NO: 193495 - DNA, 516 bp, Klebsiella oxytoca
atgaacaataaacgtgtggctctggtgacaggcgcttcttcaggcatcggcgaagcgacggctcatcaacttttagcggcgggttataaggtttatggcaccagccggcgtggctctcaggcgggtacacaccgctttccgctgctgacgcttgatgtgactgacgatgcttcggtcggggccgctattgacgatctgctgcgcctggaggggcggatcgatattctggtcaataatgcgggctttggggtcgcgcctgccgccgcggaagaaagctctattgaacaggcctggagcattttcgataccaactttttgggcatcgtcaggctgacgcgggctgtgctccctcatatgcgccgtcagggcagcgggcgcatcatcaatatcggttcgattctcggggtcgtgccgttgccgtatgtcgcgctttatgcggccagcaagcatgcggtcgaagggtacacgggagcactcgaccatgaactgcgcacccagggcatcaggtttccgtga

SEQ ID NO: 193496 - DNA, 1227 bp, Klebsiella oxytoca
atgccgaagaaagccaaagaactcaccggactcgcagtttctaagttaaaaaaagaaggctcttttgccgtcggtggcgttgacggcctgtatcttcggaacagaggtcagtctcgtgcatgggtgctttgtgttgctatgggggtaagagttaacgctctcggaagaaccgttcccagacgtttgtatatgggtcttggcccctaccctgaagtttcattggcagaagcccgtgacaaagctcgtgagctacgtaaacaaatccgtaatgggattgacccccttgcagagaagcacgcccataaagcacagcaggaacaactggcgcataagaacaaatcctttgccagttgcgccgaagacgtcatctcaattaaggccaaagagttaaagaaccagaagcatattgctcagtggcggtccactctggaaacctatgcttatcccgtcattggtcaaaagcaggttagtgaaatcacgaaaactgatgtgttggcgatacttgagcctatttggttaacgaaaaacgaaacagccagtcgtcttcgcggtcgtattgaagcgatcatcgattacgcaaaagcgaaagaatattttgaaggtgataatcctgctgcatggaaagggatgctcaagccccttttgccaatgccaagcaaggttcagacccaaaaacatcatgcagctttaccctacagcaagatcggttcgttcatatctgatctacagaaacgggctggaacttccgctcgcgcacttgaattctcgatactagcggttgcacgttctggtgaagtccgtggcgctgagtggtcagagatagatctgaaaagtaaaacatggactatcccagccagcagaatgaaggccagcaaagaacatagggttccactgtctgattctgccattgccctgttaaaggatttaccacgcttcaaagacaataactatgtcttccctgccccgcgtggtggacaactatccgatatgtcgctattggctgtattgaaacgaatgggccatagtggcttaactcagcatggtttccgctctactttccgtgagtgggctggtgaaacaacggactatcaacgtgaggtcattgaacatgcgctggctcatcagctggcagataaggccgaagcagcataccaacgtgggacgttatggcctaagcgtgtggcgttgatggatgcgtggacagagtattgctttgcaagcgtctga

SEQ ID NO: 193497 - DNA, 195 bp, Klebsiella oxytoca
atgcatagcaaacaaattgagcaacaactgctcctgaaaagagcacgtcgaatcactacatctttgtgcatagatgtgcctaccactggctcgaaagaagaacgtaaacgtgccatgaaagcacaacatgcgaaaatggtgaaaaaactaaacgaacaggatgttgtagaaccgatagcgatatcgcattattag

SEQ ID NO: 193498 - DNA, 519 bp, Klebsiella oxytoca
atgcctgccaacgtttgttatcatattgattttttcactggttcatatcgtagtgattcattcagcgattatcccaaacttcagacatcgcctcctgctttaattgacgaagctgatttactgtttgattttattactgcagtgcaggatggagatatactcagcggtaaaaataaaccatcatggactaatacttatggtgaagaaatgttacatctcataggttatcgggaatctgaattgtggcattatcatgttggcccatataattcctcctcatcagcaaatatgaataagaaaatccgtgagatgaatttacaaggtttaacatctgccgctgctgttcattataaatggtataatcgtttcaataaaaagaaaatcgttatcattgcttttagtccaatacacgaaccctttcccaaaaagttagataaacctaatcacctcaattcccgtggtggcttgatattaaataagaagatagtagaacattcagacaataagcttccagattaa

SEQ ID NO: 193499 - DNA, 453 bp, Klebsiella oxytoca
atgaacatctcaacagtaaacgagctcattcattcgctggagagtgcgggcgagctgtcgatcaaagagacaaaggttatggcgctggcgaaagcttaccagcagctggctgcggagaatgtggcgctgaaaaatccagataactggctatcacagagtgattacggctatgaggcgtcagaagtggctgcgggttacggtgcatctgaggatgaagtgctgcgtgccggaatgatcgcgattattaatcgaatcgcaacccccgccaccgatcgcatcgtagccgaagccgaggcgcgcggggtagagaagttcgcggcagagcagcgaggcgtagcggagcgtttgaaaaaacgcggcggtgatgtggtgatgagcagtattaaattctgtttagaaagtgcagaagaggctgaagttttcgcccagcagctgcgcgagggggccaaatga

SEQ ID NO: 193500 - DNA, 138 bp, Klebsiella oxytoca
atgagcaaaattcaaaaacctaccgtccctgattggatgcagccaacggctccgctcactgatgcgcagcgcgaggagctacggcaagccatccgtgcgtatatccgtcgccggaaagacgaggagcatgcagcatga

SEQ ID NO: 193501 - DNA, 747 bp, Klebsiella oxytoca
atgctatataaaaataatgttataaatctgtttgcgaagatggtttcttttttcttaaaaaaacctcagctttctctttcattaatattgttttcaatcggtacactgatgcttaatactaaattcagtacattggcaggagctgcattcggtgcgggtgcttcttttttaggtgcttgggtgactgaattaaatacgaagaatgcaaaaaaagaagaaaatgaacgaaaagaatttgaagctaaaaactttcttgctcctgaattaaatcgaataatagaacgggtgctttacattcactctcgctcaattacaaattttagtgcggcatctgttgaatattttaaatctccaataacccattccattaaacctaacgacttacaacaagattttctaccatatctcccagttctatatccgaatgtggagcagtttaaatatcttaaaggagaggatgctgttgctttggtaatgttttatgactctctacatcacttagaacattctgtaagagattggtgggggcgtgaaggacagcttcccgtaaatatttttttggatttcatgagtaatactgaaaaaagccttgagttagctgaagtctgtattgagtgttttgatatggataagagatttccgcctcgatattcctctagcggtactttgtcatctcgagttagcaactctagaaaaaattcagcacttaatttagatgcgcatatagaaagagcaagtagaaaataa

SEQ ID NO: 193502 - DNA, 966 bp, Klebsiella oxytoca
atggctaaaatattgatatcttacgcaagagaagacttttcaattgtacaaagactgattgcagagataactaagggtaatcatgatgtttatttggatcaacaatctattaaacttggcgatcctttccagcaagatatcagaaacaaactcaaaaatgtggatgtatttctcgcattggttactaaaaacagcgacaattcccacatctttaataatgaagtttcttcagccgtttcatatctatcgcatagcaatcgggaaaaattgattttacctgtggttttggataaagaatcaatcagtaatagtgaccttactgcattccaggcattatttggacgaactgatgattttgaaaaacttgtgcacgaaatagaaaatatcattggtcgttttgagggggttagacttgctcaagaagagataaatgcgtctagaggtaaggttcttgaggatgagtcaaccgactacatcaatgaaacaattgatgacctaaaaacacgagaaaaaactagccgacgacttgcttcacgatggcaccttgctggatattcagcgttggtattgtctgtcattttcgtatttattctttgggtgagtgtcgataattcatttacacaaccttcattagaaaccaatagaatagtattcgatgcaataaaaggtgtaacgattgttgcattacttttgggacttgccagatattcatttttacttgcaaaaacccatcagttggaagcacttaagaatgctgatcgtcttcatgccatttctttcgggaaattttatatgcgtgtattttccacacaaatctcacaaacagaaataaaggaagtatttcaacactggaatacctctggttcatcagatttatcacatcttgatgtcgaaaagattgattcacgtttagttgaggtattaagtaaggtctttgataaattagatataaagacaaaaccctaa

SEQ ID NO: 193503 - DNA, 339 bp, Klebsiella oxytoca
atgagaaaaacaatcggcttaatcgccatactgctcgcaagcctctccaccaccgcaacagctgccgacaacgtatatgtaaaactctcatgcgaaaacaacaccactgtagacatcacactcaagcaacaggaacaagtcggttgggccgacctgtctaccccaaacggaactcggagggctaagttcttcatgggtgcagaggataatgaaggggtgaacagcctgacattctccagtctgggcattgcgttcaacattgactacacagaggataaaaaattcacgctcaaaatgataagtggtggcagcggtgagtactcttgtaacgtgttatag

SEQ ID NO: 193504 - DNA, 552 bp, Klebsiella oxytoca
atggctacagtcggttacgcccgcgtgtccaccaccgggcaaagtcttgatacacagcttgaagccctgtccggttgcgagaagactttcaaggaaaaaatcagtggggctaaggatgaccgtccagagctacaggcgatgctcgaatttgtccgtgaaggtgacacagtacaggtaacgaaacttgaccgcctagcacgcaacacccgccatttgttggaggtatcggaataccttcaaggtaaaggcgtggcgttgaatatcctcaatatcggcatcaatacggccacaccgacaggaaaactcatgctgacgatgattggtgctatcgccacattcgagcgtgaaatgatgctggaacgtcaggcagagggtatagcactggcgaagctcaaaggtaagtataaaggcagaaaggccacagcccgcagcaaatcgcaggaagtaatcgagatgctgggcaaggggctgagcaaacccgaaatctctcgtcagctcgggatcggtatcaccagcatttaccggattgtgcgtacgcaatctgaagactaa

SEQ ID NO: 193505 - DNA, 1023 bp, Klebsiella oxytoca
atgggcattatgataaagcctaccaaagaccgaaatggcacctactacatccgcaaagcggttcctcaggagctacgtccagccatcggcaaaggcgagctaaaacgttcccttgagacgaaagatcttgagcaagccaaactcaaagcccctgccgctctggctgaaatcaacgcgatcatccagaacgcccgagcagagcgaaccgtaacgcaggacgacacagaggtgatcgcttcagtatggatgacaagaatcctacagcagccggaactcatcaaagcacgttatgtacagaaatacgatgagggttatggcctgaccgctgataacgggcagttaagcgagtgtctgcgtaaaggtgagcgggcagacgaagctgattttcggcttgtcacccaactaatgcagtcagaacttgaagaagcccttcggtggacgccagcagtactgactcctgcatggcgacaaaaactcgcatggcgtctggcggagcacaggctcagtacagcggaaatgtacatccttgatgaacttccatcatacgccgccattaccgccacacagaaacagaaaagcctgaccttcactgatcttttcgagcattacaaagcacatatacggctaaccgacaaggacagagctgagtcacgtatacgggattacacttcatcggctaaccgcttcatcaaatttattggtgataagcccatccgggacatctcgaaaactgacctgtcggcattccgcacacttatggagcaggccccggctaaccgcagtaaggccgtcaactcgctgtcgctggagaatcaggccaaagctcagggcaagaaactcagcgccagcaccgtgcggaacatcttcatgcacctgtctgcaatgttcagggtcgcactcgaagacgacctgctggatgaacatcctttcgacagcttcaaaatgcgtaaaaaagtgcaggcaatgaacgagcatactccgttttcctctaatcccctactaccgctagacccataccaatag

SEQ ID NO: 193506 - DNA, 279 bp, Klebsiella oxytoca
atgggggcgggtaactatttagtggtgggagataaaaccacctgtggcggggtgattactgaaggtgatgccacgcagacgatactgggtaaagcggcggcacgcgagggagataaagtgacctgcggcagacattccggcatttactacatcgcaggtggtatggcgaatgacatggtgaacgggcgaaaaatggcgggaacgcaggatagtcacagtacctgcccgtgccaggcgaggtttatcccttccatgatgaatgacaattacgaaagttga

SEQ ID NO: 193507 - DNA, 1248 bp, Klebsiella oxytoca
atgctgactctgacagcgactcggattcggacagcgattcggactcggatagcgattcagactctgacagtgactccgactctgacagcgactcggattccgacagcgactccgactccgacagtgactccgactcggacagcgactcggattccgacagtgattccgattccgacagcgatgctgactctgacagcgactccgattcagacagcgattcggactctgacagcgattccgattccgacagtgattcggattctgacagtgattcggattctgacagcgattccgattccgacagcgactccgattcggacagcgactccgactctgacagtgattctgactctgacagcgactcggactcggacagcgattccgactccgatagcgactcggattccgacagcgattctgatagtgacagcgattcggattctgactctgacagcgactcggactctgacagcgactcggactctgacagcgactcggactctgacagcgattcggactctgacagcgactccgattcagatagtgattcggattcggacagcgactcggattcggacagcgactccgactctgacagtgactcggattcagacagcgactccgactcggacagcgactctgactctgacagcgattctgactcggacagcgactcggactccgacagcgattccgacgctgacagtgattcggattcagacagcgattctgattctgacagtgactccgactcggacagcgatgctgactctgacagcgactcggattcggacagcgactcggattcggacagcgactcggattcggacagcgactcggactccgacagcgactccgattcggactccgacagcgactccgattcggactctgacagcgactcggattcggacagcgactcggattccgacagcgactccgacagtgattccgattccgacagcgactcggattcagacagcgactcggattccgacagtgattccgactccgacagcgattcggactctgacagcgattcggattcagacagcgattcggattctgacagcgattccgactccgacagtgactcggattcagacagcgactcggattccgacagcgattcggactccgactctgacagcgactcggattcggacagcgactcggattccgacagcgatatcgaggccatccccgatagcaacagcccggacgttgtcgcgctggaaggtaacctga

SEQ ID NO: 193508 - DNA, 189 bp, Klebsiella oxytoca
atgacaccagaggatgcggtacgatattgtcttattggactggagcgggattgtgatgacgccatcatcagtacaattataccgaaactccctaaagaggtcgtccatcttgctaaacgatggggctggggtgatacagaggttacagaaagtatttaccagttcttaaagcaagggtatgacgaataa

SEQ ID NO: 193509 - DNA, 519 bp, Klebsiella oxytoca
atgaaaaaaattattttcagtttatttgttttactactgccttttgcttcttttgccgatcctacagttttcggtctgacattaggaaaaacaacagaaaaggagacttcagacttatataatggatattcatcattaggtgaaaatatatacagccatggtaacatgtataatattcctgtcaaagatataccatttgacggtttaaaagaggtcaccactatttttgatggaaatggtttgttagtcgctgtattagccaaattccctaaagaaaaatttaattatatcaattcatctctcaaacaaaaatataaattaatttctcagcagattccatttgttggtaataaattcaccaaatattcaaatggtggtacacaaatactcttagatgctccacatttatcattcgaaatgacgcttagctatctacgaactgatttttacaatgattataaaaaacagatttccgttgaaggacagaaaaaatctgcagcagagaaaaaccagttatag

SEQ ID NO: 193510 - DNA, 846 bp, Klebsiella oxytoca
atgaaaagaagtgaaatcaggaaggcgattgaatcgtggtttgatattgagcattatgacgcaattgaacagctcaccctacagcagttttatgttgagattgagcggcgtatcttggcttacaaaatgttgcagaagcgcgatacattgccgcccctgaacagactcttgctggatgattaccgcaataagatccagagaggcgaaattttattcagtggcgatacatccacgcaggggcatgagcttgccagaacctacgctgttgtcccggtaacctgcagtaatgcgcaattatatgcgaaaagtttaacactgcttgctacccaccctgaaacatcccaaaaaagtcagtccgaatacctgtcggagtatctgaaggagtccgggataaaaagcctgtcttcgattactgtcgatatcttcctacaggaggcatcaactgaagacattattgaacacctgaaagtactcatccctcaatggaagaaacaactaaaaatgaatgctccggcagtgagggagtatcgatttggcaaaagtacattcagaaaaatcattgaataccgtcttatacccatgatggatctcattttttggggagcagataatgacggtataaaaattccactttccctgatgtcttcacttcttcatgaggacagtgataatgatcgtgatgaaggaatgctaaaggcaacggattacccattggcaatggcgttcctgacagatgaaaactatctgaaatcacttgaagattatatgatggaaaacaattacttaaaagacatcccggtttctgaacacgtcagagacgatacaaagaaaaaagcagccaagtaa

SEQ ID NO: 193511 - DNA, 255 bp, Klebsiella oxytoca
atgaaaaagagtaacaagcaaaactatatgaagaatgaaatcgcagggaaaagattaatccgtgttcctgaagtactcagtcgggttggatttagtcgtaccactttatatgaacgtattaaggaaggcagttttccagacagagtgaaaatagggttaagatctgtggcctttgttgaaagtgagattgacgcatggattgaaaaagtgattgctgaatctcgctgtgtatctgaatacaaccattttaaataa

SEQ ID NO: 193512 - DNA, 312 bp, Klebsiella oxytoca
atgaaaaatagaactattctgccatgtgtaataactgtcactaatgatgaaacggaaatatttatggaaatggctgttaataactttaaaaagcatcttcaagtcatgatcgattgtatgggcgatgattatgagcgtcattttaaagacagacgttatgttgaagatgtgattgtcaaagtgatcgaacgaacaaaacaagatttttctgaatcaatgaaagataataaaggtaaagaatgttatctgttcttggatgaggtgagaaggaatctgagagttatttacactgcgtatcgtactaactattaa

SEQ ID NO: 193513 - DNA, 387 bp, Klebsiella oxytoca
atgaacgaaaaatgtttaggctggaatgaaatacccgttaaaatatccgcaagtaatgctgatacagcaaactttgctactgatgttgtaaatacctataatgagttaatacattacttatactttaatctaaaggatgatgtgtttctgaagaaaatgaaggatggattttacagggagatattcataatggatattattaatctcacgctacatgaatggtttgaaagttctgaagagataaagattaaacacatatcagtccctgaggttaaaactatactaagtagctatcatgagtttttgattaaatgttttaatggtgatgattatattcttttttataaaaaaatagaaatcagcgcaaacaaacagtctgtaatataa

SEQ ID NO: 193514 - DNA, 288 bp, Klebsiella oxytoca
atgagtgaaaaactgataaaagaatcaaggaaaatattcctgcaccttgctgagttattttatgaaatgagaataaatacgctgaaggaaacacggcctgatgaagcagagatgttaatggtggatgatgcattcatggaagacatttataaagagtgcattaaaaatgcaggtgcaacttttaaaaaagtatccagagttgagtattatgagcaagggcattcagtaaaaatggttgataaggaggtggtattgataacactgcgtgttaatcataaaagaagatga

SEQ ID NO: 193515 - DNA, 324 bp, Klebsiella oxytoca
atgtctaaaaatattgaaattaaaaatacatctactgagttgttctatgatctggcaaagcgttctttcgaagcaagctggaaaacaatgcaagatatatgtagtgacaacatttcgcatcttgttgatgacgctgattttatgagtgcatttatacgaatcacgattaatcatatttgtcataactttgagaagtttactatgcaagaaggaaatcaaggaaaccttgaagaggttaactttgaagaggttaactttgaagaggtagcagaacggcttgtacgccattcgtgggagttttctgaggagtcatatactcagtaa

SEQ ID NO: 193516 - DNA, 357 bp, Klebsiella oxytoca
atgattaaagaaaaaaatgaaacgatgatgtttgccgtagcagttgtattaatgaggtattgtaacagtatctattatatggcgaatgaacactatgatactgctgtattctttgtgaaagaaaaagaagctgttgattacatattagatgatttaattaaagatctgatgaataatttttattcttataaagatagatatggtaaaggacatgagaaacaagaagagattaatgagtcagaacttaaggggaaaatattattgattcatgaacaatctgttaaatatttagttatgaagaatattaaatctgtctcttatacacatctgacgctgccgacgactccttacgtgtag

SEQ ID NO: 193517 - DNA, 2607 bp, Klebsiella oxytoca
atgccacgcttacctaccgctcgcgatctgggcaatgttgccctgcgtccttctactggtgtcacttctgtcgatacaaacgcgctttctgctcccgctcgtgccacggagcagctcgggcaggtagtcgccggcgcgcttacgcaggaataccaggaccagcagcgtctgggctttggcaaggcccaaactgcctggctgcagggccaggcagaagcatatgccgcgcttgaaagagataacgactacgcaaccatgcaggaccgctatggccagcagatgcagaaggttactgaaagttcagcttcaggcattactagcggtcgcatgcgccaggagttcgataactgggtaaaccagcagaacatccgcggcggtgaacaaatccgctctctggcatgggcaaaggaaaaagactcaaatatcgccggccttaatcagtcgctggagaccagccggtctacttatctgacatcgaccgacccggcaacccgtcagcaaattcttgatgccacgaacaatatgattcagggcgccgccagtaaggggtatatagaccagactcaggctcagcaacttgggcagcgctggatcaccgatgctgctaccggttccctgaaaatgatgcagccagagcagcgtctttccgcattgcgtaatccgcaggggattaccaccttcctgccgccggaccagcgacaggcgatgattaaagacgcggctcaggaggccataagtacccgcgtaggacaatggcaagttcaggccagtaccggaaatgctggaatgaataccttggccgttcctcatgacactctgatgcaggcagtttaccaacaggaaagcggaaaccgtcatcttaatgccgacggtagcatagtgcaggggccagtaactaaaagtggcgaccgtgcgcaaggtgtcggtcagataatgccagcaacggggcgtgaccccggttttggtattaaaccccttcagaatgatagcgaagaggagaaccgccgcgtttctggggagctaatggacgcattgactaagcgttataacggcaatcaggtgcttgcactggcagcctataatgctggatttcgcaaggtcgataactggataaaacaaattggcgatccgcgcactgggcaggtcagcaacgaacagtttgcagcctcaattcctgtaaacgaaaccagaaactatgtttactctatttccgctaatgctcagcgaatggggaatgttcggtccattatcgactcgcaggattttaaagacatggacggccagcagcaggcccagatgacatctaaaattctacaggttcaggatcagatagattctgcatatcgcgtcaatattcagcagcgcataactgacgatgctgcacgcgcgcaatcaggactcaatattgagaatcctgtgaccgaagctgagttcatccgttcgattccttcttctgcaacaccgggagagcgtgcacagttttatcagcaatggaaccgttacaaagatacgctggcgcttcagccggtaaataactttgtgatgcagaattctgccgtcgatggactggccgccgttcaggcgctgaaacctgccgataacgcagctgatttacagtttaaaaaacagcaatatgcgcaggcccaacagaactatcaacgcatcatggatgcccgtgaggcagatccaggtggttggctggttcagaatgatgagacgacccaaaaagcattcgcggcttataccgataaccctgatttaatgggcgactatgtaaaaaatgtcattatccaaaagaaacggctcggaattaaaagtgatgctgtgatacctaaagttcaggccgatgctttatctcaggctctattacagtcaacaccagataaccaatcaaaactgttggacgccattcataaaggtactggcggtggtgcaccttacatggccacactcaaacaaatagcggtaaatgcgccctctgcggcggttgccggcgtcctgatggataagccttcgtcgttaattgctcaggagaactggatcaatcctgatatcacgatttcaccttcgcaagcgtcaaaaaccattctcgcgggttctgctgcacgaaaagggactaaagacgcaaaagggatgtcgatgcccaaggaaaacgatatgcggcttgagttctcaaactccgtgcaggatgcgtttgccggtgacgctcagggagccgcaatggcatatgaggtggcaaaggattactacgcgggaataatggcccagaagggggattactccggtgttctggataatgatgtctggaagcaggccgttaatgtgtcaactggcggtgttcatgactataacggtatggggtatgttctgctaccgtggggaatgtcggcagaacagtttgataaacaagtcgatcaggcgtggcaaacacaggtcacaggtgcaggagtcaaagctccaccgggacaatacggcctgcaaagttacggtgacagccagtatctggttaagctcggtgcagggtatctgcttaaatctgatggctctccggtaatactggatctgactcagcagcgtcagcgctttatagagggcataccgcaatga

SEQ ID NO: 193518 - DNA, 270 bp, Klebsiella oxytoca
atgtcgttcacagtaacaaaagaagtcaaagaactggtttcgtatcctgagctgggggcatcatgccagctggttacggtcagcaaagaggtgacctattccgcaaagcgcctggtaagcctgtcagatgcaggagcgcaggtactgttcgatgtgtatgtgggtgattcagtaacaccaggagagcattatcacatgttcagttactccggagcaggaaacccgctggatgaggctgaaggatcactaaaagagtcgctggaagcataa

SEQ ID NO: 193519 - DNA, 816 bp, Klebsiella oxytoca
atgttagccagtaaaatggtacataaatcgacgactcggattgagtgctgcgtaccgggcgggacttctgtggggaccggtttttggtttttctttgatgctaatactgggaacagagatgatattgtcccactactcgtcacaaataagcatgtggttagaggggccacgagagtaagattagtaattaatattgaatgtgaaaatcaacctcatataaatagagagactcttgatattccggaaggtgaagctgcatttatgatgcatcctgacccgaatgttgatctctgtatacttccagtaagcgaatggttttacgagatgaaaaatgatggcattcatccacaaatcgctatgcttgaagagagtcaaatgttgggggatcagttcatcacacccattgaagatgtatacatgacaggatacccgaatgggttatgggatactgtaaataatagacccattacacgaaaagggtctactgcatcatccccgctggaggactggcaggggcgaactgaatttatgatcgatatggcatgttatggtggttcgagtggatcaccggtttatataatgaaccaaggatcctttgcttatagtgataccggtacagcaatgggtgaaagattcattttcttagggatcttatatggcggcccagtcttagacgttcaaggaaagattgaaattgtaaatgtgcccacgtcagatgatgttgttgttcgcacagaaattggcctgaatttagggttagttataaaagctgaaaggttgaaggattttaaacccatgttgggtataggtgtttga

SEQ ID NO: 193520 - DNA, 513 bp, Klebsiella oxytoca
atgaaatatccaaccgtatcagtaaacggcgtctctgttcgcgtagatggcgcaggtcgctacaacctgaacgatctacatgctgcggctgtggctgaaggcaaagccaccgaatcacagcgacccggtgaattccttaaaacaaagcaagtaaggcggtttgtgcaggccctgagcgatgcgaagaaaatcgcatcggtgttaaccatcaaaggtggaccgcttcaggggtcatgggggctcgaattaattgccatccgttatgctgcgtggcttaaccccttgttcgagataaaggtatacgagacattccagatgctaatccgtcatggcattgatgctatgtcacggctgaacaaaatcgaccatatcatcaacactgaaaccaaagcgattagccagtgtgctagccagatggcgaaatggggagtcggcggacgtaagcaattgctccatgctgcgcgcgatcgtgctgccgatgaagtgcagttgtatttgccaggtatcgcataa

SEQ ID NO: 193521 - DNA, 261 bp, Klebsiella oxytoca
atgcatggcggcatgactcagtccataattgaagtatacgacgtttccctcggagtaagggcaccctgcaaaggtgatgatgacaacgcccatcctgtggttttatggcgcacgatagggaataaggattgcgagggaataatgttccttcatgagttggacatcgccgtcgttaaatcaaccgatggaacagtgctccatgaatggcacggtgctaaaagccaaaagcagaaaagagagcaaatcacctcattcctatag

SEQ ID NO: 193522 - DNA, 330 bp, Klebsiella oxytoca
atgaaaaaggctttatttgcgctcttggcactgatgtcatttagcgcagtatcagctacgacattcagcattccaacggattcgaaagccaaatacaccatcattgataaaaacttgaacggctccatggcaaccatcacgaccatgagagagggcccgtcagggacatcctactcacagcgcctgtatgactgcacatcgtggacggtgaagtatcttggtgatggggacacgctggaacaaatgaaatcatccaagcctgacgaaggcatgtctccaatagttgataattcaatagcgtattatataggccaacaggcctgtaaataa

SEQ ID NO: 193523 - DNA, 2652 bp, Klebsiella oxytoca
atggcagaaaaagcaggtgaaatttattatgacattgaggctaacgtatccggcctgatccaggcgcagcagcaggttaataagcgtcttgaccaaatggacgccaagtttgagcaatcgtcacgatctgccgggcggtttgaaggtgctttaaataaagttggcgttgccattgcagcagcttttaccattgatgcagcaaaaaaacttatcgctataggcgatgagatggtcacgcttcaggctcgagtggctcgcctaagccccagcattgatgtagccaaagaaaccttatcagccttatctgccatcgcatctcaaacagggaatagcctatctgagaccgaaaggttatgggagtcgttaaccacagcattaaaagaaacaggtgcgacgaattcacaaattctcggccttacctctacgcttcagaaaataggtactatcggcggttcctccacagaggaaatggccaatgctttaaggcagtttgggcagtctatttccggcggtattgtgcgcgctgaggaattcaactccattcttgagcaaatgccagagcttgctcgccagattgctgctggtcttggaatatctataggcgaacttcgcaagcgaatgctggaagggaaactaaccgcccaagatgctctgaatgccatacagaaacagtcgcaatcggtaaacgaagagtttgataaaatgccggtcagcattgatcgcgcaaagaacagtcttgatgttgccttcaaaaatgccattaatgacttaaaccaagctatcggcctcacatctacccttgctgggttaatgcaaaccgtcgctgacaaccttaattactacaacaataatgtcggcgattcatcgagaatgccgaaactaattaagctccagcaggatttaaatagtgaacttaaggacagtcagcgttggtatgagtcggattcagttttccaggctcgccgggcgcaagcggctgttcaacttaagcaggttgaaggcgaaattgcccacataagagcgaaggcgcaaaaagatgctggaaataatcaattcagcgcaccaccaaccaagggcgatgacgccgccacaaaaaaactggtccagaactcggagcgccggcttgcgctagccaaacttgaaggcgaggcgcgagccaggcttcaggcccaatatgatgctgctgatgcaggagtcaccgaccagaagcggattaaagcgctgcaggatgagtatgccgaaacctatcgcgtaactgaggccagaaaggaaagcaataaggtcgggaagcagtcagaaacgcagtctgaatctatcgcgcaaaaattagcaaacctgaaacaacagtccgaactggcggcagattctactcaggaattgagccgagagcaggcaattttgacagcccagctttcgctcggcaagggcgccacacaagaacaagtagctttggccggtcagtacgcagcaacaaagtgggatacagcgaacgccatcagggctcaggctgcggctgaaaaactgctacctgaagccagagaaaatgcatcttacacgcaggatgtaaaggacttacagactgcgctggacgcaaaaaaaatcacccagcagcagtatgaccaaaccagtaagcaactggaggctcagcaccaggccaacctcgcaaaaatccgctcacaacaggctgtgacgccacagcagcaggccgccggagatgttgatccagtccagaatttggctaaccagcatgcccagcaacttgcattaatccagcaatttgagcagcaaggtgttattgctcataatcaggccttgttgctgaaaaatgcagctgatatgcaatatgaaaaggccagaactgatgctcagtgggcgctgttcactcagcagagcgttggttatgaggctctgggtgctgcggtcgatgcatttggtagtcaggcatccaatgcattaacgggcgtgataaccggaagcatgtcggctaacgacgcgctccgctcaatcggcaataccattctgaatgacgtcatcaacacattcgtacagatggggatgcagcaagctaaatcggcaatcatgggcgcaaccgctcagaacgctgcgatcgccacaacgaccgcggcgcaggtcagctctttggcaactacgaccgcagccagtacatcgtcagcagcggcgacgacagcggcgtggacgccagcagcacttgttgcgtcgatcggctccttcggtggtgctgtagcgataggtctcggtgctttgatagccgctcttgctgttggctcttcgcttgccggtaagcgcaaaaatggcggaccggtatctgccggctcaatgtaccaggtaggtgagggcggaatgcctgaaatctacaaggccagcaatggcagccagtacatgatccccggggacaatggttccgtcatcagcaacaaggatttgcgcggttctggcggcggcggggcgctgcaggtgaccaataacgtctacaactacgccagcggcgtcaatgtcgataccagaagcagccagaacggaggccaaatggtgactgatatcataatcaccgacattcagagcggggggccgatatcgtccgagatgcaaggcgccttcggcctccgccgacaggcaaacggtgactactaa

SEQ ID NO: 193524 - DNA, 549 bp, Klebsiella oxytoca
atgtccgcgaatattgaaagtcagttccgtgtagtaaaggctgattccgatgtgaaactcactggagttaagcagtttgattgtggcgataaagtgctgaatggatatttacagcaattaaagcgccagtgtggccatgacaacattaacgggttattgcttcttgaaggtgataaagttataggttttgtcacggcctcgttgtatcagttgagtcgggaagacgttcctaaaggaacatttccttactctgtgcctcctgtatttacagtaatgaagatccctatgattgccatcgataagcaataccaaaggcagggctggggtgatgagttattgcgagcgattcttgattattgcattgatagtgcagatttagtgcggggcattaaaggtgtttaccttgatgctaaagttggtgtaaaggatttttacgaaagtttcgattttgaagctattagcgaagagatcactgccaacaatacaatccccatgttcatttctatggacacgttacggcaagctaaagagctggaaaaaagcgcctga

SEQ ID NO: 193525 - DNA, 321 bp, Klebsiella oxytoca
atgagaaacaccaagttaactggtggttccgcaagcttggctttggccggagccaaagatacacgtgtcgagcttagaacaagcgtcgacataaaagagaaactgcgagaagcggcatctctagttggggtggacatgagtgcgtttattttgatggctgctacacgcgcagctcagcaaacgctggatgaacagcgaatgcgggtgctcagtgaacaggagtggaatcatctaaacgatattatcaattcaccacgtcaacctggagataagcttcgcgcgctaatgacggggaaaccgagatatgtccgcgaatattga

SEQ ID NO: 193526 - DNA, 408 bp, Klebsiella oxytoca
atgattgcggcctatcgtgttcgcttcgccagcgggttccaggtggcagcgctctcttcccgacctgccaacatccgtggtcttcagggagtcgtcattatcgacgaggccgcattccatgctgacgttcagggggtactggatgcggccaccgcgctgcttatctggggcgggcgtattgtggtcatcagctcagagaacggcaaaaataacccgttccaccagttctgtaaggatatcgaagaggggcgctacggtgacgatgctgcagtgttacgtatcaccttcgatgatgcagtgacgaacggcctgtacgagcgggtctgcgtgatgaagggcgaagcggcaaccgtcgagggggaaaaagacctggtatatccgaggttcactcaacccagccttacgtaa

SEQ ID NO: 193527 - DNA, 870 bp, Klebsiella oxytoca
atgacacctgagtatagaattgatgcagagaaaagaataactgaatatttacagtctcaaaatttagaaaacattaaaaatatgcaggttgaacaaacatttgaagatttaggctttgaggttaacatatggaacattagaactaaaaacgatggtaactggtgggttgctgaaggtgaaaatgttcctatgaatttatacactcagaatgagtatttcttttctgctgatgaagcatattcgtttcatttaggtataactcaaagattacatgcacgacaccaaaaaaattataaacatgttattgatgagttgcctttagatatagatatgctgcaatctattaatcgaaaattaaatgcctctgcgattgctcttaataatattaatgcacctgaagatattcaaagcattggattgacatgcagagagagtatggttgaacttgctggatacctttataaaagtcatgaagatatactaaaaaaagaaggcattaaagctgctgacttcaagaatatttctcgtattgtcattggattatatgcagcaggaccgcggaattcaagtcttaggaaatattgtcgctcaacgattgaatctgcatgggatatatcttcggagacggtacattcttcaaataaaaatatcccagatgccaaaatttgtcttttgcttacatgtacagcagtttcattaattcagaatttatttcttaaatttattggctttgatagtgatgtaaagtgtccaaactgtcacagtttaaatactgaaattcatgagtctgaagaagatagtcaattacatgtagtgtgctgtgagtgtggtgaagtggtgaaagtactttcagacgaaattgatgactga

SEQ ID NO: 193528 - DNA, 480 bp, Klebsiella oxytoca
atgaaaagagtcaaattagataacagtgatttaatccagtatttagatacaatcaaagaactaaaaaatcatattccgatagaagaatacaaaaatgaatatcgtaagctacgttccggtgatgttcctttgattaaagcccagaaatttaagtctgcccacaccgaactgcgtagactccaaaaaaagaaagaatctcttattgaatactttattgacgagttaaaccccatcagcagttcaatagctaacacgtcagcaagatcatcaggtaatcttgataagattaatgaaagaatgctctacaggaaagcaattgaagaaaaaagcgatgaagaaataattgccttggtcataaaacagcgtacagaagccgctgttgagttccagcgttccatagaacaaagtcttgagcaactctctcacatctcgtcagagttcgaaccatcaagccaaaagcgcaggaaaatgtctctttaa

SEQ ID NO: 193529 - DNA, 681 bp, Klebsiella oxytoca
atgagcattgattacaatacaataatgacctccagcagtgaagaagtggaagattatatcaacaaaaatgatttcacagataaacagaaactagagatttacagtttttataacagaaaccgaaaagataaaataaccgtaaatgttaaaaaggaacgaagttctgatatacagccgggaatagcctatgttcatgcttttgtcgataatctggaaaagctcggtaaaaatatgtctggtgctgaatacacaataatgatccgtttgtgtaaactcatgcagcatgggaatctgatagccagtatatctcagtcggcactcgcagaagagcttggtatgagcaaatctaatgtgtgcaaatgctggaaaaaacttatcaataagggcattcttattcaagacggtaaacacactttaataaacgcaaatctattcctgaaaggccaatacagaacattaaatccaacaaggaaagaatatgttcagaagtcgctgagaacaaccagtgaaggcatcaaggacgtattcatcaccgtttataaagatacgatacttacaaaaaaagatgagaaaaaaatcaataaagaagatgataaatctttgctttccacgcccgatgaagatattgattgggactctgtttcagaagacaacatatttgatgaagaagaaaaaatataa

SEQ ID NO: 193530 - DNA, 492 bp, Klebsiella oxytoca
atgaataatattaaaatcattacgctctttaattccagtgaaaaaatcccatttatgacctgcgtagttaaagatgttgaagagaatgaatatgggataaagcttaccctcgaaaacaacaataacatttatgtcaaagattacgattccttcttcctgtctgaatcagcaaatgattgcgataaagaacgaatggtaaatgtgtatgcgagattgatttctgaactcagccaagtcagcgaagaaacaataagatctctgatgtcagaaacaaaaacctacaacaggcagcatcccaacacgcccgttagtattttggatgattactattactgtggcagggttaaagccaatacctcagatgaacccgcattgatgaatgcacttggcctacaggatctacgtgggaccatcgctgaagataactttttatccgaggtggaagccgctggaggtatcgtgcttcacactgatccctcactgtcaggatag

SEQ ID NO: 193531 - DNA, 822 bp, Klebsiella oxytoca
atgaaacgaatttcccctgaacgaaaagccggcatactggcaaaactgttaccgtcctacatcatgaccgttgccgctgttgcgcagatggaaggaatatccgaagctaccctgtataactggcgtaatcaggctaaatcagagggaaaaccggtgcccggcgcagacaaaacaacagaccagtggtccgcagaagcgcgttttgccgctattgtcgaaacagccacattcagcgaagctgaaatggcagaatactgccgtaaaaaaggcctttatccggaacaacttattcagtggaaacagggctttttgcagacctccgtaccgggtgataaagcggcgctgatgcacaggacagttctacgggagcgctgctggcgacaccctctggtgctgcacgcagataacggtgcagcgatgaagtcgcagacgctgcaggtaaagctggcagaactgaaaatcacgccgtcgcacagcaggccgcgggtgagcaatgataatgcttacgttgaatcactgttccggacgctgaaatatgtgccgcagtggccgtcatcggggttcagaacactagaggatgcgcgtcactgggtggataaatttacccggtggtataacgaagaacaccgtcacagtggaatacgctatgtgactccgggagagcggcatcggggtgaggacagcgtcctgctgaaacagcgtgataccctgtacaggcaggcacagaaagcgcacccggagcgctggtcaggtcagacaagaaactggcaaccgcagggctctgtaacactgaatccggaacgggaaaaacaggccgcgtaa

SEQ ID NO: 193532 - DNA, 822 bp, Klebsiella oxytoca
atgaataaaaaaatgtctgatttacttgaatattccactgttagaatagaatgtgataatggacgttcagtcggtactggtttcttttattctattctttctaacgataatgaaaatcaaattccttttattgttactaacaaacatgttattaatgatgcgactaaggcgatagtttatatccatgctgtagacacaaaaactgggaaagaagagaatcatattggcattgatattggagatgtacagaagaaattttttatgcatccggattctgatgttgacttatgtgctatacctgttggtccagtgctttctgaaatttataaaatgggtaaagaaccaaagttgttttattttgatgacaagtgttgttatgaaaagcataagtcaaaaaattcacttggtggattagaagaagtatatatgactggttatcctaatggactttgggatcataaaaataacaaaccaattactcgaaaaggaattactgcaacaaacataaaatcagattggcaagggaaaaaagaatttttaattgatatggcatgctttcccggttctagtggttcacctgtgtatatttataatgatgggacatttactgagggagaatctattgttgcaggcactagattgattttgttagggatactatacgcagggccacagattgtagcatcaggagaaataaaagtagttgatgtcccagcagtgcaaaaagaatatgttactacaaatatgatgcttaatcttggaataataatcaaagccgaaaaattagatttcttgatggagaagtttggagatcaactctga

SEQ ID NO: 193533 - DNA, 1833 bp, Klebsiella oxytoca
atgaaaaacgaaaaatctttagatgcttggatgaaattcttaaaaataggaggtattgaacctttagggagggataaggattttgttcaatcattaaaaaaatacttaaatccaactgcaatcactatagaagaggcagtcttatcttcaaccacggatatgcttgttcgaggtcttttttccggtgtcacgccattttcagcgatgataaaggaaataatgtattttttttgccaagcaagtacaaaatatggtaaaaaccagtgggaaataggtgttagcgatgattttctagatttaaaagattttcaaaattataataacttcttggagaaaacacaaagaataattaacataccaaatttagactataagggaagttggtgtgtttgtgatatagctaaacaatttgaaactatcaatgaaaatcttcaaaaagcattccataacgaaacaatagttactggacttgatgatgttgacaactggttatatatttattttaataaccatcagtatattgaacttcctcagactatattaagcctccttgaagacaaaagcccactggccgaactttcatctctttgtatgattgtctatgaaaacataaagtcgagatgggcttcattatattcgctaaaatatgatattaataattataattttcctgtagataacgctctatcgattgataccatcgttagaaatgaaacagacctatggcttggaaaaacaatcataattatcgcaagtgccataagacttgaaactaaagaactaaatgaatttaaagaattgttaagagaacaatttctaaaataccaatatataaactattctctttcaactgattcagtggaacttgagaaaatactttcatttcctgtttggaaaaaaagacacgaattatatgccatctggattgctactgaaataaactcagcactaagagaacataatatagaaatacacacacacactcatgataacaagcttacatttccattcaaggaaactttaatcgcaacagtccatagctccataccaatattaaaaatttactctgagaagtatgaagagttagattcgccaaaaggcaaaggtagacactatggtgtacaacctgattatagtttatggcaagagaagaatcatgttttgtattgtcctcttgtaattgaagtaaaacactataaacgtaattcacgtcgaatatttagtgatgcgttagaggattatgctagtgctcatcctgatgccgagatattgctcattaaccatggtcccgtaagcgatatgctggacaatgtcgattgtaatataaaaaaaagatgtctcctcattggtgagtataatgcattatcgactaataaacgagtagagttttatagcaagataaataaaatcgcaggaccaataaatacaataacaccttttttaggtaaagaaggaatgcatggaatattattaattgatgtatctagctcaatgagagacattatcaataatgatgatttcaataatttattaacaacattaactgatattaaatttttaaatgcagccttgattgacacctcaataacagatttttttaatgtgggtgaaatagagggaaaaataagaagcgctcaatataataaaggtactgatttaaataatgctttagctcatctcccagaaaattataacagaataactttacttactgattcagaaggcaaagatcaaatttgtgaatccaataacaatcattacgatgaagtgagcattagtgaatttggcgataactattttattttaaatataactaaaaaacaaaccaattaa

SEQ ID NO: 193534 - DNA, 204 bp, Klebsiella oxytoca
atggtgtcttcaaagagttggatcttcagatcattgttgaccttagaagcttcaccgtatcagaaatgcctgagcctgttgaaatcatcttacctgaaatacaacctcgaacagagttctctgaaacgggttcgcagtctgcatcatcagcaggtcaaaaacctgttctggttgcccctccacctcatacacacactaaattga

SEQ ID NO: 193535 - DNA, 915 bp, Klebsiella oxytoca
atgcctattttacccggatatgaaccaaggcaagggactataccagcaaaaaccctctatgaaatatctttagaatatcagttaagaaaactaatatattttcgtgatcaatttgttactatgttaaaaaggccacgcaatacccattacgtagaagatgactgccgttattaccatgatattattatcaataattcagcaacgttagcagaatactatcttccctatgttatttattctatcattggaacgatactcccaaagccattggctccaagatttgatgggttaagaaaaaacatagataaaaatggttatgatgaagcaaaattagacgtatttaaacgatatgaaattggtgttttatcaaaatctagagagagttacaaagaagagtacctgcaactttgtcacaatacatttgatagttcaatgaaatttttaattgatggtagttatgatattatttttttattaaataattatataaaacataactcaatgaattttgattacgctccattgttaaggacgaatagtggagaggtgaaaaattatctttttctcaggttcactgctgaacaacaattcatgctcggtgaatcaatactgaaaaaattaatttcatacaattatgataatatcattgctaatgatagggcgaaattaatcctagatggggttgaatttactaaaataggaatgttagggcatgtcgcattactggaaaataataatatactatacactaaaggtaacagttctgctggtgttacatcagaaagcttattgaatttgattaataaattaatggtaagcatattggaaaatatgattttaaatgtaaaggatcatgaaattaccaaattcggagaatataacaagcttctggctgctataaaaaagaacgagtaa

SEQ ID NO: 193536 - DNA, 351 bp, Klebsiella oxytoca
atgaagttggagttaataattggtgataagaagttaatagagccagattttaaaatatatactcatgacatagataagagactttttcttattgctataagaacagaaagtaaactagaagatgagattaaaagttcaatgaaacgcaatgattttaatattgaaatggaaaacggtgttatgggattatatataaatgaatgtatttataatttcgatattggattcttcttggatggttacttaaaaaatcatgtaaaaaataatttctcagtagcttttgcttttcttgatgataatcatacaattaaaaaatatgaggttgaggtaatagagatgacacataagtga

SEQ ID NO: 193537 - DNA, 888 bp, Klebsiella oxytoca
atgacgaattctggttttactgagtatggtagggattcaaagaagcatgatcttttagaacataagaaattattggacttattaaacaaaaataacaatgctcattttccttcaatagataaaaccattcctattattttttacaaattctcattatgggcaagaatgaaatcgagagtaaacgtctttctccacgatcccagcctaaaaaccttcgttggtaagttaacaacctcatatcaaccgggaacagaaagcatttatattagtaaaaatctctacaaagataagaacgaagtaggcaaggcggttaatgaatacgaagtttacaaatcgctcttggcagcagattgtagtcatgaagaagctactaacctcgttctcctgcatgagataggccatgctattcatcgccagttagaaaagcgagatggttatctattggaaccaacgacaccggaagcatctttcctaaatccgtttgttaagttgaacgggttgtgtgtcgaaggaataaattatgtgactagtattgctcataaagcaataacagaaagttatgcggatttatatagctgcattctcattgataggttgtatgattcttctcgttctaatttgattattaatgcattacatcattataggacaacgcataaaaacgagaattattactcatatccgagcattgccaattatttgaatgatcgcaatgggagagcatttaagtctttctatgaaattcatgaatatatgtcagctactatagccgacaatgtagtatatgatattggcagggacttgaatcagggtaaaccacagctaagtaaatttatcggagttgtgaatattctatatggtttaaatgaacgtaaaatagatgattga

SEQ ID NO: 193538 - DNA, 276 bp, Klebsiella oxytoca
atggaaaacaataccatcaaatgcccgttttgcttcaaagagagtcagcggggtgttcacgtctgcactgggtgtcaagcgtcagtattatatggcacttatcccggctggtatgcgtttgttgttctcttactgacttttgctctgtccgcgctgatcggaatgtctacaggtatggcgggagctactatcagcctaccgataattgcggctgttgggtttgtcgcaggtaaggcaattttctctgataatgttgtgttcaggcgaagaatgtag

SEQ ID NO: 193539 - DNA, 2040 bp, Klebsiella oxytoca
atgaatactataatatcatttttagaagaaaatgacgaaaactggaaaatatgccaaggaactaatgaacattatgagcccgtcgccaaaaaagttggatatgaattcacttccaacaaaacaaaatgcgaactcaatgattatttgattaataaaataagagaatcattgcaaggtagtgatatcagtaatcaagagttcactttaattcaaaaccatattgaactcaattatttctcatcaaataaaagatcgcacaaaaactcccgactctttattcgccttataagatatacaatcaatcaattaagttcatattcgaattcactagaatcatgggaattagcaaggttttacttggatgcatatttttcaatttcaggtaactcctattatttatcaccctataaaaatcaaaatgaaaccatagctaattccatacgttatctcaggaatcacggatttaaaacgttaataatttcaggcaaaattaaattgccggaaaatgacgaaaaatgtctacttgaatctattaactacagatttaaaaaattaggttataacgcgaccacattcactttagcatgtctttcatcattttatgacaataaatctgaaagatattttattaaaagagcacctgtatcaactgaagattacaactcgaatattccttggggatacatattaaatacctgcctctctaactttcatcaaccagaagaaaataaattaaaaaaaggtatgtttaatgacgcggtggaacttgcaaaacattattttagcattcaaagattgcaaaccccaagtcaatttagtgatataaatcataaatacgacactatacttccagccatacaaaaaagcatcgtatatgaccaacatttttctattaatcaaatttcctgcaagcatttttccaaaattttatcaggaatattttcaccccaaaggctatcagcctatgacattaatctaactatatatattgatatatacaaatggattgcatctcaagctacatataataaaccttattcatttacctccggtgaaattttcagatcattaatccccaaatactataaacatgaattaaacgatgctctttccgaattatcatttaattctggcgagataaataaaggctaccttatacctgatgacacaagtaaaataaattattacttaaaaccattaataaaaaatgaaagtgtctatacttatatcaaccctctcatttttaactatggttttcataatcaccttgttgatttatgtaattccaagggtataaataatagtagcatgggtccaatcacagaatcttttgtcgaagacttattaaaaatgcatggattgacagttatagctaataaaaaatataaaatcccaaagttatatgcaaaagaactgtcaatatctagtgagtcccgtgagtgtgatttcatcattgaaacaaacaacactattatttttatagaattaaaaagaaagcaccttatttctgaatcacgaggagggaatattacaacatcaatgatagatttatctcaatcattatttcatgctcttgcacagactggttgtcatgagtatatcttacgtcgagatcaagtaataaggttcgaggatggaacttatattaaactaaataatagacgagtcgagcgtatagctctttctttattcgatttttatgctctgcaagataatgttttcattcaacaaattttaaatagcttgatatccgccacaataaataccgaagataaatatacagccagtaagatcaacagatatcttatagaaataagaaaccaatataataccagaattttcagaaaagaatattttcataataacggtatatcgtttatgaactgtaggtcattcagtgtacctcaattaatggagatactagcaaacagtacagataatgatagttttgagaaagagctaaaccgcacgaaatttatgacaacaggaagtaaagattggtacatcgaataccaatacatgcggcaaataagctcataa

SEQ ID NO: 193540 - DNA, 1491 bp, Klebsiella oxytoca
atggcgatatacagtttaaaaatggagaacatcagcagaggcgaaggcaagtcttcggttgcctccgctgcttatcgcctccgcaaagttttcactgataatcgtactggtgacattcatggtcgcaaaacagcacataaaaaaggcctctattttgctcgaatttttgcacctgaaaacaccccaccggctctgattgttgacagtgaaacactctggaatgctgttgaagcttcagagaagagaaaagatgcccgtcttgccaaagagtttaaaattgccctccccgctgagctaactccagaacagagtattgaactcactacagctttcgttcttgaacacttcaccaagaagggaatcattgccgatgtcgttatccacgacattaacagccataaccctcatatccatatcatggtaacaactcgtgaagttctatctaccggttttggtaaaaaggtccgtgagtgggataaacctgaaacccttgatagctggcgcaaaggctggcaggacatctgtaacgaattccttgagaaatatgagcatgaggttcgtgttgaccaccgttccatcagggttcagtatcaagaagcacttgaactggcggcagtggctgttaacatggaagacaaagctatctggcttgccaaagctgaagaaacaaaccgtgatccaatgaagcacatccctcgtagtcgctggaacactcagaccgctcaacagcagcgtgctgcagaacaggctgttcgtgatgacaggaagaaagaagccgaaaagacgtattcgctgtttaaagatctgcctctggaaattgtggttgatatcacaagctttactgtctctgttcttgctgaaccagaagagatcgtactggatgatggttttatccagaaaccccctgtagaaacgccagatatggcaactccggctccacacagaagacccgccgtgaagtcgtaccgtaatgctgataaaaccagtaaagtgagcagggaaccaaaaccgacactggtgatcccacaatcacctcgcactaaactgaaaaccttctcttcttcaacggctggagcggtcaaacgcgctcctgtaaaacgtaagcaggtaacgcctcgtcagagtggcatatttaagcgtttcacgacctgtatcgtcgattttttcaaagaaaaatttgtctggtccagaagaaaaccagctccggtttctgccgatgctgcacacgataagcgtatcgctgaaaactatgtatttgatgaggtgcttggtatccatatatcacgcgctgaacatgaaaaccgagctagatttaacagtgacacttatagcccaacatcggatgagctcacccgtttcccaagccgtcttaagcagaaacatacccatatcgatgagcgcatagatctttcattatcaatacagtcagaaccagaaaaaaagaagcctacctatcccaaaaatcaaccgtcgagttttaggaaaggctaa

SEQ ID NO: 193541 - DNA, 144 bp, Klebsiella oxytoca
atggcaaataaaaataaagcaatgcccacttacgcattacttcgtaatgccgtggggtctaccgacggtccctgcggggctaaaaccgtttccttcggaaacaaaatcaaggtcaacgtcaaacccaacgttttccttgcgtaa

SEQ ID NO: 193542 - DNA, 234 bp, Klebsiella oxytoca
atgagtgataatgataaaaacagaaaacaaagagcagaaaaaacagtaaggcaaaaaatagcatcagcacagatacgcctgaatcgcttaaagaccaaaaaaaaattattaacaaaaaatgccaagacacgcctgaagatcatccgtggggcagaagtggctaaagcagttggctgtaaagtagaagaggtgggtaaggagttaatattagggctgaagataaagcaagattaa

SEQ ID NO: 193543 - DNA, 582 bp, Klebsiella oxytoca
atggatgaggtcaatgtcgctcagtatcttaggatgtctacagaccatcagcagtattcaatattcaatcaatctcaattcataagtaaatttgcgtcagaacataagatgaatatcattcatacatatgatgactctggaaaaagtggggttacggcaaacagaagacaggcatttcaacagttaatagatgatgtggttgaagggaaaataaatattaaagcagttttagtttatgacataagccgttttgggcgatttcagagtatagatcaatttggatattatacccatcaacttcaaatgcatggtgttggcatcatatattgtgcaaaccccatcattgaaggtaatagcgattatgctgattttcaattattcatagatcgaaaaaaagcttcttcattaagtcgggatctatcacaaaaagtctttcttgggcaagcaaatctggctggtcgtggatatcaccaaggcgggcctgctggatatggtttacgaagaatgttgatagatgaaaaccataaacataaaggaatacttaaatatagagagtggaaagcatccagactgatcgaataa

SEQ ID NO: 193544 - DNA, 957 bp, Klebsiella oxytoca
gtggaaagcatccagactgatcgaataattttagtattaggaccggaagatgaagtcataacggttaggtggatatacgataaatttgtgaataattctaagccagagagggttattgcctctgagttgaatagaagagggattgctgcagagcatggcactaaatggacaagaggaaagatccacgagattttaactaacgaaaagtatattggtcataatgtctataaccgaacatcttctcgtttaaaacagcgtcttattcacaacccacaacatgaatggataagatgcgaaaatgcttttgaaacgattatttctcctgagttatttttacaagcgcagaatatcattagtaatagaagtattcatcttagtaatgatgatttacttggtaaactctctgagctttttaaaaccaaagggaaactatctggcataattatagatgaagatgatgatacaccatcctcatctgtttataggaaacgttttggcggtctattacaggcttataaattaattgactataaaccaaagcatgattatgactatttgcgaattaattccttactaagagaaaaatattattgcttagttgaaaaactgatttttgatattacagaacaaggttgttatgttgattatgatgaagagtctaaattatttactattaatgatgaagttaaaatgtctgtagttatctcccgttgtttcatgaataacacgagaaagcgctggagaatccggtttgagcgtaagtttagttatgatatttgtatcgttgttagacttgatagccaaaatgttaatacaaaagattactatatatttccatcaattgagttattgggtaatcagtttgtttttgatggggtaaatccatatcagttagaattttatcgatatgatgacttgataccttttttacaaatcctcaaacgtgatgttttctaa

SEQ ID NO: 193545 - DNA, 903 bp, Klebsiella oxytoca
atgaatgaatatgaagaaataaagcttattgatatctctgagatcaggatcgttaatccacgttcaagaaacaaatatatccatgatgaacttgttgaaagtattaaaaacatagggttaaaaaagccaattacgataaggttatctgactctccttgcgagacttatgtgtacgatttaatttgtgggcaagggcggattgaggcttatgaaatattaggtgaaaaacaaatcccagcaatagtaaagtcagtggatcatgaagatggtcatatcatgagtcttgcagaaaatattgctcgaagaaaaccacgttcgactgagcttctcaacagcattatagaattaaagaataaaggtttttctgagttagagattgcaaataagattggtcgttctaaaaattgggtatcttctattgtatcattaaaagaaaatggtgaggataaattactttctgccgttgaatctggcagaatgccgatatatcttgctgtagaaatatcaagagctaaaggaattgatatacaacatattcttttagagggctttaattctggtgagcttaactcaaagcagataggtgcaattaaaaggatcttagttcagagggaaacatcgggtaagggaagtgaaaataattcttttgttcagggagtaaaaaagaagcggattacttctgaagagttaaaagaactttatcaagaaaatgtcaaaaggcataaaattactcatacaagatctgagtttacaatatctagcctaatggttgttaaggagataatgattaatttattgagggatagagagttttccgatcttctatctgtagagagcctaaattctgttccttcattcattttggataatgttgaccccgaacgaggactagaaaatgaataa

SEQ ID NO: 193546 - DNA, 891 bp, Klebsiella oxytoca
atgaataaacctaatttcggaaataagtgttttattattaatgtttctgatctgctatatgggaaagagttgcctattaatgtgaagtcaagcgtaaaatatcttcagatactttcaacggtgaaaactgttggtatcatagaaccaatagttatttatattaataaagtgtcacaaaagatcatacttgatggtcacttaagagttgaagcatcaaaggatattgggctatccactgtgccttgtttaatttcagaggatgaagaatcttatagttataacaagtatgtaaatcgattacctgtaattcaggagcatcgtatgatattacaggctgtggatgctggtgtttcagaggaaaaaattattcaatcgctgaatatatcagtagatacactcagggcgaagtttagattacttgatgggattagcccggaaactaccgctttattagcaaatcaacatgttcctcaaacaatattcgctattttacgtaaaatgaaatcagaaagacagctggaagcggtatcaacgatgatgagtataaataatttcagtcgtaaatttgctctatcattattacattacactcccgatgatatgttaataaatccgaaagattctaaactcaagcaacaagacatagccaaaaattttgccagaatggaacgcgaaatggctgcaatggaaatggagaccaagcaactcgaaaatatatatggtacaaataatttaaaattggcagtgattattggtcacattaaaaaattactttctaattatgcggtattgaattggttagtagataataatccagattatttagctcaactaaagaaaatttctgcgattgattcgttgccaatgtgtgaagatgaagagttgctttga

SEQ ID NO: 193547 - DNA, 180 bp, Klebsiella oxytoca
atggtgcagtatgcagtagaacaccgagggagtattatccgtctggcctgtcagctctttgtcgtcagcggatattgctaccgctacaggcacttactgagtcaggaaaatcaactggttgctgactggctggtgcgcatcacggacagctatcgaatgctctttacgtccgtctgctga

SEQ ID NO: 193548 - DNA, 672 bp, Klebsiella oxytoca
atgaatatatttaacggaaatgattatgaaagggcctgtgaaaggtatgaacgcatcaaatattgcgttgaaaaatttaacataaaaatagaaattctaagagagaagttagcattggatttattggaaaataaaaatattgacaatttccatactaattaccaaacaatagtcgataactttgaaactgagttttatcacattattgaaacatatgaagtagaacaacgatacctgccattcttgtgtatgattattgaagaacatgccgatcatatatatgattcaacccgttttttatcacaagtattaagtgataagggagttaccgatcctcaagacattctgacctttggctatgaagtgtatgaggcaattggtctcctgaatgtcgatattgaagatgtaaaagagcagacaatttataaataccataaaatggattttgcttatcatgactggcgctataagtatggtgaaagggagctgatgaacgcatgtgttggttttgaggttcgtgtggcaggattgtttaaagactatggatttgataaaagttgtattcctgtattgatggcaatcattgtcaatgaagcagatgatatttatgggttttcagattatagatttattgagtctttgattaagtctattgagaataggatagggtga

SEQ ID NO: 193549 - DNA, 336 bp, Klebsiella oxytoca
atggaaaacaatgagaatgtttctatatataaagaagatgaaaataaaaaatcgaagataaaaaaatcattaaaacagcagatagcaagtgcacaacttcgtcttaatcgactgcagcataaatcaaaggttgaagccaagcagatagaaacacgtcagaagatcattcttggggcagaagtggcaaaagtacttgatagttgtgttttcgatgtggataaagagttagtgatgggattactgttagatattcctaagttgagtgcagaacaagttattaactataagaaaaaagggcgtttgttcttggccggtcttaaaagtagacaatattaa

SEQ ID NO: 193550 - DNA, 573 bp, Klebsiella oxytoca
atgaaagagacgattgtgaataataacagaataaataaaaaaggtttttcgctcttagaactcatattagttctcggggttatagcatcattagtggttgctgcttttatcatttatccgaaaattcgctctatgcaaagagttgaagcaggagttaaaactctgtcacttataaaaaatgttatcgatactaacagttctgtatctaagaatctaacatggcttacgacagaaaatataatgaaaatgcaagtaatacctattgacatgattaaggataataaaattataaactcttggggtggggagattaaagttagtacaatgggtggttccagtcagtattttcttattgaatatacacaagtccctatagaggattgtattggtttcttatcattagttgctaagtcaggtgatagtttttctcaggttagaggtaatggtcttaatataaacttcactggcgatagggatttgtcaattatcactacattttgttcgtcaaaaattaatgtcgcttcaggtagcaaaactatttctttttcattttctgattttggcaattggtaa

SEQ ID NO: 193551 - DNA, 213 bp, Klebsiella oxytoca
atgcatcaggtggttaccttcctgaccgggaaagtgagcgccttctccgtcacgccagccgatgagccggtactctccctgaccggcttcccggccgtcgcgcttgcgcatatggaccacgatgccgccagtacgcccggcgagcgtaaagtctggcaggagaaaatccgtcagcgcgaggctgacctgaaagcgcgggggctgctgccatga

SEQ ID NO: 193552 - DNA, 381 bp, Klebsiella oxytoca
ttgtcatggttctcagagatcagcgcggtattagtatccgcattggcctgcgggatatccgagtcgctatcagagtcggcatcgctgtctgaatccgaatcactgtcagagtcagagtccgaatcgctgtcggagtcagagtcgctgtcagagtcggaatcactgtcggaatccgagtcgctgtcggagtcggagtcgctgtcagaatcggcatcgctgtcggaatccgaatcgctgtcagaatccgagtcgctgtcggaatcggagtcgctgtcagagtcagaatcgctgtcactatccgaatcactgtccgagtccgagtcgctgtcagagtccgaatcgctgtctgaatccgaatcactgtctgaatcggagtcgtga

SEQ ID NO: 193553 - DNA, 321 bp, Klebsiella oxytoca
atgaaaacgcctctgccgcctgtattgcgtgccgccctgtatcgccgcgctgtcgcctgtgcctggctgaccctgtgcgaacgtcagcaccgctatccccacctcaccctcgacgcgctggaaagcgccatcgccgccgagctggagggcttctacctgcgccagcacggcgaggaaaaaggccgtctgattgcctgtgcgctgctggaagatttgatggaggccgggccgctgaaagccgccccggcgctgtccttcctcgggctcgccgtgatggatgagctctgcgcccgccatatcacatcgcctgtactgcactga

SEQ ID NO: 193554 - DNA, 258 bp, Klebsiella oxytoca
atgctcatatttctcaaggaattcgttacagaagtcctgccagcctttacgccagccatcaagcgtttcaggcttatcccactcacggacctttttaccaaagccggtagaatgaacctcacgggttgttcccatgatatggatatgggggttatgaccactgatatcgtggataacaacatcgacaatgattcccttcttggtgaagtgttcaagaacaaaagcagcggtgagttcaatgctttgttctggtgttag

SEQ ID NO: 193555 - DNA, 1065 bp, Klebsiella oxytoca
atgccagcggaagcgacaggctggctggcagaaaatcccgaagctctgggcaatcttgccggggccttatggaaccagcatccggcaatgccgttgatccgaagcctgatgaaacaagcagctgagaaaacagagtctcctctgatggagaggaaacctgcggaaattttaggttcttatgcaggtgaaattccagtaaatacagccctttcaaatgaggggggcgctacggttttacctacagatatgttatctgaacaaacagctctgagcggggcaactgatccatcttcccctgagatctttacacttgccacaggtattgataaccccactcagcttagtgattcaccagttaaaagccgtgaagaaaacgaagcagaaagtgttttaagcgaaatcgaaaaaagtactggctctgactctctgccctctgaagatgatgctgatgctctcctttctcttttcgacatgtcaggagatgctaaagcttcagaaaatgaaggtgaggtacaggcaggcgtgtccgttgtgattgcagaggaacagcaatcgtcagaaccccttgaaaagatagaagaccccgcaaatgaaaaggaaccgtctgcaaaaggaaactcggactattctcaggttgcaattgttaacaaatgtgatgaaagatcagattccgtacccgtagcagtctccggtactgacgtagcggaaggagaacagttttttgactggctccgggagggactcaatcggggagatattagttttaatggtaaagcagacaaaatccatgttattgccggctatgtctttttacccgtccccggtatctttttcgactaccttaaggccactggttcgactattcaacgggaaagcattcaggcttcttttgagcgacttaacctgcataagcgtcgtgataacaggagattttattttgctcagctttacgatacacccgacaagtccgggaggttcaaacgggtaaaaggctacctggtgaaaagcaggcgggtatacagaaagaccatccctcaggacagtcagttcattttgttcccctga

SEQ ID NO: 193556 - DNA, 1002 bp, Klebsiella oxytoca; identical to SEQ ID NO: 81319

SEQ ID NO: 193557 - DNA, 3648 bp, Klebsiella oxytoca
atgtcaaataatagtaaaatcatacccctccttaaaaatatagcttctcgattgtgggaaggacatgcagctgtgttggttggagccggtttcagccgcaatgcgcagcctttaagtagtgcatccaggccattccctatgtggaatgatttaggagatatattttatgaaaaagtctactgtgatcaaaacattaataaatattcaaatgttttgaagttaggcgatgaagttcaagcagcttttggtcgcgcaactttagataagttaatattagagaatgtacctgataaagagtacgaaccatctaagttgcattcgtcacttttatccttgccttgggttgatgttttcacaacaaactatgattcattattggaaagagcgtgtgtgtttgttgattctaggaaatatgattttgtcttcaacaaaaatgatctaataaatgcagaaagaccaagaataataaaacttcatggcagcttcccttctgaacgtccatttattataaccgaagaagattatagacgataccctatagataactcgctattcgtaaatacggtgcagcaatctttaattgaaaatactttatgtctcatcggattctctggagatgatcctaactttttaaactggattggttggattagagataacctaggaactgaaaactcccccaaaatatttatgattggattattttctttcaacgaggcgcagagaaagcttttagaaaaaagaaacatagttatagtagatttaagtttgcttgacgactttgaaggtaatcattatgcagcacatgagcgttttattgatttcttaattcaatgcaaaggttctgacaaccagtttgattggccagtcaatgattataatgaagtacttaaccacaatgattcagacgaggtaattaagaataagttatccgattgtatttcagcctggacgcaaaccagaataaattatccacagtggataatagcacctgaagataataggagaaaactttggagtaacactataaactggcttcacatatgttcaaaagaaaaaatctggaaagaacaccttgatttgaacttttcttttgaactgttatggcgaattgataaatgtttatttccaatcttcgatgatgttgcaaacttcttttttaatatagttaatagatataaatcctttttattttcgaagaaaaaaacggcagttcatgaggaaaatgatgtcaatgctaaattaccttatataatcataggtcttttgaaatattgcagacaagaatcattagatagcaaatggaatgagctaagcctcattatgaatgctcatattaaaaatataacaccagaaacacgtgccgagtatgaatatgagaacatccttcaatcatactatcttttgaatttcgatgaggccagagcgaaaataaacaattgggaagtgagtaaacagttaccgtatcacgaagtaaagcgagcaggtttattatctgaatttggcatgcttgaagaagctataacaattcttgaagaatcgctttctatcattagacggaatagcttatccccctctaaaaacaatgactattcaagtgcttcacaggaagcatatgttatttttatactcagaatgtttaagcgctcgtggtcttttgctgaaaataatgaagaggaggatttatcaaaaaaatatcgttctcgcctagcttacctttcccaatatcgttgcgatcccgataatgaatttaaatacctcgaaatcagacttgaatctagtttagaatacgacacctcaaagtctaactctgactttgatctaggtcgaaggacaaaaacaactcattttggtaccggggccattgatacctcagctcttagtgctttcaattttttactattagctgagagcataggattgccattccacataccccaaatgaccatatttggaaaaacagcagtaaatgctgcaaaaaacatctataagcattgcccgcactggtcaatatttactgtgctacgcgtatttagtgaaaagaattttgaggcgatattaaatagaaccaacttatcaataatgggaagaactaacgcagaacttcaattcgacaaatatattttaaaatatgaaaacatagcagcaaaacaattaaatgataaattagccaattctttagatattgaaatttcgatgctaaagatgatacctgaaatactttctcgattagtaacaaaagtctcattcaatagaaaagagaaggtaatatctttattatgcacattatataatgcgaaagaattttccgggtatgattatacaaaaaaccttttaacgcgaacaataaacaacctgagccttgagcaaaagctacagttaattcctgcctttgtagagttcccgtccaaacccttaaacgaaaacatcaagcactttcaaaaatataatttcacaaacccattcggattaataattagcattgcaaatgccaaaaaatcaaatagtattgacagcaagaaaataccgtctataaaaatcgcaagaaatattgccgagataaacagcgatgacgaacaggtcagacgtatctcttcaacaaaattaattactttatataaactctgcatgttgaataaatccgatgaaaaaaaactaatcaaagcactatggtctaaacaagatgaatatggtttccctaaagaatcaggatattattgttttttctttattgatgatttaaaacctgatggagaagacgttactgaaaaaataatgtatttaatcaagcagttttcattccctagacaaattgagaatagcgtatctttaacaggtggcatttcacattactgcaatgaattagtaggggcactttctaatatagctttctcagagaatgatatacagacaatcatttcaaaattaattgaatggtattactccgaaaaacactggcttgataaaaaagatgaagtacttaaagaatttgtgaagcgatttaaaaacattacaaatatagtcaccgtgattctaaaagaacataatcaattaataaatgaagatacaaaaaaagaagttggctcactactgttggatatgcaaagcagaggagtgcccgttggtagagcactcactactctatctataattaataacacacatttaccagaacttttttccgacttaaagaaacaattctatcaattaaatgaagaacctgtgattgatgcgatagaatcaatgtatattttattagaccaagattttgacattacccaatttctatcgctaattagccaaaaaatatgttggaatcgtggcccatgtgttcaagaaactttaatcattgcccttgatataataaaacgtaaaaaaattaatttagacaattgttttatcgacgacatgctcgccggactcaataacatacttaagtcggatagtgaactcggagatagcaacgaatcattcttggatcatctggagaagaaagtaagcgcagctaaacttgcatcatatttatatagcgagagcatgaatctaggaaaagaaattccgctcacccttagagaatggagagatcattgcacgtcatcagatgaattcgaagagattagaaacgcttggatctctaatatttattaa

SEQ ID NO: 193558 - DNA, 348 bp, Klebsiella oxytoca
atgtgtattgcagagcatgaaatactatggattttcgacataaattggggaagtaaaatgacagatccttttttccttaacgaagcatcaaaactgccgcttaatgagattctgaagagattggaaactctgtatgaagatggagcgatgagtgatattgaacgtggaatttatcgccaaatcaaagagaaaggtctcagtagtctctcagagaaacagcgttggcattttgataatggaatgatcccacaatgtgttgaaagatgttccattaagggatgtactaaccctacctatcctggtgaggcttattgtgacattcatagcgttgagtacggtgacgattga

SEQ ID NO: 193559 - DNA, 1365 bp, Klebsiella oxytoca
atgacacgcagcaaagaacagctctggtctgaacgtcaggggaacaatacccgtaggccagatgaaataaggtcggaatacgaacgtgatctttcccgactaatccactcttccgcgttcaggcgattacagtcgaagacacaggtgctggggctgggcgagagcgacttctaccgcacacggctgactcactctatggaggtagcgcagattggcagcggcatcctgtctcagctgaatatacgctatcccgttggggtagcggctgaggcggaattcctgcctcacccaagccttatgcaggctatctgccttgcccacgatatcggccatccccccttcggtcatggtggtgaagttgcgcttaactactgcatgagagcctatggaggctttgagggtaacggacagacgctgcgtatactcacccaattggataagtacaccgagtccaacgggctggatccgacgcgcaggcttattctaggcgtgctgaaatacccggcaagctactctgaggtagtcaacgagagcgcttacggccagctagagtcaggaagccgtgaatggctgtttaaatcctccggctttaagcccccgaaatgctatctggactccgaagcggatactgtcagcttcgcactccaaccttttgatcatgatgatgcgctgttattcagatccggaagaaagaccaccgagccggttgagcacaggaaaacgaaatataaagcgctggacacaacgattatggacttagcggatgagatatcctactcactccatgatcttgaggacgcgatctcactgagaatgatcgacaaaagcatgtggatggactacttcagtgacaagtcgcatctgtttgaagcatgtcaacgtagctcgtttgacctgaccgctgaagacgtagccgataagctgttcggcagaagctaccttcgcaaggaatgtatcggaacgctggttcatctgatgatcacaagtgtcacgcttcaggtgcagcatcctgatttcaagtgcggaatgcttcgctataaagtggcactacctgctgaagtcgaagccttacgtgaggccattttcagtctggttgaggacaaggttatccggcacgaaaacgttcagctactggagttcaaaggccagaagttgattgtagagctgttcaatgtgctggcaagcgaccccacacgttttctcccggcagagacgtgcaagaagtatagagaagctgaaaaagctgacgataaaaaaatgcgggtcattagcgactatgtttcaggtatgacggacgagtacgcgacccggatgtatgagaaaatctttgttccgcgcaaaggatcaatctttgacagactctga

SEQ ID NO: 193560 - DNA, 567 bp, Klebsiella oxytoca
atgcgcaacaaacggccagcagcccgtaatattggaatcgatattgaccaacaggttattgatgtatggcgcggcggggatattccctgcgaactcattcaggatgacgctatagcgtatctcagtacgtttccgtatcagggtagtgaactggtttacgccgacccaccctatgttcatagcacgcgtaaacgtagcaaaatctatcgtcatgaatattcagatgacgatcatcgccggttgctgcaagtgcttgccaggttgccctgcatggtcatgatatccggttacggaaatcctatctatgacgaaatgctgagcggatggcgctgcgagcgatttaacgccaagactcatacgagcgtgcgtgaagaatgcgtatggatgaactttgatgttcctgacaggttgcatgacgcgcgatacatgggcagcagttatcgggaaagacagactctggcccgcagacgcactcggctttatgatcgcatagaacgaatggaacccgcagagcgcaacgaactgatcaactggctgaacgcaacttatggtctggagactgtatga

SEQ ID NO: 193561 - DNA, 846 bp, Klebsiella oxytoca
atgacgcagcgcggagcggtcttcattggaccgacaattatcaatcttgactttccagctccggaacaggatatcctgccgggagttcggtggggaagaattgaggcgttcccatcgccagcgtactgggcctatcaaatactcgcccgtcgtctggaagtcaatgccgtcaattacaagcttgggcgaacgctcaaagaggaagtgggtgcctgcctgctgggtggacacggcataccagctgcgataggccttgccgcattcaataagctgaaggattgcggtgcgtttgatgctcagccaccatctgaagccactctttacgaatggctatcagagcccattaaaactggtaacaaatcagtgcgttaccgctttgctcggcaaaaatcgcgctatctctcggttgcactaaacaggctggatgtagagatgccgccgacggattcgggccgtgctctcagagactggctgacctccattcccggtattggtcataaaacggcatcatggatagcacgtaactggctctgtgcggatgatgtcgctattctggacattcacatccttagggcgggattacttgcaggttttttcccgggagaccttactgttgaacgtgactacctgaagctggaacaaatatttctggagttcagtgaagctatgggcgtaaaagcatccgagctggatgcgcttatctggtatgaaatgcaggcctcttccagtacggtgttcagtctcatcgaaaacatgcgcgaccagcctcttgcgaaattgcgccctcgttcatcgcgagccaaaaaccgccagtccggtaccagccagacgaccttccagttttaa

SEQ ID NO: 193562 - DNA, 684 bp, Klebsiella oxytoca
atgtcggatatgacttggaccgttcccgctagtcctgttcctcgcgaacagccactcagttatcaacccgttaactggcccgccggagatccgttttttctgccgcctccttcggagaatgcagtgcttcccggattgaatgatgtgatcgaaacccgtagaacacagcgaaacttcagccacgtcagtcaggcccagctatctcactggctatggctaaccggcagagtgatggctgtgggacattcaagctatggctttccactaactcaacgccccgtcccctccgctggggccatacatcctattcacattattctttccctccctgaacgggatgggtggcagctgtatctgcctgacatgcacgcgctggcaccgcttcggatccctgagcagacccgattcgaaatacgcgatgagcttttgccggtaattgatatccagagcggaattattgtcagacttatcgctgagccgggaaaaacgtcagcaaaatattcagatgctgatagccttgtttggcgcgattctggtgttcttgttgggcagatggcgcttgttgccgaagcgctagaatgcaatttttgcccgctgggcattacaggccatgactggtgctccggattaaaactggaaggtcgtctggctggtaccggactggcggtttttggctcgcgatga

SEQ ID NO: 193563 - DNA, 606 bp, Klebsiella oxytoca
atgaaaaccgcacttttactttctggcggaatggactccattgctattgcctggtggaagcgcccggatatagcactgacactcgactacggtcagcaagccgccaatgccgaaattaaagctgccactgccacctgtgaggcccttggaattgagcatcacattatacgcattgactgccgttcgctgggatcaggggatatggctggtaccgctatggatccgaatgcaccatcgagcgattggtggccgtatcgtaaccagatgctcatctcgctggcggccatgaaggcaataacgcttggcgtcacgcacctgtggatcggcacagtgaagtcagatgaaacgcatctagatggtaccataggctttatcagcagaatcagtgagcttatgtcgtttcaggaaggaggcatggttgtcgaagctccggcaattacgttatcaacctctgagttgatcagaatttcagatgttacgccaggtggcctcgcttgggcccatagctgccataaggcaaacatcccatgcggcaactgccgggggtgcaataagtattttcaggttctggatgatgtcggatatgacttggaccgttcccgctag

SEQ ID NO: 193564 - DNA, 1242 bp, Klebsiella oxytoca
atgagcaacagcaaaacggtcagtacggagatcatcactattgcaggcggtgcctatcatgaaattatcctttatccaggaaatcaccaggtttacggttcagcgggaagggcggcatcagcactggcaacgctcggtgtaaacgttgatttgtacacctacgctgatgaagtagtcaattcggttcttcgagaacgcgcctgttttgaaaacttcacgcttcatacgaatgaagtacgtgaatccgtcatattccattatgagcatgggctggcggaacctcgaattttcaattacccggacaccccttacccggccattacagtgaaagcgccctgtattctacgctatggaatgctggagggatccgctgtaatcgacgcggaatacgcagtatatgatccccagaatgtgaccaatccggagccattcacagcaaacggatccagagcaaagcacctcgcattgatccttaatcgctatgaggcgaagacccttagtggccagagtgaattatccgacagagagcatgcagagtttctctacgaaagtggtcatgccgaagtcatcattatcaagcagggcccagccggtgcactcatctgcgataaagggaaaatatcctatatccctgcctatgagacaagtcgggtcaacaaaattggatctggtgacgcattcgtagcctatttttcccgtgagtggatgctgaacaaaaaaacagcccacgatgctgcgaattatgcctcacttgccaccgcatgctactgcgaaagcggactttttccttcagcagaagggctggctgctttcagtcccagccccatcaagctttctcaggcgttcattgagggtggcaacagaaaagtctatctggctggccccttctttaccttggcacagctctggcttgttgagcaagcgcgacggaacctgagcgatcttgggctggacgttttttccccctaccacatggttggacacggacccgcagaagaagtagtcgaaaaggatcttgatgcgatacggcaggccgacatcgtttttgcaataggtgatgcactcgactccggcaccatctatgaagtcggttacgcacgggcgctaggcaccccggtggtgttctatgccgagaacgaatcggaagaggatcagaaaatgatggaaggatcaggatgtatcttgagcaaagattacgtcacagcaatttataaaacgctctgggtggccgctcaaaaatga

SEQ ID NO: 193565 - DNA, 333 bp, Klebsiella oxytoca
atgtcaggctctggtgggggtagctttggcggccagttcggtcaggatgattttgaagtgacctgtgaaaaacttacgattgatactcagttaagttcgcctgatccgcatgtcgtagcgcagctgtcaatcggcgtgattatggggattatgcaaatcaattcaaatgggactctgctaacggttgctatgcacaacggtatgcaggctgggggtatcgcttctccctacatccagcgcctccgtgactgtatgagtaatggtactacctatgttgctaaagtgaccgccattaacggtggtcaggtcagggtcagtgtgtacgcgatatga

SEQ ID NO: 193566 - DNA, 1173 bp, Klebsiella oxytoca
gtgaaaattttaatagttgatgataatgctgcaagatgtgaagaagttaaggctcttttacaagaagaactaggaattggcgagcctgatatttatacagcatataacacacaatcggctaaaactttgatgagaagtattagattcgatttcttgattttagatgtggttttgccaaagagagatgagccaccatgtgctgaatttggccttgccctattaaatgatattaagaaaaggcctacaattaaaaagcctggtaaaattgttggtattacagcccaatttgaagatcttgagtcttttagaacacaatttgattctcattgtgaagtattaatcgaagcatctactcgctcaaaagattggaaaggtaagattttacaagctgttaaatttgaaaactcgaaacttatatcgaagtatactactgaaagaaatgtcacctgcttatccgttcacggaataagaaccagaggtgagtggcagcaaaaattcaagaaaattgtagagtccaatgttgacacggtcagttttgaaagctacaaatatggatactttactgtattgtcttttatgataccattcttaagacagataaaagtcaattcattcagtaaagaactaaaaaggataaatcttcaaggtaaagaaatttttatattttgccatagctttgggacatatattactgttaatgctatctccaaattattgtccgaaggaactacagtcaatatcaagatgctggttttatctggtagcgttcttccatcaaactatgattttcataagataatgactttgacagatatgaagttgataaacgattgtggctgtgatgatagaattcttcttctttctgaagggcttgtaccaaatacaggtatggcaggaagggtaggattctatgggcttaataatgcaaggtttgtaaatagattttttaaaggtggacatagtcattattttgatgaaggtagtggattcatggaaaaatattggctgcctctattctatggcgattctaatatagaagtgatagatcagagatgtgacagtattgttacctctggtattattgagaaagttacatctgggcttgggaaagttaagggtataatatatctcacagccttgtttttttgtttttattattttttcatgaaatga

SEQ ID NO: 193567 - DNA, 459 bp, Klebsiella oxytoca; identical to SEQ ID NO: 144339

SEQ ID NO: 193568 - DNA, 3309 bp, Klebsiella oxytoca
gtgactaaattgttaaataaacaaaaaagatttaaaataaaaccaacgcatgaaattgtaagttctgtcttgaacccaagccgctttttaggtagtaaaattgatgcaaagaaggcctgttttagcgattttgtctgccgttcaaatgatgaagactttaacagggctataaatataatccttcgggatgaagaaatatcaaacgcgttaaatcagaatgttaaatctattaaagaggcgttttctagaactattgtttcagcgaataatgttagtaatgcacgaataataaaattatataatgctattcttttgagtaaaattgatagtctcagattatatgttgatgctaagcaaaaagtggaagagttgtttgtccatggtgaccttaatcaagcaataaatatactggacgagttaaatgaaaatttaggcttttccatttgggaaatggaagtcaggtttgcaatatacacaattagaaaagaatatagtgccataactgaatatcttgaaaaaataaaaggtgagacagatgatgagtttctacgggatattgcaagggtaatagcatggaaatctcaaagcgtcgatcctagtcttattatggaaactatggttcgtaggccaaataaagagtttatagatggaaatgcttttattatagctgcattttattcacttacatgtcttcattatccactctacaacgatgttgatttaatgcatagtatgaaatggttgcaactattacctactatagatttatttaatgctgtaaaaaaaatcacagtatatggaatgggtaatgggtgcctaagtgagattgaaaaaaattctttaagagatctgttcgtatccttgaataaggagttgaacttacgtgatttacgagagatagtaactacaatttcttcagaaaattcggctcagagtattttgccaataactgatgatatcatattaaattatagcgagggaaattacgaatatgttatagatgcagtggaaacaagactaaatagtcttgatgatattataacaaaaattaatatttttgctaaatcatacatccattcgaataggaaaccaaatgggctacctattttcctgaatgaagtcatcaataatctcattagcatatactctctaaaggatgcaaatcaggcgataatgcagcaggttgggttgattgtaaaatattcagtgctagatgtttccgatcatttaatgataagtgttttaaaatctgcaccgtatttcctttcagctcagcagaaagatggaattatctttaaatcaaagtttctggaaaaacagcttaccccgcttgcatgccaccttgatgaatcaccttcactatatgaaaactactccttggatttaaatgtcgaacatttaataaggaagagaactgcaatttttgctgttttaaataatgatgaaaaaatgctggataaagttaaagactattatgaggttgcacctattaagaaagatgcaattgagcttatggttgaatgctttattcgatgcagtgataaaaaatcgttaattgagtacgcttcaaatgaattgattataaatccaaactcaaatatatgcttgcctttgaaggatattgttggttatgttagcgaaaataacttatatactattgattctgtaatttgcagctattattataataagttttcatcagaggataacagctctgttttgaatgaggtttttgaagagtatataatttctcgcgatgtttttcgtccaagtgaattagttactggtgaattatctaaaaaagaaataatacttttaaatgagatttctaaaattgacgtaatggattatttaggttgtttcgataatgataatgatttgaaaatagaaaggataaaaattttaaataaactcgtgtccgcaggttttttatctcaaacaaatgttgatggtgaatgtaaaatgatcgtagacgacattctcatcgaaaatgaagcagcaaaatttaatgatgctaaaatatatattgatactagatctattttaaataaaagaaagaatgatatagaatcgttacttcataagtataaaaatagcttagaagaggatcaagttaatgacaatgtacaatatgaaattgaatctatggcaatacttaaaggcagcaaaaatgaaattctaacaagaatgatgaacatacttctggttgaatattttaataataaagaggtcggcttggataaaaatttaagctcagaaataagacatggtttttttggtaatttaatttgttcaggacctcaaaacagacacctgcttacagaattagatggaagtggtaaatataaatccaatcaatattggttggaatactataaaatgataagttcagaaatattaaataaagttgatgccttgttagttaagtttagtgaggattttaatcaaattatagaaaaagcagaacagtggatgaaagtatctcttaacagtgatgatactgatagagtttttgtgttcaactttactgttgaagaatttaatatgataagagatctggcagatgcctctgtcagtgttgatgaaattacaaatagtatgtttcatttatttaatgaaaagctgctaagttgccttgatactatgaaatcaaaattaaatgaggtttttgcttctcaggtggatgatttgtttactgaccttatcgataatataaatgccgcgaaaagtacaaccggtatgaattatttgttggaggaaatcagattggcaaataccgaggttaaagagaatatacgaactgtatgcgagtggttttcccttaaaaaatccgtagatttcgaaagtatcgagttagataaattaattcgattagcagagcgttgcttcaaacaaattaatagttgtgatattgaaattcatgttgaatcgcacttgaatcataaaattgatggcggtcaattatatgcgcttgtgttttgtatccttaattgttttaataactcatataaatattcaagtgaaaatagagatatatatgttgaaatcactggtgaagagagcaagtgtttttccattaaaatacttaatgagataagtaatagcacgttgcagtatctgcagaatggagggattgatcttttgataagtaagttagcagatgctgacaataatgatttactaacaaaagaaggtggttcagggttatacaaatcacttcatgggttgaaaactgtttcaagtaaatataatttgcagccaatgattgttaatgataagttctgtgtagaggttacatatgggtattga

SEQ ID NO: 193569 - DNA, 2034 bp, Klebsiella oxytoca; identical to SEQ ID NO: 144295

SEQ ID NO: 193570 - DNA, 1560 bp, Klebsiella oxytoca
atgatgaataacatcttaccagcattgcctaccgagaaaatacctgcaaaatcaaatggatactttttcacgttgcatgaagctatgtggagattagataaaaacaacaatatttcggttggtatgatacatgaccttctggatcctgagactctgagtgggtttcttcataccctgtcattttatgccaggaacctgtccgcggcatacacgagacatattttcctgtgtttcttagacatgattcgtgcaactaaagctactcgtattgacgatatcatgttgattggatataggtcttctttggatgcggctcatgagcatgagttagcctgcgttagtgttttactgcgaaagtggcacaagctgggctatcccggtgttagcaagaacgtggcgtgtttgctggagggatggaggttaaagggggggcgtaagggggatgcggttaagcgattggatcctctaaaggggccgttgacggataatgaacttcaagcgtttaacgaggcggttgtacgagcttatgaaaagagcttaattaccatcgcggagttggctatggctcttagcgtcagtcatacagggcgtcgttcaatccagatctctcagctgcgcgtggttgatattctctgcggagaaaatgaaaagggtgaacccttctatgtgttgaatgtgccgcgagccaagcaacgtaacagcttttttcgcgaaagcttcaagccctatgcgatgactctcgaactatgggcagtcctgagtgctcaggcaaggaatgctgttactctggttgagaatcgtctcgggattgaattgcaggaagctgaccggcagcagatccctctgtttcctgatcttgatgtgctagcgaccatccaatccccttatgaattctaccaactgcttgccactgacaaactccacatcgccgcttcagtgataactaaaacactccatttaatcgtagaagaatcagatatccggtcagaacgtactggtgatctattgcatatcaattctcgccgctttcggtataccacgggcacacgggctgcccgtgaaggttttggcgagttggtaatagcggaactgcttgaccatacggacacccaaaacgcaggtgtttatatcaagaatatacccgagcatgtgaaaatgctggatgaggcggttggttttcaattggcgccatacgctcaggcatttgtcggggtacttgtagattcagagagggatgcacatcgaggtgacgacccaaccagccgtattcggaccgaaataggtcaaggtgttggaacttgtggcgaacatggcttttgtggcgccaatgtacctattccttgctacacctgcatgcattttcagccatggctggatggcccgcatgaagatgtctatcagggcttgcttaatgagcgtgagcgggtgaaagagataactggcgacatccagattgctgccgtgcttgatcgtagcatcatcgcggtggcagatgtgattatgcgttgcgctaaacgtcgtgaagagcttggtaaagagggattaattaccaatggctga

SEQ ID NO: 193571 - DNA, 1191 bp, Klebsiella oxytoca
atggtagtggatcgtgcttctggccttcccatgtattacccaactttgtttttaacaacccaaatccgcaataaaggcaatgccttctcaacgacgctagctgctgctaacaacctagtcttgttgttacgctttctagagagtcgtgacattaaccttgaagaacggttattgaccaaagatttcttcaagccacatgagatggacgatctgcgagactttgctcagcgcaagcaaggcaggatgccatcaaaggcgctctccaatccttggctggatgatgagttggccaatatcgtggataacggaacacaacattcccgcctaacaacgtttgccaactatttacgctggtatgctatgcatctcttaaagatgcctgagctggatgttggcgaacagatcaagactatggcgacgcaaataaaggtgcgccgaccgtctaaaaagagcagaaacagtacattgcaagacaggtctttgagtgacgttcaattggatgtgctatttgagacgatcaagctcgattcagagtggaatcctttttcaattgatgtgcagcgccgcaatcggctgatgatcttgcttctgtatcatctgggcatccgaggtggtgaattattgaacatcagaatacaggacatagattttagctctaacaggatccgtatcgttaggcgagcagatgaacgagctgattctagaaccaatgagcctaatgccaaaaccagagaacggctcataccgttggctgaatccttagctcaagaactgcacagttatatcaccaaagatcgccgcaaagtccaaaatgcaaagaaaaatgactacctgtttgtgacttacaagcgtgggccaactgtcggaaaccctatctccaaggcgggttatcacaaaatattttccttggtcaaagatgtatcgccgcaattgtacacagtgactggacactcgctccgccacacatggaatcgtaagttttcagaaagaatggatgccatggatgagccagtcagcgaagaacgacaagagcaaatccgtgcgtacttacaaggttggaaaccgggctcaggaaccgcagcgacttacaacaagcgtttcattcagcaaaaaggttttgaggccgccttggctttacaagagggaaatggcactcgcttaccaaaggacatgaagattgatgatgaataa

SEQ ID NO: 193572 - DNA, 216 bp, Klebsiella oxytoca
atgatgaattgtccaatgtgcggccaggccgctcatacacgcagtagctttcaggtttccagcgaaaccaaagaacgatacaaccagtgcaccaatattgagtgtgggcatacgttcgtgacgcatgagacttttgtgcgatccgtatgccgaccgcaaaaaattagcgccgcaccgcctcatccgaaaggaatgcaggaacaattagcttactga

SEQ ID NO: 193573 - DNA, 423 bp, Klebsiella oxytoca
gtgattgccagctggctgcatacccgcgagccaaagaagaaagagactacgcaggtgaaacgacgcaggaagaaaaccgctgcgcccaaagagccggaagcaaagcagggcgactatctggtgggaaccgatgaaaacgtgctggtactcaaccggacttatgccaaccgaagcaatgcggagcgtgccgcaaaggctcagtgggagcgcctgcagcgcggggtcgcgtcattctccctgcaactcgcagaaggccgggcagatctctacaccgaaatgccggtgaaggtgagtggcttcaaacagcccattgatgatgcggagtggaccatcaccaccctgacgtatagcatcagcccggataatgggtttacgaccagtctggatctcgaagtgaaaatagatgagttcgacattgaatga

SEQ ID NO: 193574 - DNA, 312 bp, Klebsiella oxytoca
atgaacgcacaactcaccgaaatcatgcgccttatcaccaatctgatccgcaccggcactgtgaccgaagtggaccgggagaactggctatgccgggtgaaggtgggcgaactcgaaaccaattggattaactggctgacgctacgcgccggtggtgcccgcacatggtggtgtccgtcgccggatgagcaggtggtggtcctgagtatgggcggcaacctagaaaccgcttttgcgctatcaacatcacccgaaaggcaggagacggacaccggttcaccctggcagatcgcggagcgtacactggcgtga

SEQ ID NO: 193575 - DNA, 642 bp, Klebsiella oxytoca
atggaaataagaaccagtgacggcctttttaggcaactaactaatgagaaagcatggcggactcaggagatcatacatttgagaatgcaggctcaaggtaagtctggttctttgaaaaatacaattataagatctggtgttgctatatgttattctcactgggaaggttttataaaaaattcaactgaatgttttttgaattttttacattaccaaaagttaacgatggattctttgcagcttgtttatattacacattcattaaagaaagagatttacggattttctgaaacaaaggatgtggaaacatgtgtaaggtttttatctgcgatgcttgagaaaactactgcagttgcttccataaaacatgaaaattacgttgatacccaatctaatttaagttcggcagtgtttgataatatagcgaggtcaatagggattgataccagtggttataaaacatactatccgtatattgatgagtctattgttaatgctcggaacggtattgctcatggtgagagattgatgatcgatgaagttcagtttgagcagttgacaaccactgttacgactttaatgaatatgtataaaaatgacattgaaaatatagtagcaatgagaaactatttaaaggtttga

SEQ ID NO: 193576 - DNA, 1092 bp, Klebsiella oxytoca
atgagtttacatgatgagttaagagaagcgaaaaaggaaattgttaaggacagctttgatatgtctataggtgagttggctcgcatttatgagcgatcagagatgattattaatcctaactatcaaaggttatttagatgggatgaatcacaaaaaactagatttatagagtctctattgttaggcattcccattccacccgtatttgtatttacggacgaagatggtcgctgggaggttatagatgggttgcaaagattgtctactatatttgaatttaccggcattctaaaaaaagatgatgggggagtgtatccaccatttgttccttcaggaacccgctcacttccatcattagatggtatgaaatggatttcagatggtgatgatgacattaatgttattccactttcaacacgtttagattttgaacggtcacgcttaagagtggagatacttaaaaaagaaagtgatgaaaaaacaaagtatgaactttttgaaaggttgaatacaggtggttctagcctgactgatcaagaagtgagaaattgcattatggttatgctaaataaagacttgtttgaaaaattagttacaatcagcaagtacccaagttttgaagcggttacattgcaaacggataaatcaatttctgagcaaaagccaatggacctggtattgcgatttcttgcatatcggtattcaactttcgataaaagcgtcgatatcaatgaatggctcaactcaatatctagagaaatttctgttgatgatagttatgatgttgatagtgaaattgaagtgtttaaaaaaacgttcgatgtgttgcactctagcgttggtttaaattcatttaaaaaatatgacggtacaactttctcaagaagttttttgatttcagcgtatgaggttattacaaaaggtatttcaacaaatatagccaaatatgaaaatgaaaccccgcaatatattgaggataaaattaaggcgatgtggcttgatactgattttacaaattatgctcgtgcaggggtaagtgcgccgagtagattgattaaaactttacccaaagcaactacatggtttaattag

SEQ ID NO: 193577 - DNA, 465 bp, Klebsiella oxytoca
atgagagaccctcgtcgcagatgtaaagcacccggctgcggtgcctggtttaactttacctatccaaatgtttactggtgttgcgaagagcataagagccagtacctagcgcatcagcgcgagaaacaaaaggttaaggcacaaaacaggttaaaaaataaacccgttcaccatatccgccctcaaccaacgacggctgaaaaacctctcagccactggctggaagtcaccgagcgcgtggtcaataccctttgccgtgaaatagcccttgctaatggggaggggtgcatttcctgcggaacccaccaggccaaagtatggcatgccggccactacagaaccgttgctaaagcctcccacctgcggtttacccgcataaatatcaaccgcaccgaactggaagcgaaaggccacgcgtttatggcgctggcgcagtttgctattgataagaaggtgaccgcatga

SEQ ID NO: 193578 - DNA, 654 bp, Klebsiella oxytoca
atggctgatattaatgatgagtattcttatactgatgaacagctagcaatcattgagtctatcaaaaggcaggatgggttctcgcatatatcttggtatcatgatgattttacaattattaaaagtcaaataagagagttctatcgaatccaacaaagagggctttgtgctttctgtaaaaatccattgtctttacaagccgcagccaattgcactgttgaacatataattcctaaatcaaaaaaagtcgattatatgtttaccccaaaaaatctttgcgtaatttgcgctgactgtaacgaaataaaaagggcgcaagaagtcatcaatgaagatcatgaggttttaaacaaccctgaaatagcaatgtacccacgttcaagtggtgcttttatcattgttcacccacatttcgatgattggtatgagcatattcacaaagtcggagcaagaatatatatagataaaactttaaagggaatcaatacaatgaaagtttgtaagcttaaccgattctttcatagacttggcgtttcggatgaatatgtaaacgatggagaattaacttcattaatgagtgaatatgttgagtcaaataatttcattaggaaagcagatataattaacagaattagagagattctcattgcatga

SEQ ID NO: 193579 - DNA, 1248 bp, Klebsiella oxytoca
atgaataaactcagcatactaatggatagaatcctaagtgcttatgaaaatgaatactttgtaatcataggaaagaatggagaaggtaaaagccaattattattggacattatcaaaagtatttccgcttcggatcttcacttcaaaaatttaatttccgtttctacaagtgcttttgaccgctttccattgaatataagatctccaaaaaaatatgagccaatgacttactcatatgtaggggtgagaggaggggctagtaataatgttctctcattaatgagttctgtttcaacaggtttcatatctaaatacatttcatctcctaaagatttaaatagatttagtatggtgttagaagaaattggcttttcgactaattttgagtatgtatataagttgattattaatccagagggtttacatcgacaaaacatgctaatcgaagatgaatactatatacttgatggaaataaaagaacaagattagattgtacccaacaagaatttgaaaaaatcatagattttattcaatatgttaaaggtatttgtgataaaaataataactttaggatgtcagtaaatccagggagggattacttcaatgacaataactcaatgagaaatatagaattttttcattatatatttaagatgatctctcttggtatcgttaaattaattgacctaagaatggaaaaatactccaaaggagttatctcattgcgaagagcaagctctggggaacagtgtatattgctttcacttttgggtattgcagcaaatataactgataattcaattatattgattgatgagcctgaaattagtttgcatccagaatggcagcaacgttatattaacttattaatgaatacgtttgaagggttctataattgtaagtttataatcgccacacattctcctttggtgatatcaaacttaaagtcttcaaattgctatattttacctatgactgaatctgaaataataaatgcaaaagattacaacaatcgttcttctgattatcaattagcggagctgtttgagtttccaggctttcaaaatgaatatatcctaagaacagcaataaatctatttgctaaaatcagagccaataaatcattcgataaagatgatgaaaagacattaaaaaggctttctggttttaaatacaatctagaagaaaaagatccaaactatgatttgattactgccctagaaagcatgaaggtgatttatggctga

SEQ ID NO: 193580 - DNA, 1410 bp, Klebsiella oxytoca
atggctataggtttttgggtagtacagggcgataaaacaacatgtgggggttctctactgaccggacacccgaaagggaagaagattggcccgaatcaaaacagacaggcaacagtaggctgccaggtatcctgtggtaaacatccaggtaaatacagcgtggcaggtggataccctggcgaggtcattcacgggcagttagccgcgagtactatatacagccgttcaacctgcccatgtaaggctttcttcatccctactcatacttttatgaaacatggcccttatcaggcaccagtgaaagcagcacctgcgccagtagcggtgaaagccacgtctgagccagttcaggagccagaacaacacgcacagacagcaaaaaaacctgcgcaagtagaaccaaaacctcaagagtcaaaacgcgaacctgtagacgctggtttctgtattctcccttacggagccgaaacaagagcctatgaaccgtggttgttcgaaagcgaaccgccagcaggaacacgcgaactttatcgctcactaaatggtgcaggtaaggaatacaaagccggttctattatgcttctggtcgatcctgaaaagcaggacgacgaacaaatcgcccacatgaaagccgcgaaagcgcgagtcgatgcagcattggccccattgacgcatgaggaagctaacttactgcacaaacactacgctaccatagctaatttcaccagctacgctgatacaggaattggccttgctgctgatcctgttggaaaatactttgagagtatcgaaaaaatactcaaagagatccaggaaacatataaaaacacctacataacacgtggtgcattaattggtgaacaattttatgtccgacgtagccagttgtttaaagagcttgaatccatactcaaagtctacttcctgaataaggctatgaaattcggagagtataccaaaataaaaaatgcactcggcctgtccagtagctctattacccacaaatggaatgaaacggggatcagtgacattgaaggttatgctacccacatcgaacgggcagctaaatacgtaaaagcaatgcgttacactggttatttaggaattggttttagcggactccattctcttaacgaaatccatgaggcatgttctgttggtcgcgaagctgaatgtaccaagaaaaagtatactgagattggtagctttgctgtaggtacgggggttggtgttgctggtggctatttagcaatacttctttgtatcgctatcggtgttggtactgctggtgtcggaggacttgcttgctctgtgatcgctggggctggtttaggctatgtcggtagtagtgcaggtggcgcattcggtgaatggggtggagaacagctgtatgaaattttcggtaattaa

SEQ ID NO: 193581 - DNA, 486 bp, Klebsiella oxytoca
atgaagcaatacaccaacgaacttatcccatcagtgctcacatcattcaagaacccattcagcccagatcaactggcagacgcagacgaagaacaacgtcagattttcaaatcccatgttgaagaaatgaaagaccgatctttagtagcgatttggcgttttgccactgcgggatcactcacccaaaacggtgggaagattgagaaagccagcgccaacaactcatttactcttgaagacgggagcgaggttaatcgggcaatggttggtgattacgttgtttatcctgacggaacacgcgcaagaatcattaacgggtcggggtcagtcaataccaacggcaacggcgtttcttatgccctcgtagggagccagcttgataacggtgatgtgattgttagcaccccacaagattatgctctcctgtgccagttagacaatagcccagcaatgccagccgatttcctcactccagcggcactctaa

SEQ ID NO: 193582 - DNA, 2169 bp, Klebsiella oxytoca
atgtcttctgtaacgtctaacaagcaaccttcttcagaacatgatgaaattgatttgggaaggattgttggagaatttattgatcatcgtaaattaataattacgataacagctattttcactgcaatatcaattatttatatgcttttttcaacacctgtatatcaagctgatgctatgatacaagttgagcagaagcaaggaaatgcgttattagataatttaagtcaaatgttacctgatagccaaccgcaatctgctcctgaaatagcattattacagtcaaggatgattttaggtcagactgtcgaagatcttggcttgcaggcaaaggttgaacagaattattttcctatatttggaaagggatgggctagattaaccggagaaaaaccccaacgtattgctgtaagtcgcttatatttgccaaatgattctaaagatgtgcctaaggttgagatagaagtaattgatgaaaaaaactatcgtataattggcgataatatcgatattacagctagtgtgggtgctcttatcgaaaagaatgggatctctattttgatctcagatataaaggctgatgccggcacaagttttactgtttcatatctaacaaagcttagagctatatcggatcttcaacaggctttctcagtttcggatctaggtaaggatacaggaatacttaatttagtattgatcggagaagatccgtcacttatatctaaaacaataaattatataagtcaaaattatttgactcaaaatattgaaagacaagcagcgcaagatgctaaaagtctcgagtttcttaatatgcagttgcctaaagtgcgcacagaactcgatcttgctgaggataagttaaatgattatcgcaggcaaaaagattcagttgaccttacaatggaagctaaatctgtcctggatcaaattgtaaatgttgataaccagttaaatgaattaacttttagagaagcagagatttctcagctttatacaaaggaacatccaagctataaatctttaatggaaaaaaggcagacattaatcaaggagaaaagtaaactaaattctcgcgtttcaggcatgcctgccacgcagcaagaggtattacgcttaagtagagatgttgagtctggacgtgctgtctatatgcaattgcttaaccgacaacaggaactgaatattgctaaatccagtgcaattggcaacgtacggataatagatagtgctgtcacacagcccaaaccagtgaaaccgaaaaaagctctgataatagcattgggaatctttcttggcttatttgtttcatcaggaattgtcttgctcagaatatttctgcggcaaggtattgaatctcctgagcagctggaagagttagggattaatgtctatgcaagtattcctgtgtctgagtctttatcaaagctccagcaacgtaagggaattagaaagaataaaaataacaacgaatggagtggctttttagctgttgagaatccggctgatttatctatcgaagctattcgagggcttaggacaagtctacattttgccatgttagaagcaaaaaacaatgtattgatgatttctggagctagtccaaatgcaggtaaaacttttgttagctcaaatttatctgcaataattgcccaagcaggaaagaaagttctttatattgatacagatatgaggaaaggctacgcctataaactgttcaaagtctcaaatgataagggcttatcagatatactttcaggtaaagtagctcctggtgaggcaataaaacatgttgctgctgctggattcgattcaatctccagaggaatagtacctcctaatccgtcggaactgttaatgaacagtcgctttggggaactgatagaatgggcaaatcgtaattatgacttggttattttggatacaccaccaattttagctgttactgatgctgctattgttgggcgctatgctggaactacattgctggtcgcaagatttgaagaaaatactagcaaggaaattgaagtcagtgtaaaaagattcgaacaaagtggaattttaattaaaggttgtattcttaacggtgttgtgaaaaaagccagtagttattatggctatggatatagtcattacggctattcatatgctgataagaaagattaa

SEQ ID NO: 193583 - DNA, 888 bp, Klebsiella oxytoca
gtgctaaatcctacgcaactctcagcgctatcaaggatgttttcttcgtcagtgatttccgagatagcaaaaaaaggtcagtcacctcttttttcaaggttactgtctgaggcatctgttttcgaatttgatgacgcagataatgtaactattggtgatgcctttgatacagcattttctttgctcagacgctcaggtttgagaaacgagtatgtctatcgttctgcgttaattcgaaatgtattattaggccgtcattctttgcgtaccgccagtatgcttactgaatttagaattggctctagcaaagcagacatggttattcttaacggttgtggaactgtatacgaaataaaatcagatagagattcgcttgccagacttgagagccaaattgagaattatagaaaagcattcagtaagatctacgtcattgcaggaactgcacatatccaagatatcttggaaaaaacatcagaagacgtaggggtgatgagtttggttcgatggaatagaattagtattgtacgagaagcaaaagagaatactgattatatttgcactgcaactatttttgattcactaagacttagcgaagctattgatatcctaaatgagttaaatattgacattcccgatctacccaacacattgatgcgtaatgcaataagaggtatttttaccaaactaaatccaattgatgtacagagctgcatgataaaaactttaaaaaggacgcgtaatcttgctccattaagtactttaattgcaaacttaccaagtgcattgcaaagtatagccctaatggttcagttacgtagtaaggatcgagatcgcttagttgagacgttgaataaacctcttaatgaagcatttaaatgggtttaa

SEQ ID NO: 193584 - DNA, 933 bp, Klebsiella oxytoca
atgtactatccatattttagaggtaagcagtttgagttaatagcgattcgtgagacagcagagacgatggctcaggctggtttcattccaattattgaaccagttaaagaaaccctgaatggattagaaaaaacactaaaagctatctgtgaagctaaaggtaaagctattgtaatagtaaatccttcatatggtgaccattcaacaaatgggcataatatctcgcaattattgaaagatagttttcatggacatgaaaacatttttgcagggatactattaaatgaagggatggatgaagaagatatcatagagttgcttgatgaacatgccgaacatcaaccttgtttcatccactctggattttctgagccccgctctttatcagaaaaaacaaatggtcgagtatccaaacatatcttcttagaactttattgcggtaaactctataggaaacattttaacggctgcgaaagaatattaattcgcgatggttttaaaaagagaaaaaatgctgattatcctcctattgaagagttttcagaccttcatataaccttcggggaagaaggaatggatggatttggcgattttttaatcgttggggatgactatactgaaggtggtggtccggcatatgcggtagcaatacatctcacgttcttagaatctaaaaaagaaaatattatgtatatttatcactttgtttcaacaacaagagatacaccaacagaccctgcggggaaattcggtcaggcacttgaaaaactcattacaacaataaatgagaataattctcctgtattggagacctcagctattttagaatttcgagcgttgcatgcaaaaggccatttccctggattgggaaccgtcaaaaaactctcaatgaggcaccatgttgaaacattagctaattattttaggggctag

SEQ ID NO: 193585 - DNA, 1029 bp, Klebsiella oxytoca
atgattagaatgtgttgtgctgaatgtttcaatgatataggattgcgaaataatataatccctacattgatgccacaaaaaggaaactgttctttttgtaatagtcaagatgttgatattattgatcctaaactcttgttggattattttgaactgctgataaatatctatgaaataaatcctgaagggaaaaatcttgttgaatggctaaaagaagattggtgcttattttcccatccaacaatggacaatgctcatgctaaagagttattgggagaaattctcgatgacggagatatagtacgaaagaacttctctccctccgaaaattataaaagcacaggccttgcgcaatgggatacattacgagatgaaattcttcacaaaaacagatacttccttgatgaaaaaattgacactcaaagattacaggaattactcaaccatttaaaagcatttaatatcccgcgaatatggttcagagcaaggataaatcaaactgatactccatataaaattgaagatatgggagcacctccaagtcggtatgctagtcatggacgagcgaacccaacaggcattccatatttatatttaggatcaatgccagatacagcgatctctgagattagaccacatacaggtgaaatagcaacagtagctgagtttgaaataccagaagaactaattatcgttgatttaagagagccgagaaaacatgtttctccttttgttctatctgatgcacaagaaataggaaaaatgcgggcagacataccttttctagaaaaattaggagaggaattaactcgtcctgtgttacctcgaagtgctgccattgattatatccccagtcaatatttatgcgaattcattaagaaaattggctttcatggtgtaatttacagaagttctgtaagtgaaggaataaacttagctttattcgatccaacattagcaacccctatttcaacatcacaatatgacgtttctcgcgtaagtgttgaagtacaagcaaagcagttataa

SEQ ID NO: 193586 - DNA, 2235 bp, Klebsiella oxytoca
gtgaccaaccaaaccataaaacgttttggactggaaaatatgatactcgataaatcagtgacgcacccggatcaggatcgccacggatttcttcatatcgctagacaacttgcaagtgccattcacgcaattggacgagaaggtagtgcagtcattggtatcgaaggagcatggggctcaggtaaaactagcctattgaatttgctacgttcggaactagataaagagaaaaatgaacgaacttatgttctaaatgtttccccttggcttgacggagatggtatcagctctgtggaaactttgttacttcctgtggcaagagtcattgctgatgaggaagaaaaattattatcgccaaggcaacgaaagcgtctccacaagaaaaacgagctgactgaatcggcgaaatcaatcctgcgttactcacaggctacagcacggcatctggctccaatggcggaatttgctagtctaattcccggagtccctaatgcgggtaaagctcttaagtccttctcagagctaaatctaaaggaaattcggaagaccaccgcagaattacgcactgaaatagcagagaagattgccgctcttgatctcagttttattgtgctgcttgatgatttggatcgtcttgagccagcacaagctgttgagatcattagacttgtaaaatcagtcgcagattttcctcgtttccgctatatcatgtgttacgacaaagctgttctggcccaggcaattaaaaccgggttaggagtagaagacggaaatgcctatctgcagaaaatagtacaaataccgttcagtcttcctcttccggaatcgtttgatctacgattacagttttttgatggtgcggttgctctttacgagtctgtaaacggctttccacctgacaatgaaatattggctgacctgaatacaattacagataccttcggtgtcgcgctaaggaccccacgtgaagtgcagctgtccttgaatgcccttgctttccggtatccaggtgtcagagattatgtctatctgccagatctatgctttcttcaacttatccaagttacctgcggtactttgtatgaatggacagaacagtacttgactatatatgcagtggttgcatcaggcgatggaacagtcagtgaggaagagcatcagcaactcagggagcatttcgtcactgctatttcaaaactacgcccttcgtcagattttctgatatacaaacttcacgagattattccaggagttgaagggtataaagaagatacactgaagctttttcgccagtgcagtgaagaagagaaggctttcatgggagcaaaacgaaggcttggcagcagtgcctactggcgttactactttgcattttctgctccgcaagatgttctgccaccagaattttttaccaatctgtttgccttggctcgaacctacaataaagaaactgatcttgctgttgagttgctcagaaaaatcaatagtaaagggattacatcacgcacatggtatgaacatatcctcagccagcttagtacccatatgatcaaagaacgtcatttcgatgaatgtgctggactgttaagattttttttcaattacgctgatggcgttatggcactctactatgaaaggaaccagtggttctcttggcaaactctaggtacggaagaagttgtaaacaatctgctccgtagactattggatctggacaggccaagaggaatgcgcctgctaaaacagctgttcacgcagggaagtgcttggaactgggctgccggatatcttcgggaattactgtggcagaatggcatggccggaaatcaagctatttccatgaataagcgaattttggaaaatgctgaggtggcctcaatctgtaagcttatgtcgcgccgcctaagaatgcggcatattcaaaatgaaatgttccagttcgatagtctgctacgttatatgtatgcttggcgcgaaattgattcaccaaaaattgtttgtcgatgtttacgtcgaatctgtcaggaagatgatggttttctgaacctgctactgcgtctacgtggagtagtatttagtagccaccgaggggcatatcgagaactaagaatatatgaaatttcacgtcttacaggactaccaaaagagactatcgcctcgcgactagaaagccttggtcaacaacataacagagtctggatggtagatgaattacaaaattcacttgagaattaa

SEQ ID NO: 193587 - DNA, 2052 bp, Klebsiella oxytoca
atgcctttgcaaataaaagatattatagatctgcaaacccttgttgagtcggaacaggttgagttcaaactggcaggggggaaagacggcaaaggcgagttaccgaaagacttctggcccacctattccgcaatggcgaatggtcggggcggttgggtgattctcggtgtaaaagaacaggctggaaaatttataccagttggtattgttgatcccgaaaagattaagaccgatctgtttaatcagttaaacgatcgcgatcgtgtcagtgcgaatgtgctgagatcagaaaacgatgtgcaacaggtctctttgcagggagcggacgttctggcgatccatattccacaggcgatgcgcaaacaaaagccggttcacctgaaaaaatccccatttggtaacacctatcaacgtatgcacgaaggcgatcgcgtttgtgatgatatgaccatcaagcggatgcttgcagagcagatccacgacagccgcgataatgaagtgctttctgaacactatacttttcaggatgatatcgatctggacagcctgaaagtctatcgcaatctgctatcggcaaataacccgcagcatccttatttggcctgtgaaccgtttgaactattaaaaatggttggtggatggcgtaaagacagggaaactggaaaagagggcattacgctggctggcgttctcatgtttggtaaatgggatgcgattgttgctgctgcacctaactacatggtggattatcaggagcgccccgaagctaaaacggagctgcgttgggtggatcgggtatgcccggacggtacatggtcagggaacttgtttgatttttatcgcaaggtataccaaaagctggtcgccgatcttaaagttccctttacgcttgaagatggacaacgcaggacggatacgccagtacatatcgcactgcgtgaagcgctggtcaacacgctggtccatgctgattttaccgaccgggtttctattctgatcgttaaacgtcccgacatgtttggctttcgcaatccgggcttgatgcgcctgccgctggaggatgtgattgcaggcggagttagtgattgccgcaacaggttactgcaccagatgtttttgctgattggcctgggtgagaaagcgggttcagggatgccgaagattttcagcggctggaaatcggctaactggcgaacccccaaactttgggaaaaaacgtttcctgcacagacgctattagagctttctacggctagcctgatcccgcagcttattctggatgatttgcatcagcgatttggtgaaaccttcgatcagcttgatgattttgaacaggtgattgttgcaacagcggcgattgaaggctgggtcaatcatgaacgcgcctgccagttaacaacccgtcattctcgcgaagtcacgttgacgcttccacgtctggaaagtaaaggttttctggtcgctgggggtgagcagaaaagcaaatattacaccttgcctggcgtatcggtaatgacaccagatgaggttttctcgttaggtgcggttgtaagctccacacataacgaggggaactccgcatataacgagcagaggtccacacataacgaggggagctccacatataacgagctgaggtccacacataacgagaagaagtccacacataacgcggaaaactccacgtataacgccggggacgatcaacccgcgtcccgggatgagtatggacgtttgcttaacagctttatcgatagaccctatattgatgatgttgataatctcaccgaagctttccgggattcgttgtttgctctggctgccgttccgcgtgaaaggttgcgtctgggagataaagagctgatgaagagtgtgatcctgaatgtgtgtcagggacagtatatttctgttgctgcgctgggacagatccttagtcgtaaccctaatgctctgcgtcagcagtacttaaaaccgctggtggagcaaggggaactgaagctggcgtttccgcagtataagaatgacccgaagcaggggtatagtgccgtttga

SEQ ID NO: 193588 - DNA, 2016 bp, Klebsiella oxytoca
atgaccgaagaacttcgggaacgggaaactgatcgcgctgagatcgcgcgtcgtccggattctaaccttcccgcacattatcaggcatttcgcagcgagctggcaaaagcgctgaacgtcgatgagtctgaactgcctttcgtcgctgaactgatacaagttaaacccgaagaggcgcaatggcgcggtgcgattgagcgcgctgtggggagcaacaggctgcgtattcttgttgcgccggaatctgcacaggaagcgctgcgctgggtaaaccagcgcaacaatcgtctgcacgtgcgcctattggaggtcaagttaccgcactctcccgccaggttttttgatgatggttttacccgcaagctgttgtggaaagatcatccgtggcgagaggccgtcaaagcattactggccgaaagcgacaggcattgtgttgacagccccgaacagttgcgtgacacacctcacgctatgacggtgcaggggctaatgtctggtaaacagcgtttctatgacaaacaggatcagaaacgccttgatgaagactggctaacgggattcgataaccgcgatcgcctgaacttccttgccaaagaaatcgccgcgcttcaggagcaggttaaaaccgcaaacgcggcatttgaggttgcgaaaggcgaggtggcacttttgcaaaatcaggccatttcattccagaaaatacaacagattgattacgatagcattgatgttcccggcgcaaagagccaattggaagcgctcaaggagcggctggagaatctgatccgcccggattccgatgccagcgtagcgaaagcaaaacttgatgaggctcaaacggttgagtctgaatttgataagcagctcagagccgccaataaagtcactaacgggctggatacagaactcacctccgccagggccgcagaatgtaaggcccagcaaaccgcgcaacaaggtatgcaggatgaagagcgagagctgtgtgccttacattttccggcggtgactctggagcaactgcctgacattcgcgatctggaacgtcaacatgagcggggaattcagcaagaaattgagggtgttaaaggtgaactgcatcagctgagtattgagttgaccaaacgtatgtctgaagccaaacgtgtggataccggggcgctcgttgaggcaggggctgatttggacgatattcctgtctatttacagcgtttgcaggagctgaccgaagaagccctgccggaaaagctcaaccgctttcttgactatctgaaccgttcatctgacgacggcgtaacgcaattgctcagtcatattgaacatgaggtgttagtcattgaagagcgtctcaatgagctcaatgaaaccatgtttcgggtagattttcagccggatcgttacctgcgtctggatacgaaaaaagttgtccatgaaagcctgcgtacgcttgaaaaagcacagcgtcagctaaatactgcccggtttgttgatgataacggtgagagccattataaggccttacaggtgctggtggcgcaactgcgggatgcctgtgaacgaaaccgcaccttgggggcgaaggcgttgctggatccccgttttcgtctggagttcgccgtatcggtgatggatcgtcagagcggaaatgtgattgagtcgcgtactggctcgcagggcggtagcggtggagaaaaagagattattgcgtcttacgtgctgaccgcatcactgagctacgcgctatgtcctgctgggagtcgttatccgcttttcggcaccattgtccttgatgaagccttctcccgcagctctcatgccgtggcgggcaggattattgccgcgcttagagaattcggcttacatgccgtatttatcacacccaataaggaaatgcgcctgctgcgtgaccatacccgttcggcgattgtcgtccaccggcgcggtcaggattcaaatatggcttcgctgagctgggaagagcttgaacaacactcccgacgacgggagaacgcgtag

SEQ ID NO: 193589 - DNA, 336 bp, Klebsiella oxytoca
atggtcccctcatcgacgccggcaatgctcagcagcatcgcggcggtccagcccgtgcggtccttgcccgcggtacaatggaacagcgctgcgccgtcggcgctggccagatcgttaaatagcgtggtgaaccgggcgcgcatcccggcatcgctgacgaaggagacgttggtctgctgcatcatcgctttggcttcagcggcgctactgaacgttattgaggtgatgttgctgcccgaagcggtgttgccgatgatatcaatatgggtatatcgcgccccgtcgggcatcacgtccgggctgctggcgatttcgctggccgtgcgcaaatcataa

SEQ ID NO: 193590 - DNA, 408 bp, Klebsiella oxytoca
atgcagcagttcagcgacccgatgagcgcccgcgcactgctccagtcgcagcagaactccgacgaggcgctcagcatcaagcgtgatgctgacccgacgtttgatttttgcggctatctggaggcgctaccggagccggacggaatgtatatggggaacgccaacattatcccgcgccagccgcgcctgtatctgtatcacgcctatctggtatacatggaggcccacggctacaggaacgcgctcagcctgaccatgttcggcaaggggctctcagccatgctgaaagagtacggtctgaattatgagaagcgccgcacaaatcagggcatgcagaccaatctcgcgctcagggaggaaagcaacgccgactggctgccgaagtgcgacgaacctaccgcaacataa

SEQ ID NO: 193591 - DNA, 1671 bp, Klebsiella oxytoca
atggtaaataaccctattacaataagacaaaattttaaaattggtgaacttgatgctgagtctgatactctattattagaaagctgttttgtcgacagtggctatttgaataaactactcgatccctttgataattcttctatagttagaggacgaacaggtgcaggcaaaagcgctttattgcatatggttatgaatcgtgcttataaatgtcggcaacttgatcctaatgatatttccatacgttttctagagcagtctgatatcattgctttttttgaggctttaaacgtaaatctagatatgttctataaggtgttgtggcgacatatacttattatggaactacttaagctacgccatgatataaagagtgaatcagatacaaataattttttctctgcgatattgagcaggttgaaaaaagatgagataaaaagaaaagctcttgagtattttagagaatggggggataaattttggatagatacagatgcacatttgagagaaattacattaaaacttgaacgtgatactaaagcatctattggtggtgagtatagtggtatagcgctcaatgcagaatatgcgaaaaagttaaccgaagaacaagtacacgatgttaaaaaacgagctacagaagtagtgagtagccttcagatacaaaaacttaatgaaatactgtcattattagctgagtactcgtttgatgatcctcagaagaaatatgtaattataatcgatcagttggatgaaaactgggcggaaaatgaaacgcgctacaaatttatcagggcattaatcgaggaaataaaagtttttcgtaaaataaaaaacataaaaataatagttgcactaagacttgatctacttagatcggttttcaatttaactcgcagctcaggttttcaagaggaaaagtatgagtcatatatccttgatattaaatggacaccagaacaacttactgagttaatccaaaaaagagtcggtgaagtttatcggaaacagtatactcgtgataatgttaaaatacaggatatttttccaaagcccaagggcggcccgacaggattaacagctattgaatatataacggaacgaacactattaagacctagagatatattgcagtacgtaaacgaatgttttagtgttgcccttaaccgtgagagggtttcttgggattcaattcaaaaggctgaatcagtatattctttaaaacgtttacgttcactcaaagaggaatggggggatatttatccatcatttgaagaaactgttgaattgttaagaaatctccctgataaattttcacgagcgattattcctcgagctaatatagattctgtaataagtgaactgtcaatacaaggaactcaagatccttgtgctgttgtcgcgaataaaatgctcaatggtgaaagcagagaatcagatgtaatcaatgaacttcttttatgcctttataatcttggtatagttggttttaaagtcagtagtcttacaccatataaatggtcatctagagatagtacacctgccacaaagaacgagataaagcgcgcaagcggcatgaagatacataaaatgcttcattctgcacttgatattagaatgaatgcggacactcgttttgtaaaggataaagatgaacttgaagataattaa

SEQ ID NO: 193592 - DNA, 1461 bp, Klebsiella oxytoca
atgaagtcttcagaaaaagataaaaatgttggagttgttagtggtactatctggtcaatattagataatgctacttcacaaataatcacattcgttatatttataattctggcaagattcctgaatgcagaaatatatggtgtgcttgcaatatcgcttttggttatccagtttttccggaatgtcatttttgatagtatcgcaacttcgattgttagaaaggaaaatccctctagggttgattataacactgctttttggtcatgtattttattttcattacctgctttttttattgtccttgctattgccccactaattcagacgctgatgggtattcaagaccttgcatttgttattaggtggactgctttaactatactattaacaggtattgcccgtacctttgaaatatggttgacgcataatttaatgtttaagcaattagcgataagatccattgtatctattattattggtggtttggtcggtatttatttagcgtacaaggggtatggtgtaataagtttgatggcccaacaggtagttactattttaatatcacttatagtgttagtgtttactacaccttggaagccagggatatctatttcatcttcctcatttaaagaaatgtttaactacgggaagcatgtttctcttggaggggtgactaattttgcaaaccagaatagtgatatcttttttatcacctattatttaggtgcaactcctgcgggattatattctgtagggaagaaattagttaatacatttaccacagttttatcttcggcttttatgcgagtttctcttccagcttttgctcgtgtaaaatctgatggggataagctaagaaatcattatttaaatgcaacatatttcactatattattaactgcaccaattttttttgggctctctgctgtcagttatgatataacttttttggtttttggtaaaaagtggattgatgctgctccgattatgagtatagtaagctttgttggttgcttagtttctattggctattataaccacaatattatgtttgcgtgtgataagcctcagtggcaatccagattgactctttgttatgcaatcactaatattatcttctttattattttcgttagatttgggattattgcaacagcaattgctttcactttaagaacagtgctgatgtatcctttatcagtatggtgtgcgataactcttatcgatgttaaatggactgtctatattcgatctataatttacccattgatatctgcatcaataatgctttttgtccttatgtttctaggtaagtacttccatcatgaaccaagttggttgtttctttttctgaaaataggcataggggcgttagtatatggaacggggattctattgttccttcctcaatccgataaaggccgaatttcaaacttctatcaatttatcaaaaaacgttaa

SEQ ID NO: 193593 - DNA, 666 bp, Klebsiella oxytoca
atgcgttatattaaagaacttgaaggactccgtgggctaatggccctttgggttgtttttggtcacagccttgcggctttgccacttattaataagcatgtgcctcctacggcgttaaattcatatgctgttgatgtttttattatactcagtggttttgtcattttctttatgattgataataaaaggcaaccttattttcaatacataacgcaacgtttttttagaatctttcctctatatctattagtccttcttgccagtacaatactaattagttttacaagggatgtttttttgctttatcctgaggctcattcgacaatgcgtcgcattacactcattgatgaatttttaaaatatccagttgctcattttttcgctcatataactcttttgcaggggctcattcctgattttttacttaaagatagcgcttatactatcgttggccaagcttggagtatttctgttgaatggcaattttatattttggctccatttctattttatttggctaataatcttaagttaataaggaatgtttatcttttgtctttgattgttatatttatgcttttggttggtgtttttttaggtggtggattcttaggtaataatttagctccatttttaattggttttttaagttttttttctctataa

SEQ ID NO: 193594 - DNA, 297 bp, Klebsiella oxytoca
atgatttctcataaaaacaataaaaataattttgtagttaaattcttagataacagattagtgctttttctaggtaaagtttcatattcaatttacttagttcacatgattgttttagtgtttgtgttatctttaacttatcattttcatataattggcattgaagcctatttttttgttatttcttttactatgttaatgtcagtttttctgtcaagcgtaacgtattattttgtcgagcagccctttattaaacttggaaagaaattcagtaatagttttaaatgtttagattaa

SEQ ID NO: 193595 - DNA, 237 bp, Klebsiella oxytoca
atgcgtgccttccgacagcagccagacatcgagatcctgcaacagcggaccaaaacggtacgggtcatcaatcaggttctgctgcccgtgccaggtgacggccagctgatagcgaaaaggatttttacgacgcggcagaacgccgctgaagaaaccgcgcgagtcgaggcattccagcttgccgactttgcgtccggtttttggttcaatgacccacacatcggtggcatcgggtaa

SEQ ID NO: 193596 - DNA, 1629 bp, Klebsiella oxytoca
atgggaggcggtatctggtactgccattcaatgatcaatgatgataattacgtggacgataacggctgccagattattaataattttggacaagtattacggcgaaaagatttgcgtgttatttgttctgatatgttcggcctgatgaatggcggcgattatattgaatgtcttagaaatatgtataaagcatcccggacattctgcatagaagaagtgcttattgcaaaactaccttttgggcagtctgttattgccgacactctttcagatggtagtaatgggtttgttgctgatgtttctgatggcatgaattttaccattcgtgggctaggtgtcgggactaacggtccccgcatccagcacaaaggcaatggcgtgatgatgcgcattaagcgcaaccataccagttcaaaggatttctgggttacgtgcgggttcgaatgcctgcgcgtggcggggagaaatgacactctcgacggcaataatacctataccggcgcaacacctttccaggtatcggacatgtggggctcgctgtttaaagatttatatatcagcggctatgacaataatactggcggcagcgcaatttctctttataacgatacagcatggacagagaaaccccgctttgacaatgtcatgatacgcggctctgtggtggggctgcgtctgcatcgcaatacagctgacggcgcaggggcgacagactcatttttttccgtaaccggcgagattgatatgaatgccggggtgcctaatccctgttcttatgtccgggtgggcgatggaaccgagaaaggtaagtgctctatgtacagtgcgcagtttaccatccggggttggatgagccgatcctcatggcatactggcattgatattatggactacagctgcgtcacggggaaaatgaccttcatctgggacggttacgggctatcgtcaaatgccacaagtgaagtgctacatatcatacgtactcgaggcgtcaacgctcgctttgactgcgaggtgaccaatctctcgggccagttgttacaggcgcagcttgaactcctacagctaatctggaattcctgtctatacacccaggaaactaccgctaatgatgcctccctgaaacgagcctatccggtcatacgtgccaaagggatgaggataaattttgaaggaacattcactgcggccgagcgtatttccggcaagacctataccctgagttcgttattgccgggccagcgtttgcgagtgcgtctgcacagctttaatggcgataaataccagccgcaaatctctgaatgggatgttgaggtaagaggaacggatttcccctgtattgttaaaccactttcagggcaatcggcaaccatctccactaaagcaggcagtgcactggtgaatacttctggcgctaccgggagtttcctgactgaagtcacgataagcgacaatccgtttttgcagcatgccacacttggtaccacgacactgattctgacaaacggtcaggcaaataatagcgtctcatatgctgttaactctggtcgaaaaatacagattgttctacccgcaaatccggccgccacggaagatatgccctatgtagcagaaattgaggtgttgtaa

SEQ ID NO: 193597 - DNA, 228 bp, Klebsiella oxytoca
atgagcgagaaaatgataaacaaaaatgtactggttccggcgtacgctattaaaatcaagtccataacgaatattgacggtggatttgcagttattactccggacgatgagcaggaaattaccgatcctattacggtgacggcggcatttgtcgaaaaatacaaaccacaaccaggcggatattacgttatgtgtgtaaatggcgtgggtttgtactcagatagctaa

SEQ ID NO: 193598 - DNA, 276 bp, Klebsiella oxytoca
atggccgcatctacgataaaagagtacgtcacagcgtcaggggttgttcttgagggggcctttgtcatattgaaaggtgttagtgtattttcccatacggttactacggaaggcgtatcagaagagcagagagacatcgaattcacctttaatgtttatgcttctgatgctgcttatcaggaaggaaagtcaccaattgaatctttctctgaaatggcaaagtttgataatgaaaaaagcattgacgagcaggctctcgtatttataaacaaataa

SEQ ID NO: 193599 - DNA, 1593 bp, Klebsiella oxytoca
atgggcgttgaccttgtccacggcgcccgcaggtatttcaaggttaccgactatcctggtggcacaccagactcgagcgttggcagaaaaagcgacggaacgctgactatcattaaaggaactaataatacaaacgcgataaaatcagcgattgctgatgctcaggcttgtaatggcgttgtgtatctacccgctccagaaaatggtaacgcatatctttttgatgagactttatttccagccgttacatccggggctttgtggcgtggtgcgtctcttcagggggacggcaaaaccgcaaccaaaattatttttgatggtggggatataccggcggttcatgttaaagggacctctggctggcctacaaacatatttcttcaaggtatgtcactgtactctgccactgattttgtaggggagggctggaagctgcagggtattaccggtatccgattatctgattttgctgcctatcgatttggtggcgggttgtcattctcaaatggttcggcgtcaggtatttttactgaatttaatatcgttgaagatggttggcttgagaataacaataccaacattaaattcagaaaggatggtggtgatggctcgttccatggcatcactttacgcaatgttatcagtaacaacctaccaggccagacgggtcttgataatggagctggatgtgtaatttataatgcggactggaatcaggttacgttctttggtgcagctggcgtccagtggatacttaataatggatcaagaaacggtttcgaaaccttatattttgagggtaatggaaccgttactaacaacgcggactggagcactgctggttactggcgcatacaaagcggaactggtgtaattactgacacgtcaactatcccttttttcaacgacggttacattaccccaacaagtccttcagatgccaacttttccgctgctggatttacttcggtagaatctctgaaaccgcttataaataatcagacataccggggattgatgcgccttcgtgggaacaatgccgaggcgcttgctgtaactggttatgattcaggctcttttgagagtcagggtcttgccattgtgtctcaatcattgggtgatggcataaaggatattatccttcgccagttaattcatttgaacggtattacatcattcaggccggagtacagatttaattacgttggaggcgccacacagttaagcattaactccagcggccgtcacactggggttatgggcaggagaactacgggaagtatctccgcaagcgcttctcaacaaaccataacaactgacctggtacttcccataacaaaccagagttttatgctttcagttcatctgtatagcgctgataggtcacatagacatgttgctacctatgttggtgcggcagtaaccggttcttcagcatcgaccgcattgctgataactagtcattcagacgctgctatcgcgttcccgtcagcatcgttcgtaattcttgatggcggcactctgcggtttgcagtaactacaagtgttgacatttcatatgaaattaaggcgcttggcgtcggaacatattaa

SEQ ID NO: 193600 - DNA, 558 bp, Klebsiella oxytoca
gtgctgattggttatgccagggtctcaacaggggatcaaaacctcgatttacagaaaaacgcgctgattcgcgcagaatgtgaactgatttttgaagacaaagccagtgggaagcacgtgcgccgaccaggtttaaagcaggcgattcgacgtgcgcgagaaggcgatacattggttgtctggaagttagatcgattggggaggagcgtcagggacctgattacccttgtctcaggcctgcaatcacgtggcgtacatttccgcagtttgaccgactcaattgataccagcacgcccgcagggcgttttttctttcatgtaatgagcgcccttgcggagatggaaagggaattgattattgagcggacgcgtgcaggacttgcagctgctcgggctaaaggcagaattggagggcgtaagcgagtgatgaccgaggaggcagtgggaagagcccagagaatgctcgcgaatggggcttcccgccagcagattgcagagatttataacgttggggttaagacgatctacaagtaccttccagtggcccctaagttgtaa

SEQ ID NO: 193601 - DNA, 1032 bp, Klebsiella oxytoca; identical to SEQ ID NO: 82670

SEQ ID NO: 193602 - DNA, 252 bp, Klebsiella oxytoca
atgactgatgcagcactgctattaggtgaaggcttcaccctgatgtttctcggcatggggttcgtgctggcgtttctgtttctgctgattttcgccatccgcggcatgtccgccgccgtcaaccgcttcttccccgaaccggctcccgcgccgaaggccgcacccgccgccgtagcgcccgctgacgacttcgcccgcctggcgccggtgattgccgccgctatccaccaccatcgccgacttaacccttaa

SEQ ID NO: 193603 - DNA, 804 bp, Klebsiella oxytoca
atgaacgacacatattattatggtcagggcaaagttttcctttccgtgcggaacccggtaacaaacaaatccgaaatctggcgctggattggtgacgtctctgctctgacgctgaagctctcattcgaacagagtgaaagaaaaatatcccgggctggcgtggtcatgacgtctgaccgccggtacacctctttttccgcttcactcgcatcggtctggcacgatttctccgctgataacctgtcgctcctcctcttcgggaagaccagccggattgcgcagagctggcagaacgatgaagcgttgccggagggcattacagcgggggatcgtatcgcgctggcctatcagaacgtccgggaagtcagtatcgacgggcttgcagaggggacagactacgaggttgattatggtttcggtgcgatcagctttctgaccacgccacagagtcagcccgtcaaagtgacgtatgactatgctggcagtcagtccgtcagcctgcttaatgccaaatctccggaggtttcacttcggtatgaaggtattaacctggctgaaggggggaaaaaagtgctcctggaactctggcgaatgacattcgatcccctgacggttctggaactcattaataacgccacctcgctttcaggaatggaaacctcatcggcggtcttacctgacctgaaccgccaggcggcggatgtttttggcctgtttggccggatcgtaatgatagaagacttcatgactatcacttacgacggcaccatcgacttcgatggtaaatacaattttgcttattag

SEQ ID NO: 193604 - DNA, 2706 bp, Klebsiella oxytoca
atgggcggtggtggcaagggttcaaaaaaagtcacggtcggctaccggtactcctgggatgtgcaggcgggactggggcgcggtccggtcaatgagattgtgtcgattatggccgataaaaagacggtctttgccggtactccggggcagatatcatccagcacctcggtgtacattgacaaacccggtctgttcggcggtgatgataccggcggtgaaggcggcatacagggtcagctcgatatcatgatgggtgaaccggatcaggtgccaccggcatcgctcctgaagttgctgaccggtctggtgccggggtttcgtggcgtggtgaccactttcttcagcggtctggtcagctgttacagcgccagccccaagccgtggttataccgcgttcgccgcacgactaaaggctgggacggtgatgtctggtacccggagaaagcgactatcctgctggagaacagcgagggccagcttgatgatgaagcggatcttatccctgaacaagtcgccaacctgcgggccattcatgccatgaacccggcccacattctggtggaatgtgccaccaatcgtgactggggacgtcagctgacgctcgccgatgacctgaacctcgacagctatcgtgtcgccgccgacacgctgtttgaggaaggttttggcctttgtttccgctataaccgtcaggatggcctggacacctttgttcagcagatcctcgaccacgtgggcgcggtgcagtatgccgaccttgaaaccggcaaactgaccctgaaactgctgcgcggggattacaatgtcgatgatctgccggttttcacctacgacaacggcattatcgccgttcaggatgacgacagcgccagtaccacatcgaatccgaatgaggttgtcgtgacctggaatgaccccgtcacgaattccgatggtgaggtccgggcgcagaacctcggggcgatacagaatgccgggctcaacagcagttctgtggagtacaaagcgatccccacgcactctctcgccgaacgcgttgcccagcgcgacctcgaaaccgcccagtctgaactgacccgtctggtcatccagttcgaccggcgcggcggtattctgcgcccgggcgatgtattccgcattcagctccccgaccgcaatatcgacaatatggtgctccgggtgggaaaaattgaggaaggcgataccggcgtcctgacgctgaccgtcgtccaggacgttttcggactgccatccacgtcgtacagctccggccagcagggcagcagctggacaccgccggataaaaccgccagacctgtcagcgttcagcgcctcatcgagctgccctacgccgtgctggccgcgacgctcagcgaggcggagctgagctaccttaagcccgaatccggttatccgggcatcatggccgtggccccaacgacactcagcatcaactatcagattcagacccgcgctgcaggtggagattttgctgatcggggaacgggggactggacgccatcagggatcctggtagcggaggtcggcccgcttgatacggttctccatgtgaatatgacccgcttcccgtctgtcggtgacgggctgctactcaatgatgaagtcatccgggtcgatgccgttgacgagtttgccgggacactgaatgtcggtaggggatgtttcgatacactgccagcgggacatgatgaatcggacgttatctggttgtggcgtgatgcgctggagtctgacggtattgaatatctggcaggggaaaccgtggaagcgcgtctgctgacccgaaccagcacagagacgctggcggcgtctgctgcgccggtgagttcgctggtgatagcccagcggcagagccgcccctatctgccggggaatatccgcgtcaatggttcgccatacccgtcactggtcattgctgccaccgactacaccctgacatttgctcaccgggaccgcctgttgcaggccgaccgcctgattgactgcacggaaggcagcatcgggccagagcccggcgtggaatatgtggcgacgctgattaaccaggttaccgctgaagaggtctggtcggtcacctccggtgatgccagcattccgctcccatacgtcactggaggaagtgacgcggcagaacatgccctgacactgcagagcattcgcgacgggatcacctcgttgtacaccttccggaccctgttgcctgcgggccagtacaaagctttcccgctcaccgtcacgctgtcgctgaccattcttgatggcggcgactgggccgggaccacgcctgaagatacggataccggtgcagtccccgagctgtacgccatttctgatgcagccggaatgaccaactggtatccccctgacttgatggccagcgggctttccatccctgcggacgatatcgactatcccgccgggacatggccaacgtcgccgtggtcgtttggccctcatcagattttgtccattgtgcagtggactgagagcggtgtgccgtggaccgttctcacactgtccggtgatgcctctctttatgctatcgactccacgacagattctgccgccgttattccctggaatgccggtgtttatcacgctgagattgatatgacgttgttcatgacggatgagccggttctgaacgagggcataatctctctcacgctgacccagagaggttaa

SEQ ID NO: 193605 - DNA, 204 bp, Klebsiella oxytoca
atgctgatcacaatggaacatattcgcgccggtggcggctgtgcatgggggttacggaccttttttgcccgccaccatcttgacctgcaggcatttctgcgtgatggcggcattgattcgcagacactgctggcgaccggcgatgcactggccatccgggttgtcgaactcgcgcagctgcaggcgcaaaaggaggaaaaatag

SEQ ID NO: 193606 - DNA, 717 bp, Klebsiella oxytoca
atggataaaaccaccgctgttattgactcaccagaggcgctgggcgctgccctgtgccgccatgtacccgatatggccaacggtttcaccatcaccacccgggacagccagctgcaactgaccataaccgccgaagataccaggcccttcatggtagcgatggaacgcttgctgaagggcaaaatccgccagattcaacgcgggcatcaggggcgcgtactggacagcaaacttgctcagattaaccagagcggcgagaaactgactgctgccgaaatcgcccagaaatactgccagcctcagacaactcacccgttgtcggccatgcagaagcgtgattatgcgacccggcatatgagccaggaagaactgaatacaattctggattacgcccttgaacagggtatgccggaacagatgctgtcaccgttccggaatggcgttaaaacccgggaacaggcccgcaagcttgagctttcctactatgcatgggtcgcattagaaaacatcagggactttcatcgtcagaggtcccgcagggacgatcagaaagagacgtccgaagtatcgggtcaagatgccgggtcccccggctgtagtcagcaagatcccgtacagcccgaagcaggtggtcaggagccgaatgattctccatccccatcagacaaaggtccaggtacccggcaaagtccaggcgatcaaacgaactctctttga

SEQ ID NO: 193607 - DNA, 2448 bp, Klebsiella oxytoca
atgaaaaaaatgactgactgtgagaacgtattaaaagaattaattaatacatttacgaacattgataaaataagaaacgaagctcaaaccagacatcatattatagatgaaataatatataatgtgctcgattggccaaaggatcaggttgaggttgaaggctatgagcagaaaacttttacagattatgaattaggaaaaccaagacaggtaattattgaagcaaaaagggagggaagaacatttgaaatacctgctgggctatcaaaaaagaatattattgacattcctgccttgttaaaatccaatgaggatttggccaatgcaattcaacaagtccaaatttactgttcttctagaggaaccccgattgcgatagctacaaatggacaccaatacatttcgtttatagcaagcaaccaaaatggttcctcgcctttggagggtaaagcattagtctttgaaagtttacaaagtatgcttacaaactttactttggtatggaatatgctttcctattatggcgtaaaggaacaaagacttataaagtacctgagttctgatgccagtggaatccccaacaagctgtcgtcatacttaactatgtacccgaaagttaggtatgctagtgatattcagacctcattacgtcaaatatcggagctagtaatccaagatgccttagaaagtaaagagttagaagaaactttctatcaaaaatgttattgtgaaagtggtgcactttcaaaatatgcacttttgagtaaagaaatgcttcaggcacgttatgctgcattatttagcgatagtgaattatcgccgcagattacatctgttaaacctgatcgaaaggaacaaggtttagaccctagtataatggcggaagccttatcaaagcggccaattgtattaattggtgatgtaggtgtagggaaaacatcatttgtcaaaaaccttatatattctagcgcatttaaagagtttaatgaggctatatatatttacattgacctaggtgctagcgctactttatcagataaccttcaggcttttattcttaatgaaatagaagagcagcttttaaataaatatgataccgatatcactgaatttaaattcatcaaaggagtttattccagagatatacaacgtttttcctcagggatctggggggcattgagagaaacaaacagagaaaaatatgaagaaaaacaattagaaatgcttgcagataaaataaaccttaaagatgagcatatcaaaaactctattacccacatttccaaccagactaaaaggcaagttatcatttgcttagataatgctgaccaacgtgatttcgacacacagcaaagagcttttgttatttcacaagaactagctaaagagtggaactccttagtttttatttctgttcgtccacaaacatttttcaaatcaaaatcatccggggcgctgaccgcttatccacacaaagtattcacaatcgcccctccaagaattgaccaagttcttgataaacgcctccagtttgctctcgaaatgtccgagggaaaaatacctttggaacaggctgaatttgtaagaattaacattgataacctttcaatttttataaaaatccttcttcaatcccttagaaaaaacaaagcactcggcgaattcattgaaaacatcactggtggaaatgtaaggcaagcattaagttttattacaggattcattggtagccctaacgttgaagcagaaaaaataattcgaacatttgaaactgaaggacgatatgtaattcctgtacatgaattctccaaacaagctctgcttggtgaattttctcattttgaccccaacacgtccttagctatgaatctatttgatgtatcaattgctgatgaatcagaacactttttagtacctatgatcgttgctttactgtcagaaaaaaatgaggttcaagatagagatggattttgtgagacatcaaaaataattgaggaaatgcaattattgggttacatacccgagcaaaccgaaaatgctttaagacgctctacgaataaaaagcttatcgagacatcgcagagatttacattcgaagaagatgagacagggttaataggtgaaatgcctaataaattccgaacaacttcaatcggtcaatatcatcttaaacgttggatcagcgactttgcttatcttgatgcgatgttatttgacacgcctatatttaaccccgaaatagtgagtagcatgcgttcttcgtgcgaatccttcaatattgaagaccgatataaacgcgcattggctttcaaaagctatcttaaatctgcctggaacaagcttataaataaaccaagttatttcgatatggtcgagtccctgaaaatgggggatagttctttcgaaagtgtcaagcgagttgttgatattagccaaaattcaaaatag

SEQ ID NO: 193608 - DNA, 381 bp, Klebsiella oxytoca
atgctgggtgcagtagagcgtcgcttcggtaacaggctgccgacatcccccgttgagtggctgacagacaacggttcagcctaccgttctcatcagacgcgtcagttcgccagaatggtaggactggagccaaaacatacggcggtacgtagtccagaaagcaacggaatggcggagagcttcgtgaaaacgatgaagcgcgactacatcagcatcatgccaaaacctgacgggttaacagcggtaaagaaccttgcggaggccttcgaacattacaacgaatggcatccgcacagtgcactgggatatcgttcgccacgggaatatctgcggcggcgaaccagtaatgggttaagcgataaaaagtgtctggaaatatag

SEQ ID NO: 193609 - DNA, 1281 bp, Klebsiella oxytoca; identical to SEQ ID NO: 100896

SEQ ID NO: 193610 - DNA, 441 bp, Klebsiella oxytoca; identical to SEQ ID NO: 100897

SEQ ID NO: 193611 - DNA, 900 bp, Klebsiella oxytoca; identical to SEQ ID NO: 100898

SEQ ID NO: 193612 - DNA, 528 bp, Klebsiella oxytoca; identical to SEQ ID NO: 100899

SEQ ID NO: 193613 - DNA, 1233 bp, Klebsiella oxytoca
atgacacaaggatatctgacaggccgcaccattttctgcatcggcatgacgcagcttatcaactggggtattacgttctacatgccgggtgtcttcggagccgccatcatggcggaaacaggctggtcttccggtgagacattctccggcctgagcgttgccatgctcgttatggggctggtttcaccgcttatcggtcccgtaatggcccgtaccggtggacgcaccctgatgatggcgggaactttggctataaccatcgggtgttttctgatggcgtttacctattcaacattagcgtgggatgccgtctggatcctgacaggcgcgggcatgcggcttgctctgtatgacgccgcttttgccatgcttgtggaaaccgcaggcgcagaggctcgcaaggcaatctctctggtcaccctgctgggcggtctcgcgtcggccgctttctggcctgctggcgcagcgcttcttcacgtcaccgactggcggcatgccgtcatcatttatggctgtgcgggcctgctgagcctgttttttttaactgccgttccggcaggcagtcgggtaaaacttcccgtaacagggcgatccggccattcggctgacgcaacagcaacatcagaggacacaaaagcactcatcagcggcctgtggtatgccactctgatagcgttgataagctttgtctccaccggcgtgtccacacattttccccggatactggcctcttatggcgtgcctgctctggctggcatgctgtggggagtggggcagttaggtgcccgtctgctgggtgtagtttcaggtgcacgaatctccgcgatacgcctgaaccttataaccggtatcctgcttcccctctgttttctgaccggccttgcaggcagcattactcctgtggctacagcctttttcgttctgggctatggggccgtaaacggactgaatacgatcgtgaaggccgtacttcctcttgtgctgtttgatccgcagcagtacgcccgcaaaacaggaatactgttgtcgccggcattttttctcgcggcactggctccgtctgcgtatgccatactgctggagcgctacggtatacccggcacgctgcttttttccttcatcctgaccctgatcattacggcgatttctgtggtcctctggcagcgtcattctggctctgttgtgcagaaccgggaccatggagcatctacccttcacgaaaaaaatgtttga

SEQ ID NO: 193614 - DNA, 354 bp, Klebsiella oxytoca; identical to SEQ ID NO: 100901

SEQ ID NO: 193615 - DNA, 459 bp, Klebsiella oxytoca; identical to SEQ ID NO: 100902

SEQ ID NO: 193616 - DNA, 2529 bp, Klebsiella oxytoca; identical to SEQ ID NO: 100903

SEQ ID NO: 193617 - DNA, 300 bp, Klebsiella oxytoca; identical to SEQ ID NO: 100904

SEQ ID NO: 193618 - DNA, 2127 bp, Klebsiella oxytoca; identical to SEQ ID NO: 100905

SEQ ID NO: 193619 - DNA, 978 bp, Klebsiella oxytoca; identical to SEQ ID NO: 100906

SEQ ID NO: 193620 - DNA, 207 bp, Klebsiella oxytoca
atgaaaaatatcatgacgttattcctctctataatcctgcctttttcagtctgtgctcaaaccgtgacggcaacaggcgatacactggagcagacggaagaaaaaattcgccagcaggctgacaagcagggtgacaggtattataatattaccgaagcccgcatgggaaataaagtacatatcacagcagaaatcctgccgaaataa

SEQ ID NO: 193621 - DNA, 1482 bp, Klebsiella oxytoca
atgcgcctcatccaccgtgaagacaatatcccggcccaggaactggtcacgctccgcgatgttgttgatcatgttggtcatcgagaccatggtcagggccatctgcgcctcgtaaccctcacgcgccagatgccccaggtcgaccagcgtcacgtccgcttccggccacagctccccttcgcggttgaacagctccgcttcaaagctcccggcctgagtgaacatgcccagggattccgccatttccgccgctttcgccttgcgctgagcattgcggacattgatgacgccctcatcgttgtcagaggcaatgtcgtacagcgccttctgcaggtcagacggcagcatctgccgcccttccttatacgtggcatgtgccgccatcagcagcgcctcacgtatcatcgccctgtcggcacgcttaaggtcagcctcttctttcgggtcgccgccggtgatcatcatgcgcgcggagatttccatttcaccgagaacgtcacgcttgtcatcctcgccatcgtcgtccgtgtcgatatcaggcaggtcgctctcatcaacggcctgggcggccaggccttcttccaccagtttgtgagcatcagcaaacggcggcagactgacgccgcttccgggtttgacgctgattttattcaccgtcagcccgaggctgtcaaagaagtcggccagcaggccgaacgagttgccggcctccgcaataaacagccgcggacgatggacggccatcagctgggagagcgcggcacacagcgtggccgacttgcccgccccggtcgggccgaacaacagcagatgcgcgttctgggtgcggtcgagcttgttgagcggatcgaatgtaagggtatccccgccgcggttgaaaaagctgaagccgggatgccccgtgccggtttcccgcccggttaccggcaaaagtcctgccaggtgctgaacccatgtcagacgggtataccagtgttttttgtcgctgtccgggttaaagcacatcggcagcgcccgcagccagctgttcagcggaccttcttcaaactccggccgtaccggctgcagaccggccccgagcaatacggtggacagctccagccgcttgcgcttcaggctggtcatgtcgtcgccgcgcagcaggaaggtgatccccgcccggtacagcttgtgccggttgcccagatactctttgaccgtcttcacatcctggcggacgcggcccgactcggtattctcaccgaccgcatttttcgacagccggttaaactgctcttcaagccggtcctggggctgtaccaccacggtcatgcacaccatggtcccttccggaaacatatccatcagggcattaattttcttttcaccccggcttttctcgccggtcagggtgcccggctccggcggtgtacgcagtttttccaccgccaccgcgcagtgcggcttgttgtcaatccaccacacgccgttttccgggtctga

SEQ ID NO: 193622 - DNA, 729 bp, Klebsiella oxytoca
atgcacctgcaggccgttctgccgggtgcagcggatccccgccccgcccagggcattaacgacccggtcgcacacctgattgagcatcgccaccggcggcatcggatcccggcttttaccaagccagcgataaacaaccatccgggtgcggcgctgctgcccgcgccacggctggccggtaatcagcgagtcagtaaaaagtccctcaggccgggagatactgcggatatggcgctccatttcacccagccaggcgtcggtaaacgccgtgcgctgtgcatgtggtttgacatacccgcgcagcctgtccaggtacgcgtcagtgtcgtcctcgtcctggcagaagaactgcacgacccagggattcacgtcatgttcatcaaagctgtcctgaagtgcatcctcaaccgagtcccggatctgttccaggcgctcttcggttcgcccttcggtcgccaccggtgtcacatcataaacggcccccaccgacacgccgtcatcgagcaggagacactgctcttcatcgagaaattctgcccagggcaaaaagtcaatgatggacggattggcgtgataaaccttctcctcatcctggcgcgtcattttcccggggcgcttcagaggttgccggcccttcacggccgcggtcagggtttcatctgcctgaacggactggccgtcatcaaccggcgtctgccggtcggtggatttattacgcgtaaacagtga

SEQ ID NO: 193623 - DNA, 348 bp, Klebsiella oxytoca
atgatgaagactgttctgaaggccacgttaatcactgcactgattaccggccctgttcttgcggccgacggtactggcaaagtccaactttcagacctgcatttcgccacagcagcaaatggtttgcagcaaattgaaggcacgggaacaaacgtgtcaggtgggcctgtgaagactgtaattgtcaaattcaacttgcttcagaatggggcagtaataggaaatacggcagcgatggctgaaaatctggagccgggtcagcaatggaagctacaggccccctacgacagcataaccaacaagccagacagcttcaaagtgacagaactgacggtatttaataactga

SEQ ID NO: 193624 - DNA, 795 bp, Klebsiella oxytoca
atgcggaattcaatttataacaatatctgcattagtaatatctggtggcgatttaacaaagtcttattaacaatatcgtttgttgttacatatcttccttccgccagtgcccaggattattacttcgacccggcactgctgaaaggttctgctcttgggcaggatatggaacgattcaataaaaaaatcacgcctgttcaatccgggaaatatgttctcgatgtctatgttaacaacacgctaatttcgatcagcgaaaccatcaatataatggagcgtgaagatggaaaaacagaaccttgcctgactcgggaactgatagctaaattggccatcagaataaatgctgtagtggctgcagagagtcatcagtgtgtacctgtatccgacgccggggcgaccattcaggctgaggtggatttatcacagtcccgtctcaatctgtcagtaccccaatcgaatatgtttcaaaatccccgtggttttattcctgtcgaaagctgggatagtggtgttatggcgctttttctgcgccataacaccaatttcacacgcaccgaaaatacaggaacgaattttaaatataattatctctggagcaatattaatgcagggacgaacctgggattgtggcagctcaggcatacaggaaatttaagatatgctgacagtaaccttggcggtagtgaatataaatataatgcggccaggacatgggggcaacgtgctattcctgcattagaaagcgtattcactgtcggtgatagctacaccagggctttgttgaataaataa

SEQ ID NO: 193625 - DNA, 483 bp, Klebsiella oxytoca
gtgacggttaatccgctgctgtcgccgtacatgaccaaggtggtcaagatgtggcgtaagctcggggcctggttgtggctggccacccagaatcttaaggattacccagacattgccgaaaagatgcttaacatggcggaatggtggatttgtctgaccatgcctccggaagaggtcaaagatatcagccgttttcgcgcgctcacgccggagcaggaatcggtgctgctttccgccagtaaactgtcggggtgttatacggaaggcgtggtgctggcgaaacggatcgaagcgctgtttcgtgccgtgccgcccagtctcttcctggcactgggcatgacggaaaaagaagagaaagccgaacgccgggcgctgatgaatgaatttcactgcagcgaactggaggcggcaaaacgcgtcgcgcagaatctggaccgtctgcgcggtctgacggaaaaacaacaggagcctgccacggtatga

SEQ ID NO: 193626 - DNA, 378 bp, Klebsiella oxytoca
atgatgacactgaagtaccctgaacccactattcatgagcacagtggctcagccctgttcaccctgtcgcctcagggggagcccggtgtgctcccggcgacccatcagcacctggtgaggctgcgggcaatgctcaggcagcgcctgaccggtccggtcagaatgacctgtcacccgcaccgggtgggactcagcagcagcgtggccatctatcttgagggaaagctgaagcaggcggtgaacatccttatcaccgtgacgggacagacgagctggccgcaggaagaggagtatgcgcatccgcgctggtatatcacggtgccggattcggccgacctggcgtatctgatgctgtggattaacgggctggacgtttaa

SEQ ID NO: 193627 - DNA, 150 bp, Klebsiella oxytoca
atgaaggatgccgtctggtccgcgagtgaaaagtgctgcattgtacgtaaggttaagaatcgctgtcatagtgtatctattcagtatgtgtgcatatacaataacgcaattgcacagacatatgcggggcgttttcatgcgattcactga

SEQ ID NO: 193628 - DNA, 1095 bp, Klebsiella oxytoca
atgacttttcgctatattggctccaaatctagactcgtcgacaagatagcatcccacattgggccgcctagaaagggcgcgttttttgtggatgctttttgtggaactggagctgtagctgaggctgctgcggagcatggttggaatgtgcggattaatgatagcttgcactcagctgttatctctgctggggcacgtcttatcagccatgatcaggtgaccttcaaaaaacttggtgggtactctggtgctgttagcaagctaaacgcagttaagccattgcatgattttatgtggcgcacttatagccccgcttcgatcgatacgtgtggaattgagcgtaggtacttcaccgaagaaaatgcagctaagatagacgctatgcgctgcttgattgttgagtggaaaggtgccggatatattgacgaaattgaggagaggctattgattgccgatctctttagtgcactgaaccgcgttgccaacattgcgggcacttttggctgcttcctctccaaatggacaagccaatctcaaaacaagattgccatgcgttgccgtgatctcaaagaaactggagtgtgtgttgaggctagcgtgggtgatgtgttcgacgttccgaatgttgcacacgacctcgtgtatttggaccccccgtacaccaagcgtcaatacgcgagctattaccacatccttgaaacggtggctcttggcgatgagcctgtggtggagggggttgcgggacttcgtccatggaaggccttggcttctgacttttgctacaagagccgtgctctcaaaacactctcgcgtctggttcatggcttgaaggctcaaagggtactgctctcgtacagtagtgaagggcacatctgcatgcaggacatgaaggctgagctttctaagatcggctcgtccacaatgtaccctttgggcgccattggtcgataccggccaaacaaggcagccagtagctcggcgtccgatgtgaatgagtttttggtggtcgtgaaacggtccatggcacagcttccccaagcccagtcaaaaacagttaaagctatcaaacccgttctcgtgaggagctatgcatga

SEQ ID NO: 193629 - DNA, 2220 bp, Klebsiella oxytoca
atgagttctcctcggcctgttgaatcagagtacctggccccagcagaagcggcactcactcaggctgtgggaggggaaaccagctttgagcttcggcttcaagttttggaggcagcatcagcgcgttttggcgggtttgacctaacggcgtttcatgaggcttttggagtcaagagcaagcgcgcagcatcagatcttttggagcttgcggtacctgtagcaagtgccatcgagcgttcacctattcaccctgctttggcactgagtgtcttggcgcgtgaggtcttgcatgagcaggatcgaaaaagcacgggcgcctaccatacggattttcgcctggctacacgactggcgcagctcgcagcccccaagctcacacacaagagcaaggtgattgatcctgcctgcggtgcaggaattttgctagcagcgctgactcacgcagtgtgtggtatggatagagccaagacggcgcattggttggctcacggtgtgtatgcagcggatctttctggcaactctttgcgtgcggcactgcttgcgcttgcttcgttcactgatgatgtatcgactcttaaggctatgcgtgcccgttggtactgtggcgatagcttgatggctgatcgcaaggtttggactgccatggtccctgaggggtttgatgcggtgatcggcaatccaccatgggaaaaggtcaagctctcacggcacgaattcttgaagtcctcaggcaccaagcgccactacggggcccaaattcatgggcttgatgaggatctgtttgcccagcagcgcaatgaggtagcgaactactctcgtcgcctgttggctcgctatcccgatttgggtaatggagagccagacctatacattgctttcacggacctcttttttgaactctgcaaaaagcagggtgtggtggttgcactaattccgggtgggctcattcgctcgcaaggtacccgcgccatgcggcagaaaatctttgatgcgagccaaagcgtgtccatgtcgatcatcgataaccgtgcacggttctttacgatcgacacacgctttaagttcctggccgtggctctcactaaggctggctctgaaaagagcaagcgtgagcccatcactctcatgcatgagcggggcacccctacgggattggagattacgggaactgccactattgggcgtgcagcacttgcgggtgttcggggcgatttgagcctgcccgaggttcgtaacgtgtctgagtggaagctcttctcaaagatcggagaagcaggtgtttcgtgggaagagcctggttatggctggaccccgaagttttgccgtgaagttgatatgaccaaggagcgtcctaagttcctggggcgtgccacgcctggcgctttgccactggtggaaggtcgaatggtgcaggcgcatcgctttggtgtaaaaggccacgtgtcaggcactggtcgccgtgcgttgtgggaggcttatgccatcggagactcacgccttgccccccagttttggattcgtctctccgacatgcccagtgctaaccagcaccgtgcggacgtgctgcgtgtgggcttttgcgacattgcgggtcagaccaatgagcgttcgctcatggcctcgttaattcctgctggggtggtctgtggcaataaggtgcccacgatccttttccctgaagacccatcagaagaacggctgctggtgtgggtgtccatcgctaacagttttgcctttgactggatgcttcggcgtgtgctcactacgacggtgaattacttcctgctgcaaagcgtgcccatgccaaaactcgccaaagatggtttgccatggaagaggctggtgagtgctgcacgcgaattgcgcacacttgacagtgcgggggctactcgtgaaacctacgagcgcatggcgcagcttcgtggggagattgatgcggaagtggccgtggcctatgggctcgatttgaaggacatggagttagtgctccaagacttcccgcttttggatcggggccaagtgggcttgccaggtgaggccaagtccacaattacccgagataatgttttggctgcaatggcaaaacgcacaggaagtctgtctacagtttggtcgcaccgtgcgatgcaggcacgcgcgctgggggcgattgcttatgtaccctctgagttcgctctggggggcgaagaaatagaagaaggatccaaaattcatggctaa

SEQ ID NO: 193630 - DNA, 573 bp, Klebsiella oxytoca
atggctaatggagcgggacaggttgctcgaattctgtacaaggagattgttgagggagatcgacggaaagctgatgcggagtctaatgactctgattctggagggggggcaagagactttcgatttccctacgaggcggtgttgccagctgttgagttgatatttcccaataaaattctccggggtggaaaggcagtacatcaaggtaccttcttttggaacgagccggactcaacacaggttgtatcaagagcagctgagtttatgtcacccacaaagtctcggccgagagagggatggatttctcaggtgccgaaattttcatgttttgattcggaccgaatgccatcagggggaattgggaatcgcgttttgttgcttctgattcagcttcatgaccagtcggtttggccgcacttcgcggaagaagcaactcttcgtgttaaaggcgtttgggatccttcagttgctcaagagctattgagttgtttggatgcacagcgggctgctaatcgagccgtaattggctatatcgacttcacgaacatgcgtaggttctgtaatggtaagtga

SEQ ID NO: 193631 - DNA, 1140 bp, Klebsiella oxytoca
atggtaagtgaaaactgcaaacaggtgttaaagctactcgcacgttcgcgcaacgtgctggtgtctggtgcacctggcacgggcaagtccaagctcttggccgaagttgctttggcctttgaaacagcctttggtcttgctcctgcaggtggcccaccgcagctcaatcccatgggcggcatccctattccccctgctgctggggttgttaaagacattcctgcacccaccaagatggaccgcaaagtctttcggacggtcttccaccaaaactccaagtaccgcgatttcttatcgggcatcacgcctgcggtcaacaagacagcaggagacccagacttcaccatcgtgaaggggactctgtaccgtgccagtgagcatgcgaagggtgccaatggggctgcactgttgatcattgatgagatcaaccgaggtcctgcggtgcaggtgttcggtggtgccattgtggccattgagtccgataaacgcttggcctctgatggggccaaacttgctgaaacgcagttctttgaaatgctcgatcccgtctctggtgatgtgatcgaatacgcactgccccatgacctctatatcctggctgcgatgaatcaggccgatgcgtctgtggagcccttggatgtcgcgttcttgcgtcgttgggaacctatgcgcctagagcccgatgaggcggctttgcggacgttttacggtttgggtgccaagggtgtcaatgcattgcctgatgtacctgccagcgtgaacgatgccttggaggcttcggtgagtgcctggattgctgtaaacgcgcaaattgctctgggccgtggtcccgagtttcagatcgggcatggtgtactgatgtcggatgtgaagccgcaaacattgggccttaatgaagctttgggcacgctgtgtgtagggtgggcgaaggtgcgggcacacgtggaagaggtattcttcggggacacacgaggaattgcagcggctcttaatgcgctggatgggccagcctttaatccgttcaagctcaccgagacaacttttgcggatgatttacgctttcgttttgaagggcccacgaattttgctgagaacaatatctacgcagctctcagggcatttgccaatccgagggggtag

SEQ ID NO: 193632 - DNA, 1305 bp, Klebsiella oxytoca
gtggtgaacccccgaacacggctgtcccttattgagtacggtacacccgttgacctgagccgtgcgattgctgaagcgattggggtggatcgcacgaaggccaacagccttttattggaggctgggagccggattgcgtcgagcttaaggcttagctacaaccctatcagtgtggatgccaagggcacacgtgccatcgattttgcgggcctcattcgcctggcaccttcactggaactggaagttgctcccaagtttttgggactcgacgacacagatgcagcgtggcgcgaagatttctttttcctctccacgctttcacgtcatgggcggctcttggcttccgaacgcttatcggcatcaggtggtaccccaagggatttgtctacgctagtagctcgttccatcacgagcatgtacgaggcccgtaaacgtcggccactgcgcagttatcgtagtgtgcgtgaagcagacttcttcatcgatggggatcctgatccggtggatctcatctttccttcacctgatggctttgagcaagagctcattcgctttgatcgcaagaacggttggaacggggatatcgtggcagcggccagggagttactccctgaagtaagtgacccttcagccgcaagttcgctggtgcgtttgattgaggacctttcgcctcagaacgttgctgctaaccgtcgaaaccccattcctgcacggcaccgagcgtggaagccactgcatgagctgtctatcgatgtgctcggaggcctggggcttaactacaagcagggacaggcccatgcacctggttacttagtgaatacctggcgcgtgtgggaagatctgttaacggtggccgcacgattgggctttggtcgcagtgccgtagtgccccaacagggctatcccttaggcactaagatcaggatgattaccggtgctgtgagcaagctttcagtgtacccagactgtgtaattgagctcgatggaacaaggcccaggatgctgctggatgccaagtacaagggccacgtggagaagggacagcttcgcatcagtgaagctgacatctacgaagccctggccttctccaaggctactggatgcaacctagtggcactagcctatcctgcacaaccaagcgatgccccgcagcccgtagggacgtgcactgtctttgaaaaggctgtggtggatgccgtgcaaatcgtgggcattcagatcgagagccgcctgatttctagggcgggagctctcagattatttgccgcaaacatggctgctggggttacagcagcctttgtgtga

SEQ ID NO: 193633 - DNA, 399 bp, Klebsiella oxytoca
atgaaactgacccctcttgttttcctgccggctctgctgccggcattcgcactggccggcacggtcttcttcaccgacagtcaacatctgccgacaaatctgccgccggacgtgccggtggtccttcttgatggtcctgaccggctgcaggccgacatgttcggggaattgcctgcagacccgcagcaggccgaagcacaggtcaggcagattatgacgtctcctgcctggcaacaaaaacagctgcaactaaacgattcttatcggcaggtggtccgggcctgggagctgggcatcaaaaaagtgccggctgtggtatttgatgaccgcgatgtggtgtacggcaccacggatgtggccgtggccacttccctgcgtaaccggggaggtggtcagtga

SEQ ID NO: 193634 - DNA, 933 bp, Klebsiella oxytoca
atgttattatcaataatcataccatgttataactgtgagtcaaatatcgaaaaattgcttctctcaataaaagagcagcttaatgaaaccgtacaactagtgttgattaatgatggctcatgggacgcaacgcatgacataataactaaatttacaagtgacaacccctctataaaaataaaatacattaatagtattaatcagggggcggcaaaagccagatcaacgggcttaaattacgcagagggagattatgtattcttctgtgattcagatgatatgatttctgctaatttcatatcggtttttacagagttaagtaatgataaaccggatatgatatatttttgctctacggtattagattcgcaaggaaacaggtttaaaaaggtacattttccattagcatacatcgaaagcaatagtaacgaagtttttaattatcttttgaagaaagggcagtggacagctgctgtatggacttatattttccggaaagatctcgtattgaaatctggcgctatatttacagacagaaaggtacatgaagatcacttattcacgctgagacttctcgctggtagtgaaaaaatatcaatatgtaattctgagctttactttcagaatgtgacttcaggttcacttactaaatcccctaaaaaaattgattatttaactgagcgttataagtcttataaagaggccagggaagatatcatttacaaattcagtcaggaaagcattgttctttatgatcgatggtctatgtcttcgctactgcaaatattaaaagaaaataaaaaaatggtgtttcaggggataatgcatacagctatatatcgagtattgtggaaggaaaaattagtgattttagattttgttaaaagcaaagttaaaaaaaaaatcacgagatctaagagcctatcccaatag

SEQ ID NO: 193635 - DNA, 1467 bp, Klebsiella oxytoca
atgaatttaaaatcgaaaacaatacatgctgtgaagtggaatttgttgtctacagtgtgcgtaaccgggcttggtatggtctcactgtggatcttgtccagcttatttacaacgacagattatggtatcattagtgcggcattaatattaagtactgttttctcaatcataactgattttggtatatcaaactcagttataagatctgaaaagttaaataaatatgaactgtcttcactgtatataataaatgtctttttaggtatgatattttgtctcggcttgtttatttttagtgctcagttagcatccttattcaatggtggaacagaactggcaaaacagataaaaatcatgtcattttctcttataatatcgtctttcggtggacagccaagagctttgttagccagagaacttagatttgatgtaatatccaggataacaatcctgtcagctatttttaattttgtgttcgcagtcttcttaagctacgtctatcgttccccctggtgtgttgccgtttcactgttggtttcctcatctattagtagcgtattgtatatatattcaagcaaaggcttgagagatattaagttacagttctttactttgaaggaaataaaaaaacacgtcagctacggttctcagttggtcatggactctatcattaatcagataagcgtgaatacatatcctgtactaatggcacgcttaataagtttgactgctatcggtggatataatatatcctacaacattagcgtggcgctttttgaaaaattgaatcctgttttatcacatgcgttatttccagctttttccaagatacaaaatgatgcagtatctctgaaaaaaacttttctaaaagtaactatgttttcgtctttggtgaatttcccgatgttattgggaatgatgttaatttcagactatgtagtgactgttttttttgagcagaaatggcagttcatcacccctattgtacagattttatgtttggttggggcggcgcgatcccttgatgtgcctgttatctctgtcttacttgctaaagggcaaatgtacagaaatgtttacctgggagtatttaagttagcgcttggtattcctttaacatggtttctgggtaaacaatatggtcttacagggatagtgttttcattcttatgtattcaaatagtaaatcttgttatgggatattttttccaggttagaccctgtttaaatatcaaagtaaagagttacatctatgccgtcttcgtaccgcttatacacactttacctatgcttgtaacgggttacctgttgattctttttttaactattacctctcctattttgtcaatggttgtgattattttttcatgtatgtctgtatacattgcttctatactcacctctccagtaaaagagataaaggaatttaacgcaatcgttctaaacaatatactgaggaataaatga

SEQ ID NO: 193636 - DNA, 828 bp, Klebsiella oxytoca
atgatatcagttaatttaactacaatgcattctcgactggatttatgtgccgccacagtgtggtcaattataaaccagagtgttcagccagataaaataaacctttggatatcaaatgagccatatttgtcagatcatgggatatatgagatacctgcttgggttgaagagctaaataaaataaataacatagtgaatgtacattatgtaaaaaataccggcccataccgtaaaataattaacgcaattattaactcagagattgatgacattcttgtatatgctgatgatgatgtaatatatggtcggcagtggcttgagttcctattaggccagttttatgagaacaactgtaatgtggcaattgctgctaggattagaataatggagaggaatatttttaacaagtacaaatcttatagctcttattctattagtatgaaaaaggataaatttgaaaaggattttataataactggcgttgggggttgtgttttaagtaagagaatgattaagcctagcattatcggagatgatgcatatttaactatttcacctaagacagatgatatctggattagtaaaatgttagaggcttccaatacgaaggtcgagtcatccccagatgcactgcgatgtgttcatgaaatattgcatggctataacacacttagctcaataaatacattaacatctaaaaatagcagtttaattataaaggcaatcaggatggttaaaaataaattctattcatattttgggttgcaaaaaacaaacaatgacaaatccatcaagatggttaatttgcattttaatggtaaattataa

SEQ ID NO: 193637 - DNA, 1059 bp, Klebsiella oxytoca; identical to SEQ ID NO: 192662

SEQ ID NO: 193638 - DNA, 303 bp, Klebsiella oxytoca
atgggctgggaaatcattaagggtaactgggcgatcatctgggcgctgtttatgtccgctgtgaacgttatccagctcctgctggccaaaacctacgtcaaacgcgaggagctggaattgttgcgtacccgtctgcagggcatcgaaaacaccattgcaggacttcccagccagaaagacctgcatcagctgcagctggaaatgagcaacctgcggggagatttgcgcgaactaggcccggcgattcgccaggtaaaacacgtcagcgatctgcttctggaaaacgagctgaaggaaaaataa

SEQ ID NO: 193639 - DNA, 291 bp, Klebsiella oxytoca; identical to SEQ ID NO: 16838

SEQ ID NO: 193640 - DNA, 1176 bp, Klebsiella oxytoca
atgaactgctaccgcttccagattgcctggagccgcgtttgcccggaaggcgacggtgagttcaatgaagaaggtatcgccttttatcaccagtttatcgatgaactgcttgcccgcggcattgagccgatgatctgcctctatcacttcgatatgccgctgtcgctggctgaacgctacaacggttttaccgaccgtcgggtgatggaagcctttattcgttacgggcagaagatgatcgactgctttggcgacaaggtgaagtggtggctgacctttaatgaacagaacctctaccacatgccggacgcgtttctgatttcaggctatatgtgcggcgagaagaccctgcgcgagctgtatcagatccagcaccacgtgatgatggcccacgtgcacctgacgcagtatctgcaccaggcgaagccgcagtgcctgatgggcggcatgctggcccatgcgctggtctatccggcgacctgcaaaccgcgcgatatcctttgcgcccagcagcttgatgagtttttaaaccagaacctgctgcgcgccttcgccggagagggctacagcccggaggtcatgcacgttgtcgcccgcgaaggctttgcggatatctaccgcgcagaggatctggcgctgatggcgcaggttaaaatcgactatctggcctttagctactacgccagcaaggcgctggatagcgacccgatcccgccgggcacgccggtgaaccactacatgcagtttggcgataaaaagaatgactttctgcaggccaccgagtggggctggcagattgacccgctgggctttcgcaccatcattacccgctactacaacgactggcgtctgccggtattcccgattgaaaacggcatcggggtgattgagtcctgggacggcgaaaatccggtcgctgacgattaccgcatcgcctatcatcgcgaccatatcaacgccatgaaagaggcgatgtttgaggacggcgcgcgggtgattggctatctgggctggggattaatcgatattctcagttcgcagggcgatatgcgcaagcgctacggggttgtctacgtgaaccgtgaaaaccacgaccttaaggaccttaagcgcgtcccgaagaaaagctatgcctggctgaagcgggccatccgcagtcacggcgaagagatgtag

SEQ ID NO: 193641 - DNA, 783 bp, Klebsiella oxytoca
atgaccacactctcccgccatccggctttcttatcgctgcagggcggtatcaactttcgtgacctgggcggccagcgtaccgccgacggccatcgcgtgcgtaccgggaaattattccgctccggctcgctgcatatgatgacggcagatgacctcacccatctggacgcgatcccgcttagccgagtgattgattatcgcgacccgggcgaagtgaatcgcagccccgataagctgaacgaagcggctcactacctcaacgccccggcgaatccgcacgttcgcgacgtcaacgccaaagtcaccgagctcaacgccgccaccctgaacgcccttaacggcgagcagtttatgctggcgctctaccgccagctgccgttcaataacgccgcttatcgccagctggccggttggctgatggagcctttcgacggcgcgctgctgcagcactgcgcggtgggaaaagaccgcaccggcgttggctgcgcgttgacgctgttcgccctcggctgcgatcgtcatacggtcatggaggaatatctgctcacccagggcatgctgacgcaggtcgaagatttcatgctccagtccctcggcaatgcgctgaccccccgcggccggcagaacctggcggaaatgatgacggtgcatgagtcctaccttgccgccgcactttcgcaaatcgacgaacgctacgccagcgtcgatgcctggctggagaaagagtatcagctcacgccgcaggcgcgagaagcgctccagtcgcggcttctggaggggtaa

SEQ ID NO: 193642 - DNA, 1326 bp, Klebsiella oxytoca; identical to SEQ ID NO: 164769

SEQ ID NO: 193643 - DNA, 1857 bp, Klebsiella oxytoca
atgaaaattaaggtttcaattttaggggggaagcgtcagggagatgcttttgaactgaagttaatcgatgaaaaaatcaactcatcattattcattcttgaagatgaagctatagaaatagcctttacgagtgaaaactattacgaaaagatttctttgttattatacgaaaatgaagtggaacctactttaatcgaacgtgtaggcgagctttggacttacagatggcttcccaaaaggctagggcgtttttcatatgaatgttttttccataattactatggaatagccgaattagtacttgaagctcaatacggtgaaaggactgaactttttagttttcaatcgatagaagttctggcaaaaaagttaaatgcagagcgagttgataagatgctgaactatatagcaaaaatcgatagtaatgctctttgtgcttttttcagagtaactcggcggaaagcaggtttcaaaaatggggatactcctgctgaaattttactagaacaaattgaaagcattgtcgaaataacgacaaccctgataagaaaaataatacaaagacctatttctaaattaacaagtcgggagaaatatgtttatccgagtgacaacacaaatattgatgatttgacgctgtcatggctatgtagcaacactgatgagctatttgaaacagattcatatgaaagtgcaattttggagtttaacgatgagctttatggggcgagaaagcttattgagcaccaggcagtagaagattctgacgtttatgaaaatcaagttttgcatggttttgttatgactttaattcaaaccacttcttctcttctttcaggcttcaaaaaccctgataagtatccaaatagaataaatggaagccctttagggtatgttagttttttctctcaaatacaaaaatttcagaagagtattaatgggcgaaaaattttaaaatgcaaatcaatattatcagatttacattctcttaaaaggataatggcagaggtgatgcctgcaaaaaaaaatataatcggagtgcccacgtttacaatgaaagccaaaaaggatcctttatacctttctgttttcaaaaagatcgttgactggtaccgatttgggaaacctgattggagtgttcaagaagagttattatccatacaaagcattccaaaattgtttgaatactattctcttttctatataagagagatattaggacagcatataggctctaaatccgcgcccgaaccagttaatgaatcaatatcatttgtttttaatcttagaaaaggggctactctaaaattactatatgagccaaaatattggatggccacccatcccatggcagacctaagaggtttggttaacagtgaaggatggacaacttacaatggtatggtgactcatcgttcttcctcagggagattttctaatcgatctcccgactttgtaatacatattagcaatgggaatggtattgacaagtatctcattcttgatgcgaagtatacttctactgataaagcctttttacattatttacctgagttaacgcttaaatatcttcatggacttcattctatttcagatgcaaatagttccatcattggtttgattattttaaatcctgatgagaaactactcattagagatttccataattcatcatttgatatttattcggataggccagctatgccatttttattatgcgctaccatttctcctggggaagagtatataagtaataattgtttccaacattctcttttaaagatggtaactcttatggagcaacgtgttaacacagaaggtcaaggtcgctacttaatgaacgttttaagtgcttag

SEQ ID NO: 193644 - DNA, 684 bp, Klebsiella oxytoca
atgccgatcatagcaccaataccccgtggcgaacgacgcctgatgcagaaagctattcataaaacgcgcgataaaaatcatgcccgcagactcacggccatgctgatgcttcatcggggtgaacgggtcagcgatgttgccagaactctctgttgtgcccgttcatccgttggtcgctggattaactggtttacgcactcaggtattgaaggcctgaaatccttacccgcagggcgctcccgacgctggccttttgaacatatctgcaccctgttacgtgagctgataaagcattctcccggcgattttggttatcaacgttcacgctggagcaccgaattactggcattaaaaatcaatgagataaccggttgccagttacatgcaggaaccgttcgccgctggttgccatctgcggggcttgtatggcgcagggccgcgccaactctgcgtatccgtgacccacataaagatgaaaagatggcggtaatccacaaagcgctggatgaatgcagcgcagagcatccggtattttatgaagatgaagtggatatccaccttaatcctaaaatcggtgcggactggcagttgcgcggacagcagaaacgggtagtgacgccggggcagaacgaaaaatactatctggccggcgcactgcacagtggcacgggtaaagtcaggtag

SEQ ID NO: 193645 - DNA, 309 bp, Klebsiella oxytoca
atgatgtttcgccatctggctgggcgtctgtgggcggtccagacgcgattcgatcagcgcaagatggctgcgataatggcgcatggtggggtcgttttttatatcgtcgagcacttcgcgggcggtctggctgatagtccggtttttactcaggcaggcatccgccaccgtatcaaggaagcgggggtcgagcatttccgcatcgctgaacgtcaggggctcatcgtgctgagcatagatattcccccgcacccgccctttatcatcccgcacgcgtttacagaggctgagccagccggttattcgtag

SEQ ID NO: 193646 - DNA, 396 bp, Klebsiella oxytoca
atgagtgatattaagaagaagttaagtgtagaagttagaaattattgggataaaaaacacaaacctttgctgtttagtacaattggcgataagttcaaagaaataaagtcagaagaaggttttgttaacataggtggttggatttctgaaaacataaatgatcttgacgcatttatttatagtgaccccaacaaaccagaatacatcggtttagttcctaatggggaagagtacgagccggaagagcctaaactattttctacaaagataagtaagaaaagtcagaataatgaaaggctggttttggattttctttcaatccttaacgatctaagtgatgatgatttgaagcgagtgatcatcccaacggatattttggttagacttatgaagtaa

SEQ ID NO: 193647 - DNA, 801 bp, Klebsiella oxytoca
ttgtcatttgccggtagtgaaccatcattgcctataaatgaatctttgatttcaaacggagaaaaaggagttatctcgaaagtaaaaataaaaaataatacgaaacatagtgatctaatggggtgtgtactatctgagttgggtgatttttactcagcttacagcggagtggtgctgttctgtgactcagactactacccttacctttgtaagcatgctgggctttttttcatggtttttgatcttagtagttgttcagcagatctagctgacgggcagctaaaacaaaaaattgaatctttaatgagtttgtcagtgaagaaattcatgcagattaaaagagagcttcttattagtaatggtattttgatgaggctgccatatcgtaattttatcaatccgttgctaaggggattctttgattctctaaagagggttcatgagattgatataggtaatcttgctgctgatataaagaaaataaaaaacgattgctataaaaatgtgccagatgtaaatcccggtagaatatttgtagatgtaaacttgaataatttcgtttttggtcacgaatatcattcaaagcaaggtacgtcgtctgcaaatgggcatgttttactttgcgatgtaagctctaagtataggtttagtcataggatcgatgagtttaggcattttaatgtgcagaaaaggggtaagaaacccatatctggatcattttataactgccatgacacaagggaaagtataaataaggagactcatattaacatgtttacgagtgatttcatggagtattga

SEQ ID NO: 193648 - DNA, 384 bp, Klebsiella oxytoca
atggctgagatgaaaattaccttaaagcacggttacatcgccggtaaaggcactgacgatgagatccgctacaaagaagtgacctttcgcgagctgacctcaaaagatgttattgatgctcagctggaggctgagcgcgtggtcatcggggagaacggcaaggccgtggcgtactgctctgaggtactgatgggactggcactgctgcgtaagcaaatcctctcggtaggggaaattcccggtccactgtcgcttaaacagctttacagcttccacccggaagaccttgagttgctgtccagcaccgcgagcaaaatggatgaccttgtgacggagaccgctggccgggggcgacctgatgccgctggcgacggcgctcagtaa

SEQ ID NO: 193649 - DNA, 1482 bp, Klebsiella oxytoca
atgtcttcactgggtgatattcctgctgatgtccgcgtcccgctggtgtacatcgatatcgacaattctcaggcgctcgacagtgccccggcacagtcgcgcaaaattatcgtcatcggccagcaaagtgcgactggcaccgctgccgttctgacgcaaaaccgcatcaccagcgacggcaccgctgaccagctttacggcaaaggctccatgctggcccggatgcttaaaaccctgcgtaaggccaatagctataccgaagtgtgggcgatgggcctggctgatatcgctgccggtgctgccgcaaaagcagagctggccattactggcccggccaccgctgccggtacgctggccctgctggttaacggtatatcggtgcaggtcggcgtcagtgctgacgataccgccgacactatcgcgacagccattatcgccgccgtgaataaactcccggatacacaggtcatcgccgcgctgaaaaccgcatcaacaacgtcagtcaccctgaccaccaactggcaaggcgcgaccggtaatgcgatggacgtccgtctcaactactacaccggcgagcagacaccggcaggtgttgccgtggctgtgactgctttcaccggcggcaccggcaccccggatattgcggcagttgtcgcggcgctgggtgatgactggtacaccgatattgtgttcccgttcaacgatacgcagagcctgaataccatccgggatgaactgctcgaacgctggggaccgctcaagatgattgaggcgcaactctggacggcattccggggcacccatgctgaaagcggtacctttggcgaaacccgcaacgactggttgatttcctgcatcgggacgaacatctcaccgcaaccgcactggctgtgggctgcatcctatggcggcatcgcatcctactatctggccaacgacccggcccgtccgctgcagacactggtgctgccgggcatcctgccgtcggtcaagacagtgcgctgggatatgcaggagcgcaatctgctgctgcatgacggtatcgccacccattacgtggatgccagcgacaacgtctgcatcgagcgtgaaatcacgatgtaccgcgtcaaccagtacggcgataccgatacctcgtacctcgacgtgcagtcaccggcgacgctggggcgtatccgctacgtcatcaaaaaccgcttcaccacccgctacccgcgtcacaagctggccggggatgatgtgctcgaccagcttgatccggggcagccggtgatgacgccgaagattgcccgcgccgagctgctggatatcgcgctgactgagctgatccctgcgggtctgattgaggacttcgacgactacaaagacacgctggatgtctatctcgacggcgacgacaagaaccgcctgaacttcatctgccacccgaacctggtcaaccagctgcgtgtgctggctggtcttatccagttcaaactttaa

SEQ ID NO: 193650 - DNA, 189 bp, Klebsiella oxytoca
atgttgcttcctcagctgctctgtcaggcgcagcagctgccggagaggcaactgctgcaggtaggacatatcaaaacgttgggaaagattgacgataaggttactcagcgccgtcgccagcggcaccaggtcgcccccgtgacgcggtctccgaaagcaggtcatcgagagcagctgctttactgctga

SEQ ID NO: 193651 - DNA, 510 bp, Klebsiella oxytoca
atggttaatttagagcagattaaagccgatattgcggcccgcaaggcgatgccagcatggggcgcaaatacttccatcgagcgcattaagactatcaatgccacgcttcccagcttttcgctgaaaacggttgaggcgctggtagaacgcatcgctgagttggagggtgctcttgaagtttctcagggggatttatccgacacagaagacgcaatgcatttgtgggctgaacgtgccaggaaagccgagtccgagctggagtcccgcaccgtcaccatcgagccattccgttcgtttgttactgatgccgatttagcagcgttacaccgcttcgcagaatgttgcgatgaccctgaatctggcggccacgatttggaaaaagagcaggttcagcgacttgaggcaatcggagcattgcggcgatatggttgcgtccactggatcacttattttggtgatttccttatttccattactacgggcatcaaggtcgaggtgaaaaatgtctga

SEQ ID NO: 193652 - DNA, 306 bp, Klebsiella oxytoca
atgtctgataccaacaaatgcactttaatcgagcttgacgatgcccttcaacagcacgggatgcttgagcggatacgtcttatcgtcaataccggcattgaaaaaggctggtcggtcaccgatgtgatgagcgtaattaaccgtgaaatatcggtcattgaagccgaagttaattacctgaataaaaaagcccaggatgagttagttcatcgtgagcttggcgtggatggtcaggccatcattctgaaaccagattatgataaggcgttattacttgcctactgcatcaggtctggacgtccatag

SEQ ID NO: 193653 - DNA, 252 bp, Klebsiella oxytoca
atgtccaatacccctgatgataataattttgatatcgctggttttttgctcgcaggcaatatcatgcttaagctcgttgaaaaaggagttatcgatatgcatgatgctaacgacatcatcgccaggactcgcgctgcgtaccaattacgtgactcatacaaagatgagagtattggtagtgacgctgaagcatatctggacactctcttcaataaactatggacgtccagacctgatgcagtaggcaagtaa

SEQ ID NO: 193654 - DNA, 555 bp, Klebsiella oxytoca
atgagccgcacatccatgattaaggtaatccatatcgcgaggcgcgatctacacctcgacgatgacacttaccgctcccttctgggggcggtagttccgggcaagtcgagctgccgcgagatgaccatcgtcgagctgcagaatgttatccaggcactggaggctaaggggttcaaaagcaaacccctgcgccgctctaagcgccgcatgtctgccccgtcagatgtgagtctgaaaatccgcgcgatatggaaaacgatgtttaaagagggttttatccgggatggtagctatattgcgctcgaccgttttgtccagcgccagacacgtatccgtaatggcggcgctggcgtctccagcctggaatggttgcgcggtgatgccgaagcaaacttccttgagagcctgaagcaatggcacatccgggcgatgagagaggctatgttagcgcaccgtgtccggctccctgaaaacccggtcaccggcgaagaaagccgggactatgacacaatctgcagcgcttacgctgacgcagccagaaggtggataaaatga

SEQ ID NO: 193655 - DNA, 390 bp, Klebsiella oxytoca
atgagtgacgatctctttggtgatgttcgtgatgacagtttgctggagcatttcagtgatgaaactgagaatgtccgcttcccttcgattcttgctgaactcaattcaatactgagccgggaactggcgagactaggcggcgattcttcgcattctctggagctggtaattgcgataacgcgtcatatcgggggaatgcaaatctatgttcctcggggacagcggcttgaattcctggtacgcgatatgcaaatctggcgggattactgtaacagggcaagcgttgatacccttgtgactcgctaccatgttacctacaaaacggtgtataaagctataaggcgtatgcgcaagctggaacacaaaaaataccagccatcacttttttga

SEQ ID NO: 193656 - DNA, 504 bp, Klebsiella oxytoca
atgtttaaatcaatttttaccgctggaattcttttaacttctctattgggaacgtctgtatatgcagataataaccaggaaaaggcatcactcccggatagagagattttattgtcaaactttgacaaaatggatttagtaaaagccggtgaatggaaacaaggtaaggttgttaatggtaagcctgttcttacggcaaggtttgatggtgatatctattccataggaagcgattccgttggagctgtatctttagcagcagataatagtgaatttcagttacgtcatactgcggcagtatgcgcgaacatggttgtagcggtaacggggaaagatgatgaaggcatttatggggctgttggtagtgtaattgccaaagctggagaagaaaaaggaaattactctgatttagttgatgggtacatgctgacagtggatataaaagaagttggaggctatccagccttaatgtgcaagatagagggttttgcaaggtgggattaa

SEQ ID NO: 193657 - DNA, 276 bp, Klebsiella oxytoca
atgagtgacgacctgacggcgcataatggccagcttttgagggagcgggaaaaagtcatcgagcaggcgaatagcctggttcatctccacgtcctgcgtggctttggctatcgagcagtactcgtcaaaatcccggtagtcccggctgaagcgcggggactgcatcttttcaggcatatcggcggagaaccagtacagatcctcaagctcttcggtcttgtagccttcaatcccgccgacccagaagacctttttctccatgagacttgccgttaa

SEQ ID NO: 193658 - DNA, 408 bp, Klebsiella oxytoca
atgcagcagttcagcgacccgatgagcgcccgcgctctgctccagtcgcagcagaactccgacgaggcgctgagcatcaaacgagacgctgacccgacgtttgatttttgcggctatctggaggcgctgccgcagaccaacgggatgtttatgggtaatgccagtatcatcccgcgtaattaccgtaaatatctctatcacgcgtatctggcctatatggaggccaacgggtacaggaatgtgctcagcctgaaaatgttcggactgggactgcccatgatgctgaaagagtacgggatgaattatgagaagcggcacacaaagcaggggatacaaactaacctgtcgctgaaagaggaaagctacggcgactggttgccgaagtgcgacgatcccaccgctacataa

SEQ ID NO: 193659 - DNA, 546 bp, Klebsiella oxytoca; identical to SEQ ID NO: 100894

SEQ ID NO: 193660 - DNA, 699 bp, Klebsiella oxytoca; identical to SEQ ID NO: 100893

SEQ ID NO: 193661 - DNA, 483 bp, Klebsiella oxytoca
gtggtccagcccgaagcgctggtaccagggagcgccattcgcctgttgcgtctgcagacgcccgatatcgttacgcagggcctgcagcgccatcagctgcgggtcgttaaccgcgggatgattcaccagctgctgcgcccgcgccgccgcgctgacgatatggtggcggttaacggcaaaggagaccacgctgcccgccccccacagggcaatcagcgtcagcaggatgacgccagacgttcgctgccacggtatccctgcccgcacgccccgcgcctgagcgcagtccgccgtcacgccctgccagaccgccggagcggaccagcggtgttcatggcccgcggcattatcctcaggggccagcgacgggctgaacatcaggccgcgcagcggaacacgcttcaggtgctccgtcagccacggcgtcagcagcgttttccagtgggatattccctgtttctccagctgccggccgaaacgtaa

SEQ ID NO: 193662 - DNA, 660 bp, Klebsiella oxytoca
atgaatatcaggtatctgtatggaaaggagaagattcttggccccgttatccgcgacgaagctccgatacgactgtgtgacctgacgcattattcacgcatggaaaacgaaaaaatgcgcgataatgaaatggaaaaaattttcactccggatcgttatcaagttgctataaaaattaatgggcgcacccttaaccctgacgatatgactgcagatcccatgtttacgctatcgcctcgtcattgttattgtatatgtttgagtaatcggcaagatgagccagaactctatgctgcttttaaagctgatatctgcatcgtattcgacgttgatctcctccaagaaagactttctcttttagaccacagattcccgggtactgaaattaaagggaaagatgtgatctattatcatccaggaacggcaccagacagcttcactcctgaagaacttgttttttttaaaccaaatatattttctcatgaagcagagtataggattgcgctattttatcctctaaacaaaacagggtttgcatacgagggaggagttttacctttcaaaatggaaggtgaatcaatgttcatggatatttcccatcagcaaaaaggatttataagtgaatgcgttaagaaggttatgcgaaggaaatcttcttga

SEQ ID NO: 193663 - DNA, 969 bp, Klebsiella oxytoca
atgaacaggttattggttataaaggaagaaaatcatacagttaaccctgatatggggcttgtgattcctgttgcttatcttgatgaaaatggaaattatgaaaaaattgatcctagcgattttcctaatggaggaatatttatttccaaaggatttttgaatataagccagcagtttggatatgatgaattatttattcttaatgaatattacgaaagcaatgatgatgactggaaaattaatacaagacatcaaaagcattttggacttggaagtaaagtagaaaggctcgataaaagctactttattccaattataaaatctgctctccccgatataaaaacaggtttccttggtcatgatattgacgcccctagcgctcaattctttattgagaatgagggctatgtatatggaccgtttaaagcctccaaacaagataacaattggcaattatctcctttatctacaccgtcacccttacagcttaaacaagaccatatagcaaggtttgatttaaaggaaattatagctaatgatttttcttatgagttaattattaaaggtgaagttagaaaatatattaaaaatttgaaagacctctccagtttattgtttgagcaaaaagattacatttcagatacaaggcttgtttcttacttcaccaaaaatggatttggaaatggattttcgaaaaataaatctcctttaggaaaaagtgaagcgcaaaagttgtcgcaagggattgatgagtatgttaagaagaataaagtattagagaatagcgagcgtcttaaaagacttaaggagctacttggagaatttttagattcaagtccattcggccaagagattgttcaagagtttttagcagaaagtagggatggcaggctttatttagatgattatttcagcaaaaataaagacctgctggttaagcaaaagtctaaagaactagggctttgttga

SEQ ID NO: 193664 - DNA, 873 bp, Klebsiella oxytoca
atgctgcagtggataaacggcactgacgtaccgcgtcaccgccacgcagtgcagcagagcatacagctgtttctggctggcgcggcggggatactcaagccggtgcggaccacgtcgtatccgccctgtcaggggctggtccgtgcaggcaccgggctttccactgcggccaatcaggcgtttgaaagctggctggcgctcctgctgaaggatgccatcctcgatgcggaaaccatcagagccgtggaccggctttatcaccagtcaggtctgggcgcgctgaaatgggagaatattcccgacccggcacgtgaggttatggcggagctgattgccagacagtataccgactggtttggtctggtcagcgccggcgatgagtctcatgctgcaactgcctgggagcggctcagccagtatcctgaacgctcccagccctgcgatatgctggccgtcatacctacgcggctggcagcagagctgaacggctccggggggctgatgtccggtgtgtcgaccacaaccagcctctactgccggcagtacggcatggagtggccggccgggcacaacgtcaactggcagcgccatacgcctaacagtcttacgctgcagatggatatgccctggctcccgccgtcaggtgaggttgtcggggaaatctcagcggtgtttgactgcgaggtgcgtcacagctacagcgagcccgtgagcgggctcagcggttacgactgctatgacggcggtgagcatgttgacggacacaaaggcgcgtccggcgcgcctcaacccggacaggtgctttatctcgtcagcgatgagcccgcttcaccggctcaggaacctgcatcatatcgtgaggtccgggggtaa

SEQ ID NO: 193665 - DNA, 303 bp, Klebsiella oxytoca; identical to SEQ ID NO: 82781

SEQ ID NO: 193666 - DNA, 333 bp, Klebsiella oxytoca; identical to SEQ ID NO: 146395

SEQ ID NO: 193667 - DNA, 309 bp, Klebsiella oxytoca
atgattgtaagctacaagactaaaagcggcgttcttctcgcgagtgcgtatatcactttgtcaacgctcctggtgcactctcactttgtaaaagtgtcatccgctcttgatgagggggaagatgtcgaaattaaaaacaatgacatagagtgtcattttgatgtttacgccagttatgaggcatatgaaacaggactacccccagttgaatcgcttgatagagtttatccgtacgatgaagcaagaccagcaaaagaacaagcggcaggaatgcttttggctgaattgtcacaacataccgcatattag

SEQ ID NO: 193668 - DNA, 1842 bp, Klebsiella oxytoca
atgtaccatctcgacaacgtcagcggcgtcccggagatgccggaaccgaaagacactcagtctatttcgccacgctggtttggggaaagccaggagcaaggcgggataagctggccgggggcggactggttcaatattatccaggcagaattgctgagtgtattaaaagagtcggggttatcacccgataaactctcatacaatcagttatcacaatcaataaagtcccaggcaaaaaaagccgctaatgatgcggtgaaatggttctctattgatgattttggcgcagttcccgacatggatgtagcaagtaaaacagttattactgattcagccgaagcgattaaacttgctcagcaggctgctgaaaaagtcaatggtcgcatttatgttccccgctgcccgaagggaaaagcgtattatagtagtaaaggatttacgttacgtgaggcacctcaggatccgtcagaaatcgctcatggctgggcgggagtgtcgctatatggtgatggaaaatattcctcccgaatttacttcgacacagatgactggtgggtagacatctcaggctcctcaggctggccaagtaacatcgcattagacaagatatccctttatccttatacagatttcaagggaaaagcacttcgaattaatggggtatgtgtcattccagttggcgaagttgctgtctatcgtgcagggattggcctgcaattctctaatgctcaaaagccgggtattttcacagaatttagtacctgtcgggatttgtggatcgaagactgcactataaatatcgatttttcacgggatggtggtgatgcgtcatttcatggtgtaagacttgatggagtaacgtccaatagtcggccgggtcagacagcaatacacatcgggccgggctgtaacgtttataactctgtctggtatggccacttcttcgctgacacgcccgatgccagtaaaggtgagcaacccgtcttgtggattcataacgaaggatccagaaatggttttgatcttcttttttttgaagggctaggagcagtaaaaaacgaaggtggttgggtcaccaaaggaatgtggcgggtagagaatagcacggggctcattaccgattattcgacaacaccattttgtgttgataactacatgacaccagttcaaccagaacattcagcttttcagtcattaggaaatatcaaattttcagcgttaaatacgccgacaaaccctgagccgtggcgagggctgataaggtacagggcacagaacaccgaggggataggttttatcggtactgaagttggtaattttgattaccaggggtttctgatgatgagcctgccatatggacaaaccatgagtaaggcaaatcctcgctggctgcatcattacaatggattatcacactggcgacctgaataccgacttgagtacatggggcaggcaccgcaacttgttatcagatcatcaggcttttcatctggcaggaaaggacaaagaacgactggaacaattaaagggaatccttcacctcaaacgattactacatcaggctttcattttcctgagtccggcacgcctgcacatgtgatgattaagttgttcaccgtaactcaggatgtttattactccgcactttgggttggagcgtcaaatcctgttggagaatcgtcaatgaagctgatccatgaaactgtagatgttgatttaaatggggatttaacgcagccagccagcatcaaggttaatacatcaggagacattgtattcacactgacagctaaaaaggacatgacatacgtaattggcattgatggtgttaacgttttctga

SEQ ID NO: 193669 - DNA, 900 bp, Klebsiella oxytoca
atgtccagattcagtaaacagctgtgcaaacaactcgtcacgcttgcccgtcaggggcggggaagttataaaacggtggctgaccgttcaagaatcgcagaacgtttttctgaacgactgtctgaactgaatattcagatcagggacgtaaaacatatcaaaacttcccatattgaaaagtatattgagagcaggaaggcagatagtttatctctcaggacgttacagaatgagatgtctgctatccgttctgttttattatcagcaggaagaaataaactggccgatcccagtcacattaacctgagtaatcaggcgctcgggatttctggtgctaaccgggatggaactaaacttcccattacagacgaaaaacttaatgctgtggtcagttttgcccaaagaaaagacgagggcgttgctcttgctgtgcaactttcccgatatcttggattgagaacagaagaaaccgttcagtctgcaaagtctttaaagacatggaggcaggcactgattaataatcatgagcgtgtccgtgttgttttcgggactaaaggcggacgtccaagggaaacgacagtttttaatcgcgaaaaagttttatcaattcttgacaaggcaattagttatgtcagtgaacataacggaaaactgattgataaaccctctctgcataccgctattgatcgctaccgtaatattgtaagagaggccggaatgaatggtaaaaatgcgccgcacagtttacgttacgcttactcccgcgatgctgtaaatcaccatattaaaaatggaatgagtcgcgatgaatccgaggcattagtttcaatggacctgggccatggagatggtcgggggcgttatattaaacaagtttattttcgtaaggaaaaagaatag

SEQ ID NO: 193670 - DNA, 444 bp, Klebsiella oxytoca
atggttaatttagagcagattaaagccgatattgcggcccgtaaggcgatgccagcatggggggctcatacttccattgagcgcatcaggactatcaattccacgcttcccagcttttcgctgaaaacggttgaggcgctggtagagatgcttgagtcctgcaatagcaccaaagcaattaacgacgttttagctgaacgccagcggcagcagacagttaaaggattctcgactgagcaggatgatacctatattggcggcgagctggctgccgcggccatcagctatatcgagccgatggaggctgcaagctattggcctgctgactggcatgatgacagttttagaccaacagactatcggcgtaacttagttaaagccgccgcacttatcatcgctgaaattgagcgtcttgatcgccaattgcctgaggggggcctatga

SEQ ID NO: 193671 - DNA, 555 bp, Klebsiella oxytoca
atgacccgctcaaacgcaatccagattatccatatcgccaaaggccagctggcgcttgacgatgatacataccgctccctgttaggggcggtagttcagggcaagtcgagctgtcgcgagatgaccatcatcgagctgcagaatgttattcaggcgctggaggctaaggggttcaaaagcaaacctcagcgccgctctaagcgccgcatgtctgccccgtctgacgtaagtctgaaaatccgcgcaatatggaaaacaatgtttaaagagggttttatccgggatggtagcgatgtcgcgctcgaccgttttgtccagcgccagacccgcatccgtaatggcggtgctggcgtctccagcctggaatggttgcgcggtgatgccgaagcgaatttccttgagagcctgaagcaatggcacatccgggcgatgagagaggctatgttagcgcactgcgtccggctccctgaaaatccggtcaccggcgaagaaagccgggactatgacacaatctgcagcgcttacgctgacgcagccagaaggtggataaaatga

SEQ ID NO: 193672 - DNA, 498 bp, Klebsiella oxytoca
atgaagaaatacctggcttttctgctaattcttaccgcacaagcggttgctgaagattcggtgccccaaaataccgttttgcctgaccgagatgttttgttatctcgatttgataaactgggaattgttaaatctaatgcttggcacgaaggtaaagttatcgagggaaagccagtattaaccaccagggaaggcggtgatttatacatgatgaacaacaagtcattatcatccatatcaatcacagagggagataaaccgcatgaggaagcaacacatgcggcatctatttgctttaacattgcgtatgtggctacaaataccaagagtaaaaatgtcacccaagctgtaaccgatattattgaagaggcagctaatgataaaagtggctcatctggagatttaattaatggttattggtttactgttgacataaagcatatagataaattcccgatgttggtctgcgaggttagcggattcactcgatgggattga

SEQ ID NO: 193673 - DNA, 1005 bp, Klebsiella oxytoca
atgtctaggttatttatttgctttaaagcttatctctttttttacttgattctattacctatatcatcttgggcttatatacttggtatcggggggcatcccgaggggtttacaggtactcctgaaaaatatgtaaaattgttaaagcggtataacatctcctcgctcagaactgattacctttggcgtgaggttgaaattacgcaagggaattataatcctgcaaatattaaaacagaatcagtacttaatatttcttttaatcaaggtgtgtccgcgctacttatattgggctacggaaataatttatatactgctggaaaaccacgaactaaagatcaaattattgcttactcaaattatgcagcatggactgctgaacatttcaaaggtcgaggatatatatatgaaatctggaatgagtggccacatagaactaataaagatagttctccaataaatattgattctgcgctgaattatatcgaattagttaaatccgcatcattagcaattaaaaaggctgatcctaatgcaaaagtgatagcaggtggttttaatcccattgatgggttagagaagaagtggggcttgtatttggttagaaatggtattttaaaatatgttgatggtctttctatccacccatatgcctattccagcaggaggctggcatcccccgcaaccaacttatccattgttgaaaattttcacaatatgcttctttcaaccaataagggatttaaagaaataccactatatgttacagaaataggatatccaacctatcgtggtaagccacaatttactgaagatgatgttgagtcttatgcggctgaatatctgaaaattgcaggcactatgtcatttgttaaaggtgtgtggtggtacgatctaaaagatgatggtaacgacaaatataataaagagcacaattttggtatactcaaaaataatttggctgaaaaaaaagttgctgatgtttttactaaatcaaaactttaa

SEQ ID NO: 193674 - DNA, 1245 bp, Klebsiella oxytoca
gtgggacagctgtgtcagcagcagggcagggctgcggtactggaggtgacacagaagcgggagaaaacggcggcacccctctgttttgacctgggcacccttcagcaggtctgttcccgaaaattcggcatgggcgcaaatgatgtgctcgccattgctcagtcactttacgaaacccacaaagcgaccacctacccccgtacagactgcggttttctgccaacttccatgcagcaggaaatatccgacgtgctggcggcagtggcgaaatccgatccggctgtggccccggtactgaatcagctggacaggcagtttgtctcgcgtgtctggaatgacaaaaaaatcaccgcgcaccatgccatcattcccacccgacaggcatttgatttgtcacgcctcagcgccgatgagctgaaggtctaccagctgattcgccagcattatttcgcccagttccttccgctgcaggaatctgacgtgacggaggcctctttcaatatcggtggacagctgttccgtacacgcgggaaagtcggtgtggtgacgggctggaagtcattgttcctggctgaaaaagatgacgatgaagaggacgtcgacggtgacagtatggcgctgccggcgctggcaaaaggggatatttgcgctgtcaccggttctgaggttaaggatatgaaaaccagtccgcccaaaccgttcacggaggggacgctgattgctgccatgaagaacgcggccagtttcgtcagtgacccgaagctgaagaaagtgctgcgtgataacgccggtctgggcacagaggcgacgcgtgcggccgtgcttgaaaccctcttcaaacgacactatctggagaaaaaagggaagcacatccactcaacgcagatggcccgggagctgattgcggccctgccggaaacgctgacgagcccgggcatgaccgcattatgggagcaggcactggatgatatttcgcaggggaaaatgtcgcttgcggtctttatgcaaaagcagctgcagtggacccgtcaccttgtcgaaaaaggccgccaggacagtgtgaaaattactgctcccgtcacgcctccctgcccgttatgcaaaggacccccgcgtaaacgtaaaggtaaaaatggtgattttggggggtgcatacgctatccggactgtgagggaattatcagtacaggtaagaagaaagcagcgaagcgtaaaaaaacatcggttaaggctaaaacagaataa

SEQ ID NO: 193675 - DNA, 1116 bp, Klebsiella oxytoca
gtgcagggcgataccgttggcaatcgcggtcataccgaattcacgtacgccgtagtggatatagttaccggcagtgtcttcgttgatggccttagagccggaccacagggtcaggttacttggcgccaggtcagcagagccgccgaggaactcaggcagcagcgggccgaaggcttcaatggcgttctgggacgctttacggctggcgattttcgccgggttagcctgcagcttcgcgatgaattcgttcgctttcgcgtcgaaatcagccggcatctcacctttcatacggcgggtaaactcggcggcttcctgcgggaaggctttggcgtaggcggcgaatttctcgttccacgcggactctttcgcctggcctgcttctttggcatcccactgggcatagatttcagacgggatttcaaacgccgggtgtttccagtcgagcgcttcgcgggtcagcgcgatttccgcgtcgcccagcggcgcgccgtgggagtcgtgggtaccggctttgttcggcgaaccgaaaccgatgatggttttgcacatcagcagggacggtttgtcggtgaccgcacgcgcttcttctaccgcgcgtttaatcgagtcagcatcgtgaccgtcaacgccgcgcaccacgtgccagccgtaggcttcaaaacgcttcgcggtgtcatcggtgaaccagccttccacgtgaccgtcgatagagataccgttgtcgtcatagaacgccaccagcttgcccagtttcagggtaccggccagggagcatacctcgtgagagataccttccatcatgcagccgtcgcccatgaacgcgtaggtgaagtggtcaacaatgtcgtggcccgggcggttgaactgcgccgccagagttttctccgcgatggccataccaaccgcattcgcaataccctgccccagcggaccggtggtggtttccacgcccgcggtgtagccgacttccgggtgacccggcgttttagagtgcagctgacggaagttcttcagctcttcaatcggcagatcataaccggtgaggtgcagcaggctgtaaatcagcatggaaccgtggccgttggacaggacaaaacggtcgcggtcggcccatga

SEQ ID NO: 193676 - DNA, 447 bp, Klebsiella oxytoca
atggccttcctgatgataaagaataacgtcgccttcttcgccgccacgggggcgactccctttatcctcgacggcgatggccaccatgccgccgcgacgaccaccgacagcaacaacaatcgcctcggagcctgcaggcgggacgctggaaaacccgtagttctggaagcgctcgacgtcatcatcggtctcatcggccagcgactgcacctgcaggttctgccgaccgaggctgtccgtcacaatgcgaaccagcgcccggtccaccatcaggcgcagacggcgactcatagccgcgatggcgcgggagaagttgacctctttcagtcccatgtcacacccactgaagtttttgacttcgcctttttacccttacctttagctttctgctcaggcatatccagcgactcaggcggcaccagcgtcagcacggtcaaccgcccctga

SEQ ID NO: 193677 - DNA, 714 bp, Klebsiella oxytoca; identical to SEQ ID NO: 100939

SEQ ID NO: 193678 - DNA, 207 bp, Klebsiella oxytoca; identical to SEQ ID NO: 129378

SEQ ID NO: 193679 - DNA, 543 bp, Klebsiella oxytoca
atgctcatgcacccgcatcgccttatcactggcgctcatggcggtaaattctgcctcgctcatggtgtcaaacgggctttgtgccgctggccggatggctgcataaatggctttccgcgtggcgtcctcccccttcagcatcatcgcatcattccagtcaccgaacaccggcggcagggcaacaacgccctcacaggctcgagcggccgcagcggcttttgtctggccgtcgccgttcaggtcacggtcagcggcgaggataatctgacaggccgggtgcttgctgcgggccaggctcgccagagaaagaaggttcacggacgacagcgccaccatgacggtttcgccggtcaggtgatgcacggcaagggccgttgcataaccctccgctatccacaggcgtttcccggcctgtttctgtccgtcgataagatggcatgcccctttgacccgcccgcctttcagggtgcgcttgagcccctcagcattaataaactggaggttaaccagcgcgccggtcccgtcatacagcggtacaactaa

SEQ ID NO: 193680 - DNA, 543 bp, Klebsiella oxytoca
atggggatatcggttgaggttatcggcgctgagaagctgcagcagatgcgcatggccatcgagaagctctccgacagttcgctgcagcaggagctgctggagagtatcggggctgttgtggaatcacagacccgccgccgcatcagcgacgagaaaacctcaccggctggcgagcgctgggaggaatggtccgaaggttaccgcaagacccgcagcgggaatcagagcctgctgcaggggaatggcgatctgctcgacagcatccagtacatcgtcgagcgtggccgcgttcgtgtgggttcgccgctcagctacagcggtgttcatcaggacggctttgcaggcagcgtcccggtcagcgctcataagcgtctcattcatcaggcgtttggccgggcgctgaagcatccggtctggcagaccgtgggctcccatacccgccagatgaatattccgcagcgcgagtacctcgggctgtccaccgcaaacagtgatgagctgatgcatgtcatcggcgatttctggagtgaggtattaccgtga

SEQ ID NO: 193681 - DNA, 441 bp, Klebsiella oxytoca
atgggtatttacgttacccgcgatgacctgctggccacagatggttcgctggtctggaacatggccatcgacaaggcaacgaaccagctcgacgagacgaagatagccacggccatcgaggacgcggacgcggagatcaactcgtttctgtcaaagcgctatcagctgccgctgaacatcaccaccgttccgcgcccgctgcaccgggtagctgtgtccatcgccatttactggctgtccgagcgcgacaatcagatcaccgacctgattcagaagcgctacgacagcgccatccagaccctcaaggagatggcgaacggcacgcgcgacctcggcctgccgaccgacacgccggccccggagaccgataacggcaggatgattgttgtctccgataacaaacgtctgttcacccgcaacaacctcaaaggggtgctgtga

SEQ ID NO: 193682 - DNA, 1086 bp, Klebsiella oxytoca
atgactgaagagttaaccctgaacgttgatggcaaggtctggggcggctggaccgacatgaccattaaccgctcgctggagtccgtggcgggcgagtttgatctgaccgtcaccgcccaatggtcatccgcagcccctcgctccatcaagcccggccagtcctgtacggtttccatcggcagcgaccgcgtcatgaccggctacattgacgacttcattcccagctatgacgcggagaatgtatccctgcgcgtcatgggtcgcgataagaccggcgatctggtggacagctcggtggtcgataagtccggccagtggaagggtcagaagctggagcagcttgcggccaccatctgcaagccctacagcatcgaggtggttaacgagaccgacactggcgacgcctttggcagcatcaccctcgaacagggtgaaaccggctttgaactgctagaccgtctggccaaacagcgcggcgttctggtgacctcagacgcgtacgggcggctggttatcacccgcgcctccacccaacgggccggagtggcgctcactctcggcgacaatattctggctgcacgtggccgcttcagctggcgcgagcgtgccagccagtacatcgtcaaaggttccgccagcgcgggcggtgcgacgtgggacgagcagccggtgaaaatggtcggcggtcgccagacagtggtcagcgacccggagatcacccgctatcgtccgaagattctggtcaacgaggacagtctgacggtcggcggtgcgagcgctcgcggcgagtggtacaagacccgtatgttgggcgaagccaataccaccgaaatcaccgtcgcgggctggcgtgagaacggtatcagcggtccgctgtggcagacaaaccggctggtgaaggtaaccgatgccattcagcagctcgacgtcacctggctgattaagtccgtttcctttatggaaggcgatcaggggcggctgaccgtgctgacactggtcccgccagagtcgctggatatgcctgaacagaaagctaaaagtaaaggcaagaaggcaaagacttccgtgggggtcacgtgggactga

SEQ ID NO: 193683 - DNA, 267 bp, Klebsiella oxytoca
atgcacaccgctttttcttccccgtcttctgcccctgccgcgccgctgatgccggtttctgatgccgtacacgagcgctttattcgcctgcccgaagtgatgcatctgtgcgggctgtcccgctccacaatttacgacctcatcagccgggaggctttcccgaaacaaatctccctcggcggaaaaaatgtggcgtgggcgcagtcggaaatcaccgggtggatggccgaccgtatcgccgaacgcaaccggggctatgacgcatga

SEQ ID NO: 193684 - DNA, 195 bp, Klebsiella oxytoca
atggctactatcctcaccccgtcacacccgcagtttgtctttgtgtttgccgccgttcgtcgcgcagaccgtcagccccgtatctgtatgctccgcaccgtcgccggtgacgagcacgccgcacgcctttccctcgttcgcgactacgtcctctcgtttgccggtcgtctgccggtggcggaggtgcgcgcatga

SEQ ID NO: 193685 - DNA, 438 bp, Klebsiella oxytoca; identical to SEQ ID NO: 100934

SEQ ID NO: 193686 - DNA, 513 bp, Klebsiella oxytoca
atgctgccgccgggtattccgtttgcgtggccgggggcgacagcgccgaccggctttacgctgatgctcggtcagggcttcgataaaatcgcttacccgcgccttgccgtggcgtatccctccggcgttctgccggacatgcgtggccagactatcaagtttttgcccgcctccgggcgtgcgctgctgtcttttgaagccgacggcataaaggctcacgcccataatgcgacgattaacagtaccgacctcggcaccaaaacaaccagcgacgacaacgagcactttcatcagggcggaatggttgctccgggtgatgtctgggacagcgattatgtggtcgggtcagataacgattctcatcgcacccgcaacaataccagcaccgcaccagcgcatcatcatacggtttatatcgggccccatgcgcacacggccacggtggccagcaccggtaataccgaaaacaccgtcaaaaatatcgcctttaacgccattgtgaggttagcgtaa

SEQ ID NO: 193687 - DNA, 513 bp, Klebsiella oxytoca
atgctgccgccgggtattccgtttgcgtggccgggcgcgaccgcgccgactggctttatgctgatgctgggccagagcttcgataaaacagtgtatccgcgtcttgccgtggcatatccctccggcgttctgccggacatgcgcggccagaccatcaagtttttgcccgcctccgggcgagcgctgttgtcctatgaagccgatggtgtgaagcttcacgcccacgatgcgacgatcaacagtactgacctcggcacgaaacagaccagcgacgacaacgagcactttcaccagggcggaatgctcgcaccgggtgacgtgtgggatgataattatgttgtcggctccgacaacgactcccgccgcacccgcaacaacaccagtaccgcaccggcacatcatcatacggtctacatcggtccacatgctcatacggccacagtggccagcaccggcaataccgaaaacaccgtcaaaaatatcgcctttaacgccatcgtgaggttagcgtaa

SEQ ID NO: 193688 - DNA, 156 bp, Klebsiella oxytoca
atgccagaacagtgcagaccagaaaatgaccgtattccacatcacgttttgctctgcctgctcttctggcgcagctccgggtggaaacatgtatcctttggccagtctgaccgcacaggttgtgaactgcagcgtaaggtccccgaagccgtctga

SEQ ID NO: 193689 - DNA, 429 bp, Klebsiella oxytoca
gtgttcgctgctgaggtcatccagtgcctggaagttaaaggcgcggcgcttctggtaaaggatgggtttcagcacctgactttcatcaatcaggaaccacggctcacctttgtcggttgcgatatcacccacaatgttgctgtaggtgccgcccgccattggatggtcggtatcaaagaagttctggccgtcaaaacacagggtggaaaaaccagcgacaagcagcgggaaactcagcgtgtcagggaattcggcgacctgctgaccgaacgcctgcgcaatgactctgtactggccaatctggtcatcttcgatattttcacgcttgacgcggatcgagttttcccaggttttgttggcgatggtgtagccgtactgagacaactgagcgaactggcgctcactgacccactctttgatggtcggtaa

SEQ ID NO: 193690 - DNA, 144 bp, Klebsiella oxytoca
atgcagggcgtgatcagcattaacagacttgtttgcggcgggaaaggcaaccgtctccggctcgccaaagtgatgtctgcggttgcgttctttaggatcgagttccatcatccagcggtcatagtccagttccggatggggtaa

SEQ ID NO: 193691 - DNA, 195 bp, Klebsiella oxytoca
atggctacgaccctcactccgtcacacccgcagtttgtctttgtgtttgccgccgttcgccgcgcagaccgtcagccccgtatctgtatgctccgcgccgtcgccggggatgaacaggccgcacgcctttcactcgttcgcgattacgtcctctcgtttgccgggcgtctgccggtggcggaggtgcgcgcatga

SEQ ID NO: 193692 - DNA, 606 bp, Klebsiella oxytoca
atggatccgataaccctttccacagtggcctccgttctgctcaaagccgggccttctctggtccgaactgtcggaggctggttcggcagcgataccgcaagagccgccgactcggtggccagtattgtcgagaccgtcaacggtgccatcaatccagtcgaccagcagcgtgttctggagcagaagctggcacagttgccccccgaacagctggtacaactggaaaccctcaaggtacagctgcagcagttccagctggagcgggacaaggcgcagatggccgaccagcaggccgcgcaacatgaacagcaggaaaccatccgcaacggcgacaacgccacggacgaatatgtccgtcagacccgcccgctgatggcccgcttatccctctacagcagcattgcctacgtgatgatcatgtctctgggtcagcaggctggcgcggtggccggtgctttcggccatgcgtttaccatgcccgaaccagactgggatatcgcgctgatgctggcgaccccggcgctgggttatctgggtttcaggacgctggacggtttcgcccggtacagcaaatccagcaaacacaaggtcatggtgggtaaatga

SEQ ID NO: 193693 - DNA, 228 bp, Klebsiella oxytoca
atgcagagcgccgccggtgggcgggttgcgtttgcggtacagcagacgggtcagcagttcggcaacggactcgacgtccgcaccgccggaaatacccgcatccgccaccacgccatcactgttcactccggccaccggggaaatcagagtcaggacgtcgcccgccgtcaggttgccgctgagacccgtttcgtcagcctgcacggtgacggtgattttgcccgctga

SEQ ID NO: 193694 - DNA, 306 bp, Klebsiella oxytoca
atggtcctgctgcataacctgtgtccggacagcttccggatacattcttcagacgagggtcgcagctgggcgttaccgttacgctggattgaacaacatctcggtctgcctgagcagccgacgctgaccgcgcctcagtcggtactgaaaacaccggtaggcgagggcgcgtttgattccctgctgctgcagctgctctccggtggtgagcgggtgctgagcaatgaggactggaatgccttcgtgctggcggaattccatctgtacgaactgaagcgggtcgcggaaaaatctgactcgttttaa

SEQ ID NO: 193695 - DNA, 306 bp, Klebsiella oxytoca
atggtcctgctgcataacctgtgtccgggcagctttcggatacattcttctgacgaaggccgcagctgggcgttaccgttacgctggattgagcgacatctcggcctgcctgagcagccgacgctgaccgcgcctcagccggtactgaaaacgccggtgcgtggtgacgcgtttgattccctgctgctgcagctgctctgcggtggtgagcgtgtgctgagcaacgacgactggaatgcgtttacggaggctgaatttcagctgtatgaactgaagcgggtcgcggaaaaaactgacgcgctgtaa

SEQ ID NO: 193696 - DNA, 270 bp, Klebsiella oxytoca
atgcgtgacgcggccagcctgaaccttctggacaccaaaccacggatgcaccagctcaccgggaccggcggtattgagcgcgaccagaagtcggttcatctggtcgatatagtcactgccgaggaggatcgcgttaatctgctgctgagtcagcaccgcgccgtggtcttccgtccagccgacctcttttttggggtaggcatgagggatagcacggcgaccaccagtgccctcgacgtcacggaaaaagaacgggatgccacggaatga

SEQ ID NO: 193697 - DNA, 153 bp, Klebsiella oxytoca
atgcgtgacgcggcccacctgaaccttctgcacgccgaaccacggatgcacgagttctccgggaccggcagtattaagcgccgccagcaggcggttaagctggtcggtgtagtcgctgccgagcaggatcgcgttaatctgctgctgagttaa

SEQ ID NO: 193698 - DNA, 294 bp, Klebsiella oxytoca
gtggtgcgcaatgcctcctacagcggtgacggcggccttgatggtcaggtcatcattgacggtgagcactggcttatccaggccaaacggtacagtcgtgctgtttcccccgcacatgttgaggacttcgaccggcttctcctgcagtccggccgccgggggctgtttatccacacgggccgtaccggaaaaatgagccgcaccattcgcacggcgtcaccgcgtctgcgcatcatcagcgggcaacgcctgctggccattctcgccggtcaggacgtccggcagtatctctga

SEQ ID NO: 193699 - DNA, 321 bp, Klebsiella oxytoca
atgaaaacgcctctgccgcctgtattgcgtgccgccctgtatcgccgcgccgtggcctgtgcctggctgaccctgtgcgaacgtcagcatcgctatccccacctcaccctcgacgcgctggaaagcgccatcgccgccgagctggagggcttctatctgcgccagcacggcgaggaaaaaggccgcctgattgcctgtgcgctgctggaagatttgatgcaggccgggccgctgaaagccgccccggcgttgtccttcctcgggctcgccgtgatggatgagctctgcgcccgccatatcacatcgcctgtactgcactga

SEQ ID NO: 193700 - DNA, 336 bp, Klebsiella oxytoca
gtgatcctggtgggattgtcgctgctgttctgcagcttcactggccgtcaggcgtttattgtctggtggctcactttcgccggtgtgctgttaattggggcgagcgtatggctcggcaatctcccgtatcgtctgctgcaacctggtaattccgctcgccgatggtcaggtgctctgtcctggattatctggggcgcaggtttcctgtcgctggccgtcgctcccgcgaatgcaaaagacccgtggaccctgctgtttaatccgctggctggactgactgccttccttctctggttatgggcttcacataaggagccccttaaatggatccgataa

SEQ ID NO: 193701 - DNA, 360 bp, Klebsiella oxytoca
atgcgccgaacggtcgagcgcatggccggtcaggagtgcgggctgctggctgagtcccatcagctccggggcaagcgtggccgccagttcagcaccatgcgcctgcatgaagtcattcagcctgttgcggatactgatgcgctgcaccgcttcatgggagcggatatagcgtccggcggcctgatttatctcccattttttgacgtccataatgtcgcgcagttcctgcataattgccgggatacgttcatccccggccagcatctgctcgcggtattcctgctctgcggccgccagttcggctttacggctcagccaggcggttttgttattctgacaggcctcaaaggcctgctgtag

SEQ ID NO: 193702 - DNA, 267 bp, Klebsiella oxytoca
atgcacaccgctttttcttccccgtcttctgcccctgccgcgccgctgatgccggtttctgatgccgtacacgagcgctttattcgcctgcccgaagtgatgcatctgtgcgggctgtcccgctccacgatttacgacctcatcagccgggaggctttcccgaagcaaatctccctcggagggaaaaacgtggcgtgggcgcagtcggaaatcaccgggtggatggctgaccgtatcgccgaacgcaaccggggctatgacgcatga

SEQ ID NO: 193703 - DNA, 168 bp, Klebsiella oxytoca
atgatagtcaacgtcacagacatggataccgtgcgcgagctgcgcgagctggcacccggtgtcagcctggccccggcttccggcagcgaactggcccgtcgcctgcagattgcgcattatccggtactcatcaccgataccggcctgacgcagcaggttaagccgtga

SEQ ID NO: 193704 - DNA, 357 bp, Klebsiella oxytoca
gtgagcggtctgtccccggtcgccagctgcgcaacctggggaatctcctgggacgaccccgcggccacgccggctgacgattttcgtttcgatattggcggtacggtcagccagccggtgccggaaaacagcttcggcgtggtgaatggcgagatccccggcggacgttgcgcagtggtgcgtcatcacggctctctggacaccctcgcgcagagcatctggtttctttatcgcgactggctgcccgcatcgggagagtcgctgcgcgatttcccggttttctttcgctacctcactttcgtgcatgaagtcggtgagcatgagctgcagacggacgtttatcttccgctgaaatga

SEQ ID NO: 193705 - DNA, 1080 bp, Klebsiella oxytoca
atggctcaggtctaccaggcaatattaacctcacagggtagccaacggatcgcagacgctgcactgacaggcgagccggtagggttctcatatatgggggtaggagatggcaatggtcttctgcccgccgtgagtgctgttcagaaggggctggtaaatgaattataccgggcgccactaaaccggctggttatagctgacagagccgaaaatgttattcgcgctgaaatggtcatgatgccgcaggtgggtggtttctggttaagggaggcagcgctctatgatgataacggcgtttgcctggcggttgctaatttgccgccatcttataagccgctacttgcggaaggctcagggcgtttacaggcggttaatttgtggattgccgtaagcaatatcgccagcgtggaactgaaagcagacccggcggttattgttgcctcagtgggggaagttgagcgtgcgaaaaatgaggcgaaggattacgccgataaggtcgcaggggatcttgataaagatattcagcaggtaattaccgacgccattacagcggcaaagcgtgatttctgggaagacgataaccccgtcggaactacgcgttttttcaataagaacctgaaccccaatgagcgctggccctggtcgaaatgggtttacactggcgaaaataaaactgtccgcatcggtaaagctgacggctcaaacgtcgggcagactggcggcagcgataatatcacgctacagcgggctaacctgcccgccgttcagattaatgtgagcggcgaaaccagtgagttacctgcacatgagctgacaaccaggggggctggcaggcacaaacatcagggagggatggcggcaccgggtgaggcatgggacgggaattatattgtcggctccgataatgacagccgccgcacccgcaattacaccagtgaagatggcgaacatacccatattgttgacgtcccgacccacaaacacaataccagcggcaaaaccgacaacctcggcgagggtaaatcgttcagcgttgttgaagcccacaccctgttgatgtgctggagccgtgttgcctga

SEQ ID NO: 193706 - DNA, 762 bp, Klebsiella oxytoca
atggcggttttaaaacagcaggatgtaatatttccaaaggggccacggtatgcttatatcgaagattttcagttgttcgatattatggctgagtcacctgttaaggataatcttgtcgggtcatattttcttggttcacggaacgttgacccgctttataattttgccaatcctgaactgcccttactgcaaacagggaggccggtctattcacgtcagtacgcagacatgacccacggaaaccatttcgacacccggattaaattaacggatacgatgacgattgtggctattttacagtacccggattcttctgccagcgccgggcgttttccggtggtatcgaattattttaaagacaataccggtgcggtaaccggagacacattaatgtggggagggagcggcatcatagcctatgcccaggaaactgaaggtggggtaaaaagtgcgggtttagagagtggtgctgcaaagggagatttcgtcgttgtcggacagattgtctctgctgcacccgccacaggagcctgggtttttaaaaatgatatagccgaaggcgctatcggggcgatgagtggccggagagtaagtaataagtctctgctgattggctcgacgtattcaaacaacgaatttcagaccggggccagaacgtccgccgtagtcattttcaatggtgacattgggcgagccggtatgaataaagtgatgaactggctcaggcatgaagtcggcactgcggccggtatctgggaataa

SEQ ID NO: 193707 - DNA, 1686 bp, Klebsiella oxytoca
ttgaatatcatagagaaaccttcttggcatgaaaatatcacactcatcgccagaggcgataaggttgaaggcgggcggctgggcggtattaacgttcaggcgaagcagcttgctgaccgcacggctttattaaaacaacgcatcgagtctatcgacgatgcgaaagaccgcacttttttcattaccgatgatgacccggacggaacgatcgcaggactcaaagagacgccagcaggaaaggttttccgggtggcacaggggccagacgcggaatatgcatttatttactatgccaatgtcgagaatacggcgttgccggtcgggcgttacattagtgacatgtacgttaaaaatcgcctggtggatgtgctttcatcaccgagaaaagttcctgtcacaatggacaaaataggccaggttgctatatggcttgaggatggattgattaacggaacgggactgcataaagatatcagtcctgtgctggatatgaaatccaataaccgaaaggttgctctcaatgtcgatggtgagggaaaggtcgctatctggattgaagacggactggttaatatgtcaggcctgcattctgatgtgttaagggatattatctcacagattgagttgccggacgaaacaccgaaaaacattagtggtgcgggtactttatggaaatatcgcgctaaaaaggcaaagcttgatttaaagcagccagcaaagattaccatcggtttgagcggggattcctggacagagcataagacgattgcacaggttatcgcgaattatttttatgacaagtacggcaaagcaggcgatggctggttgcagatgaatattgataatccaaatctgatgaataatattacactcacccgttccgggtggtctgtttacgatgcgtcggcaacgtcagcatcaccgacctatccaacgccagttgacgggcagtatattttttctgcgggaaaggatgcggtgttatcactcgggaatgtattcgcaaagtcagtccgtattttttattatgatggtgatggtacatttagttatacagtgaatggagctgacccggttgttgttaaagggaacgggacaaataaaattgtcagtgtgatgatatccggtctggatatcactaaagccactgcaatcaatattgacctgacgggcaataccggaacggtagtgatttacagcttttatgctgaaggcaccggtaatggcgtggaggtcagcaagttcgggaacggaggcataaccgcgcctcagtatattaaaaccctgccgtatctgaaacagaccgccgggattgttgctccggatgtactggtattaattatcggtacgaatgattaccgacagagtgtccccctgcaatcattccgtgacggtctgactcgctggattcaggcatggcaggcagaaatcccggactctgcaattattctggtcgcaccgccacaatgtaacgctaccggcaataaccccctttctgcctttcgcgacattatgcgtgatgtggcaaaagagcggggagttgaatttttctctctgtatgacgcgatggataccagctatgccaaaagcagcgcgcaggggttgtggaaagatagcctgcatctgagcgatgtaggcgcagtctctttatttaaccagctgaaccattattttctggaggcataa

SEQ ID NO: 193708 - DNA, 762 bp, Klebsiella oxytoca
atgacaaagacatatccacgcattgaaaaaatgatggctggctatatcaatatggacgcttttgagattgcaggttctccagaactaaaagatcaggtggcctatttcatttcacgtgtttcgcctaaggcattgcgtgcgctgttagacgagttggatcgatttgagagcgagcatgctgatagcttggccgatgacttcgaggctgcatttgattacggtgcaaatattcaggacacacacctgttctttaacttagttcgggacgctgtatgggctaaacttggcgaaaacccatcaaagagggtggagcattcatccgctcctgagtgtcggtggatgctagcatctgtaaagctaggtgattattgcaatgttatatctgacaaagctttacatcaattcgcagaaaaattagatgaactttcgcatggaaagtccattgatgttctccgaactggagattcaaagcacaaatgcttagaaaatttgaagtttaaatatgaaaccaatcacggcataccagatgccaccgatgagcaattatctctgatacatgtttatacagatgcacttgtgcgtaacgcggcttatactccgcgctcgaaacgagtgacagaggagtatgtatatcttcttgagactattctcacatttaaaggggtcacggtcggacaggatacttcaaaacctgcttttggccagtcagtagatgatttcatccaaatgcatgaaagaaaatcaacacagggacactcctag

SEQ ID NO: 193709 - DNA, 552 bp, Klebsiella oxytoca
atggatctgtggaatggaccactaccggcggacgttacagaaaaaatgctggttgatgttatggcagacattatgaaagtctctttgcctgagcatgaagaaatcgaatctcctggcccgttagcgcctggtgcgctgcgttctgttgggggtcatactattaagaagcacgctggtaaaagcgatgctgagttggtcggccgatttgtgtgggattcaggatgcaacgtaagtagcggatttaatcacggcataagttacgcagaggccctcatcgctaaggcgcttctgtctaacctggacaaggtctatacttggtatacaggtgaaaaaagtgctattgctgatttacctgatgatgtagacgacgacaaagacctgcttataatctacgagaacaattttaacgtaggcaggagtttcaaacgtaaaaaaatgggcgaaccggcagttcttgtcaagaaggtggtgattctattacgtaaaattgacgaaggtacggcacctatcaatggtcgatctgattttatcctcacagcgtatccggcatag

SEQ ID NO: 193710 - DNA, 936 bp, Klebsiella oxytoca
atggaatatcaattagatttaaaagaaaatgcaattgatagttttaatgaggcattggcaaagtatgagttaggtcaggaaggagaaacgcggcaatataaatttgcaattttacatctgtcacattttcttgagctagttctgaaattatatatcgtctctgtggacgaatatctactgttcaccaaatgttataaccccatcaaagatagatctaagcgagactcaatagaccttttggaagcgtataacgctcttagcaaagaaggtgtcgactttggtaaattcattgatggcattgcccgtccttacaccattacattagaccaagcgttaaatttcgctaagtgcgaaaaatgcagtaaaacaggtgtcgattttgtagatattaatttttgtaacgatatcgattggctaaagaatctaagaaatgatatcgaacattatcaattcagacttaccccaaaagaagctcggctgtgtattggtcgtcttgttaggggtgtggctgagtttatcgatatattcgatctttttaatctagagggtgaggttggttctgaaaatttaaagatatttcaaacattggctgatgaatattcccatttgcttagtgaggctgaaaaggaagtcaaagaaaaggagtccgaagcattttacggtgtaagaccaaagttttatgaattcgttaattggaatgtatatgaatgtcccgcctgtttaaacaatacaatgattccatcagatgaatcggcgacgggttacaagtgtacattttgtcagaatgaagatagtgatgatattgaggtggcttgtgattgttgcggtgcaatggctcccggcggtgaaatgagcatttggcacatggatgatggagatgtcgagtatcgctgttactactgctcaggacagtatcatgcagataaagacgattaa

SEQ ID NO: 193711 - DNA, 573 bp, Klebsiella oxytoca
atggattttgaaagccaaatttcaaacgaggaagtattagatagaatttgtcaggtctacgggttcacacaaaaaattcagctcgcaaaccatttcaatatcgcagccagcacgctacaaaaccgctatacgcgtggtaacgtctcctatgacttcgccgcattctgcgcccttgagactggcgtcaatatccaatggatcctgacgggaacgggaccgaaaaaatctgatgaaaactcaaaatcgtcttacgagctccagtcattcacattaagtgaaggtagactcactgaaactggagttttgaatatcgaccctgagcttttcgaaaaacctttgaaaagtgccatcagtgttagaagcgaaagcaaaagctacttcgctgagaaagatgcgcctctggctgacggactctggattgttgatgttgagggtgcaatcagcctccgtgaattaacggttctacccggtaaaaggttgcatgtggctggcggcaaagtaccgttcgaatgtgggattgatgagataaaaacgattggccgtgtagtaggtgtatacagcgaggttaattga

SEQ ID NO: 193712 - DNA, 672 bp, Klebsiella oxytoca
atgaccatgccttactgtatcctgcataccgaagctgattcagatgttgtacttaatggactgggcttttcagaaaacgatattcatgctgctctgacatctgctttgtacgagcgccgcaaatccagcaagcttcaccccgctgtcgatgcagggttccgtttctggagtgaaatggttgccgcgacacgccgtgtactaattggtaagggtaacggctggtcccctgaagtggtcaagcgaatggaaatggtcgctaactcagcgaggggggttaatctgattatcacctcgggtgatagacacaccgggcgtcctgatggattgccgaaaaccaagaatgccaaaggtgaggcaacgcgctcgattgttcacaacaatcctggcacagttgatatgttccagacggatgctttgtattcaggcaaatctgaaatcactccgatagatagcactcgcacctatatcgtcctgtactattatgatgcggctaacaaagaggttcgctgcgaggtgtcttatccggtaggaatggtgaatcaggacggatttgcccgcgtaagcgcatggagtgagcgtattattttgagtcctctgccatttgaaggtgcggatattttccctgatgaggatttcaatgatgacatatcaattactgttgaaagcaaatga

SEQ ID NO: 193713 - DNA, 1113 bp, Klebsiella oxytoca
atgagtaaccctgttgatgacggtaaacgtctttttaatccatcccggctcaagctggcacggatcagacgcaaactgaccctaaaagaactggcagaaaagatgggactttccagccgtattgtaattgagtacgaaaaagcctattgcctatatgaacccacgccagagacggtccaggcgtacgccagggctctgaaatacccagagtccttttttttcggggatgacgttgaagcaatcgatccactgacggtttcattccgttctttgcgcacgacaaaagccgccgaccagcatgcggcaattggggctggtgcgctgggagttatgctgagcgagtatttcagcacccgtttcaccctgccgcagcctgaattgccgaatcttcgtggaagtgagcctgagatcgctgctcaggcggtgcgtgaagcttggggtattggcaagaagagcatcaccaacgttgttcatcttctggagaagcacggcgttaaggtgttctggctctcggaggaaacggcgagtatcgatgcgttttcgttctggaaagatgatgtcccctacatcttcctgaacactcgtaaatcaggtgaacgcagtcgtttcgatgcggcacatgaactcgctcacctggtgctccaccgtcatggtgacgtcaagggacaggatgcagagcgtgaagcggatgcttttgcgtcagcatttctgatgcccctggaaaacgtgatggcggttaagatgacgttgccgacgttcgacaaaatcgtgcaattgaaatcgctctggaaagtctcggcgatggctctgattgtcagaatgcgaaatctgaacatgcttacagaatggcagtacaacagtctgatgcgcgatgcgacggcaaaggggtatcgaaccggtgagcccggaggaattgagcgtgaaagatcgctcattattgaaaaaatgatgaccgctctggctggtaacggcattaatctgactcaattgagtgatgagcttaacgtgcctcttgatgaactgagtagcctgctttacggtgtggcggcaattagtggtggtaatagcggaacatcaagctcactgtcaaaggcctctctccgtctggtgtga

SEQ ID NO: 193714 - DNA, 210 bp, Klebsiella oxytoca
atggtaagaagggtgttgttgataggatttattcttgctgcgttcagtgccaatgccgggcgtataactatgagcaacccagagcagtcaaccacggcgaacgggcaaaccttatgtgtctattccaacagtatttacacctttacctacgtcacgaagtcgaaacattgcccgtatagcaaaagtttcaacacggtcgaaagtgaataa

SEQ ID NO: 193715 - DNA, 753 bp, Klebsiella oxytoca
atgaaaaatattattgcgctgcctctggtattctgcgctttctcatccgtagctggtggtgcagtctccggcgaaatccaaccataccctgattacctggctgcctatgtcaaaacgcttgttactttcgggtgtgaacaggcactgaagggaggttctgaggatgtactgataaagcaggcaacacggggtatgaagaaagatacgccgagttactacacagtttacaattcagtgatagatggcattggcgctggtcaggcgctcaaagctaaagggcggttgataacaaaagataagatcgccattgatagctgtggcggtttcgctgcctatgccctgttacaaaaggatttcagagaaatagtacttgctggactaatatcttcagcgcagccgcaagcagacacagcaaaaccaaagagggccacatctgacgaaagcgtgtatcggacgacggcaaaagatttggcagcgctgtacgatgaaaatgaagtcgctgccgatgacaagattggaggtcgcaaggtggaggtgacggggattgttcaggacataaccaaaaatttcacgaatgacgttattcttcgttttgagagcggtaatcgattcatgcctgtcagtctgagtatggctgattcagaaaaggcgcaggcatcaaagctgaagaaggggcagaagatcaccgtgacttgcgaaaagatgcagttattcatcagtgtgccgtctggtggcaactgcacgtttaattag

SEQ ID NO: 193716 - DNA, 594 bp, Klebsiella oxytoca
atgagccgcacttttgcatattgccgtgtgtccaccagcgagcagactacagaaaaccaaattatggcgattcgtcaggctggttatgatgtgcctaataatcgtgttgtctcggaaaccgtatccggtggcgtacaggcaatgaagcgtaaaggctttgccgatatgattactcataagctggaagccggggaccggctggtggtgttgaagctggatcgcctgggacgtgacaacatcgacgtgcagcaaactatcgcaatgttgatggaaaagaaaattgatgtcgtatcgctggacctaccgacacacaaccttgctagtgcggaaggaaaattgatgcttcaaatgttttcggcttttgctgagttcgaaaagtcccgcatcattgaacgtaccaaagagggcctcgctcgggcgaagaaggaagggaagaagttaggccgacctgtggcgacggatacccttaagcgtgtgcaggaagctaaagcgaagggattaagtcagtcaaaggccgcgcgtgaattagggttgagcctgcccacaatcaagcggcactggaatcttaatgccgatttgggcaaacttagataa

SEQ ID NO: 193717 - DNA, 837 bp, Klebsiella oxytoca
atgagccgtcttaacccaaaaacaacaactctgagaacacttttccttcgttcaagcaaccaatgtgcatttcctggctgtgctatggagttaataaattcttacggtcagtatgttggaaatgtctgccatatagaggccgctgaagaaggaggggaacgatacaacccgaatcagacagacgaggatcgtcgagcttatgacaacctgatccttctctgtgcaaaccatcatagaattacagatgatgttgctatatacacagccccaattctacgtgagatgaaatcaaatcacgaaaacaaggtctatggacttgtagttgaggaggctaaaatttcagctttcgtaaattcgacacatgccgagacagttaacctccctcaaaatcttaatggaattaagaataaaatactcgactatttcgatcaggatgatttaccaggattggtagaccatgcccaaatttatttttctcattttaaaggcatacctgaagcaactcgtacactattcgcacaaattttattgatctcagaaagctcagaccattgtacaaccattgatattcagacagtgctactatatttgggcgtaaatatggaggctgtagagggccattacagaatcttgcaaagagccgggttgcttagcgaactgatcatagacgaagatgaatatcctgcacgtgcttatcgcgtgtttacaacttttgatcctgatgacatgcaagcatggctcctacaatgcataagagatcattatattgaaacatgccagcaagaatgcttcgtagaactagttagtgagctcaattttaatcttatggatttataa

SEQ ID NO: 193718 - DNA, 735 bp, Klebsiella oxytoca
ttgcaacaacagacacaaacagaattaccccctacacagtcagcacaaccacaaaccacgccttacagaacagttgtccacgatcacgggcgctatccggtcatcacgggcgacaaatttttccataacggctacccctatcccgtcaacactacagccgaatccggtgtccggttagatatccttaccccgatagccgcagagcttgacgcaatgctgagttcttacagtcgtgtttacctcacacgctttgatcttcgcttaccagcaggcacgcccgtagacaccgctaacgaatgggtaagccagctattcaagaaactacgcgagcggctgaaatcgaaatttcgtagacctgaaggagttgcagatccgatccccaacttcgcttacggctgggtgcgggaaaaagaaatggcaaaacaggtgcattaccattgctggatagcccttccgcaccggcaggtaaaacgacttggaacgccaacaagtggcattgctggcgctattacggaaatctggacgagtctgtcaggaggtgagccaacgctgttggagttcccaaaatcaaacgacaagtacacgaaacattatgttatcgaacgaggtaaaccggaaaccctcgaagggccaatcttctggttgtcgtacctggcgaaggagcgcgggaagtatcagacgggaaaaggtgacaaggttcattcgacctcacaacttcgaaacaaaaaaccatga

SEQ ID NO: 193719 - DNA, 126 bp, Klebsiella oxytoca
atgacaacaaagacaccgcgcgaatgtcccgttcatattatcgatgaagtagcgttgaaacgcgccattgccaaagcgaaagaacttgccgatgcagagccggaaaaataccgccgaataaaataa

SEQ ID NO: 193720 - DNA, 492 bp, Klebsiella oxytoca
atgacaacaaagaaaaaactgtctaaccagatagacccagaattgcagacttttatcgataaaatcgctgcaaaataccagccaatccctgaagtactacaacgccgcattgaaaatgccgaagcccgctataacaggtatcagaattttgctgatatcccggcgcggctggtggataagcttcagaacctgatccttgacggctggcggtttcatctttctgggcctgcttcagtgcttgccaatccatcgatgatttccgtcactttgcaaaagcccgcccgactgatcgcagcggaactaaaagagctacgctcgaaggcctccgacgcctataccaatgaactgttctcagcgatggagcgcgagatcgatgaattgatgcaacaagccgccgaggactcccagcggaaagccgaagaacaagcagaggcagagcaagccgcaatgcgggatcgcttacgcactctcctgaacggagttaaagcatga

SEQ ID NO: 193721 - DNA, 1635 bp, Klebsiella oxytoca
gtgacacagactgtgatacagacgaggcacaccaacggctgttccatcccgaatatcctaaagcgtggcaaccgctactgccttcatttcagactaccttcaggcggtttgttccgcgtgtctctgggctgcgattcagccagcagagcaagatttatatcttcccgtctctctatgttcatttcttttgtaaaatcgtccaaaatggagccagcccaattattggacatagtgcagaaaatgaagaagttagaacaagacgatattgatcgttatttgcttaaaattcaggcggatttttacgccgcagcaaaaaaaattccctcaactgtacgtagcatcctgcgagaatccggttcattggctcgtgaaaaacgtaatgcgcatgattttgggctgctacttgatggaacttttaaacaagatgttgaaccgctgtcgacagattcagtcatagagcaacttggtagccagtttgatcttacgggcatggcggatgaaatcgattatttggcctcagagtacgatctcctttggagacattactgcgatgcacatatagcctttatggatcaacggcattcagattatcgccagatcgttaactctatgcgaccagaaagtgattatgttcccggtcaagctgctaagcctgaagaaccacagaccccttctttgtcgctatctgaggcatggaagggttttgtaaaatataagtcggactggactcccaagattcggcaggggaatgaaaaatactatgaagtgatagaggcggttttgggggctgacactcaagtttctgacatttctcgacgtgatattaaaaacctgcttgaggtagttgaaggtttacctcgtcagaataagaggccttataaccggatgacgatccagcaatttttggacttggatgaagtcccagaagaagatctggtttcatccaaaacggtcaaagattatctgaaactgtgtcaggggttgttttcaacctacctgactaaagaagaggatattcttgaatcatcaccaacacttaacgttacgtaccaagctaaaagccacagctatggttattacactcgagcagaaatgcgaaaattagtatgtcactttgcgactttggaagggtggaataaatggggttttttgctattggcgtacactggcgcaagacgctctgaaatcgcaaaactaaaagtttccgatgtgcggttggacgaggatagccagaggcattacataatgatcggggatagtaaaactgaggcagggattcgacaggttcctatcgcaaagcgtcttcttgacatggggttcttgctgtatctggatggcaaaaagctagatgcttacttatttcccgagattactaatcgaagtcaggtaacccggttgttccacgcgatacgtgagcaattgaatattgattaccttgacgattttaaaaacaggcgcattgttcacagcttacgccacactttcgtaactgaaattcaggcaaaacataccctcacgcttgttcagcagacaatcggccatgagcattcaaaccaggggcaaactaaggtttatacaggcaagatgaaagtttctgacttgcttccagtggttgatagtgttgattggttttaa

SEQ ID NO: 193722 - DNA, 609 bp, Klebsiella oxytoca
atgacctgcttattcgcaccttccctaagcaatagtggcgtcgttgattatggctccatgagcaactcagttcttgagaagaaaagtagcggtaactctctagttcagctgggtaaaaaaaccattactttaacggtaagctgcgatgcggcgaccagcgtgggtattattgcgcaggataaccgcgcgagttctaaagtcacgctttcagattcggcctatattgcagactatgtaccgggtcagaatatgtcgagttctaatccagtatttggtctcggcacagttaacaacgtgaacattggtgcttacaccgttacggcagcgaggagtggatcaaccgccgatggcgcagcagtggatatgatactgaaagatacggatagagaaggttccggatggaggaatgcgaacgctggcgggttatattatcctgatagtacccgtatcattaccgttgctgaaatcggcaaaacgaccccaatgctgtttaaagatttagtcatgccgctggatattgtttccgccgttcaggatattagtattttgggttctggaacaaaagttgagctggatggtaatgccacgctgagccttgtttatctttaa

SEQ ID NO: 193723 - DNA, 1002 bp, Klebsiella oxytoca
atggatattcgttcacgcaagaaaaattttttagattcgttagattcaacagaagtgatacgcaaagcagtaagtcttgctatagattgcatgattgataatgataatagtagtgaggatacccccttagttattaccagctatgatgacttctgtaggaaccaggtgctgaagtatgtacaggaattttgtgaagctgcgtaccctgatacggataaatattactttattcctaacatgcttcacattaacggtagaactagtgaagaagcctgtattaatttaattaaactcttaagagttacaaaaggcattctattctggtcagatgccccatcgtggtttgctagcctccccgacgggttattccatgttgttaacattgatcaaaaaaccgtcactcgcggccttaataagaaaaactctcagccgacgatcatcaataaagagtacagtgttgacacactactatcagaactatttttgaatggcgcgcacatggagcaatctaacgcaaacaacgttgttgaggcagacatgaagttctatgatgaatgccatgctggattaatcagaccaatacccgcgccagtaggcgagtcatatgatgaagagatcaaaattaattctccatattggcagaagctcgcgtgtgtagcgttacgccgctatcagtcaaaggaatgtcatgacggaatgcaatgggatacaaccgataatggctggattgatgttgttgcgtatccgttcatcaaagaaatacaatcacttgataatagtggttatcgccaatgtttagttgggctggtcacaataaacatttcaaacgcaaattacccgtacctatctaccgtttggatacatccattttatcgcaggggagggttattaagtaagttatggccaaaattacaagagcgatatggaagtaacttcgaaattgagcaacctaatgaaaatatgaaatcatttttgaaaagtgtgaaacatgcaggttactaa

SEQ ID NO: 193724 - DNA, 231 bp, Klebsiella oxytoca
atgatcgttttttggtcaaaaagcgcagaaaaacagctcgccgcaatagattcccgctatcaggagagaatcaaaaaaagctacgcaccatggatgataaaaatgcgccggctccggacattaaaaaactcaagcagtcgggatccgaagatcattatcgattgcgtgtcggtgattatcgaatcatcttcacacagtttgagggggtatctgaaagctgctatgtcgtag

SEQ ID NO: 193725 - DNA, 423 bp, Klebsiella oxytoca
atggaacaacaatctgcggtttatctggatgcgctgggggcgaacgttgcgctgagcccggcaatgaaacaggagctggataccctgggctacaccgttgtgcataacgtggtggacgcggagtggctggcggcgatgcgcgcgcttatcgacgccatcgtcgagagagagggcgataatctggcgatcgagcaccaccaggaggcgacggcaacccgcatcgccaacctgattaacaaaggcgcgatttgggaaaaggtctggtcccacccgctgattctctccgcctgtcggcatgtttttcagggggattttaaagtttccagcctgaacgcgcgggaagcgttgttcaacggcggccatcagccgctgcatgcggctggaaaaagccgcgtcacgattttccgaaagtgcatctggtga

SEQ ID NO: 193726 - DNA, 954 bp, Klebsiella oxytoca
atgattaaatcacccatcaaatgggcggggggtaaaacccgcgtcatgccggagctgctgaagcatctgccgaaagctgattgcctgattgagccatttgtaggcagtggtaccgtgtttatgaatacggaataccgccgctatgttctctgcgatagcaatcgcgcgctgattaacttctttcgcgtattgacctctgacaccgagagactgatcgacactgcacgcggaatgttcctgggcggcaacaacgaagagcgttattacaatcgccgagcactctttaacaccacgctttggaacgatacgagaaatcctgataacgcactgatgtttgccgctttattcttgtacctgaatcgccatagttttaacggggtatatcgcgttaatcagaagggtgagcataacgtcccgttcgggaaatacgccgcaccttatttccctgaaaacgaaatgcgtctgtttgctgaaaaagcgaatgacacaaaagcgattttcatccatagcgattttcgccactccatccctgacgttatgcaactggcatatgacgctgttatttactgcgaccccccctacatcccgaccagcaaaaccgccaattttaccgcttacggcaagccatttaccctggacgatcaccgcgctttggttacggcgctactggacgttaatcgccagcatggaacgcgctcggtcatctcgaatagcgacacaccagaaacacgccagatctactccgctttcaatctccgcgccttcagagttcgacgttccgttagcgccaaaacccgcgatatggccggtgaagtgattggtgtgcttcgtgtgagcgattgctgcggtcgttctggtggtggttgctgcccggactgcggcccggtgatggggaactccacctacaacgcaatggcggtaacgggcgcttttgacgatctggaggctttctga

SEQ ID NO: 193727 - DNA, 186 bp, Klebsiella oxytoca
atgctatacgatgatgaagaagagattctccgccaagagtggtcgctaggtgattacgataatggtgaaaatgggtgcccgcattgcgggcgccatcggctatgtatctgcccgaacgggaagcacagatgcgaaaagtgcaattggtcaccggagcttaacgattacgtgccgatcgagtggtaa

SEQ ID NO: 193728 - DNA, 1371 bp, Klebsiella oxytoca
atgacagctaaccgaaaattcagaaagtctttttcggaacgaaatctccttaagatatataaggaaaggataaaagaatctggagctattggcattgaccgagtacgacctgccaaactagaaccgataattaaaagtgaagttaagttcatttctgaaaaggttcaatctggtggctataagttcaccgcctataaagaaaaactaatctcaaagggagccaactcaaatccgaggcagatctcaatacccactgccagagacaggattacgcttcgtgctctctgtgaatgccttacggaaatttaccccgaatcaaggttaaggctcccccacacagtcattaattcgctaaaggctgcactggatagcggtctttatacagagtatgccaagatagatctcagggctttttatccttcaattgaacataagctaatagctgatgcgataaaaaacaaggtccggaaaaatgagattagaaaattgataatgtcatcgttggtggttcctacagtaaacgaatttaaaggcagcaaagggtcttcatcaaatactataggggttcctcagggattagcaatatcaaatattttagctgaaatttccttatctattttcgacaaggatatcaatgcaatatcagatatctggttcatgcgctacgttgatgacattctaatattaactacggatggacaagcagaatcaatagcatctaatgttattgaaaagctccaacgtctaaatttaaatcctcatccattaaatgatgagaactcaaaatctaaagctggccctcttcgtgaatcttttgactttcttggctatcacataagccaaggagaattgctaattaaacatgaaagcattctcagatttgaatcttcattggctaaaatcttcaccgcttacagacacgcattaatgcaggccaagagtaaggcagataaagagcgtgcgatagcttactgccagtggaagctcaaccttagaataacggggtgtgtattcgaagggaaacgccttggatgggtatcatatttttctcaaataaccacaacatctcaacttcgttccgttaaccataccgtaagtcatctcattcgtcggttcaggctctcatcagatataaagcaaaaatcattaataaaaacattctatgaacttcgccgtggaactgccgatacattcaaatacatacctaactttgataaccttgatatagttcagaagagggaactggtttcaatgtgggtaggcaaatccaaagcagaaaaaatgagcaacagtgaaatcgaaaggcggtttaaatatataattgcaaagtctgctaaagaacttgaagaagacatctcaggaatatcataa

SEQ ID NO: 193729 - DNA, 540 bp, Klebsiella oxytoca
atgcgggacaatatctggtttacatataaagcacgcataaatgcacatcatcgcttagagtggcttgagaaacattctcagttcattctcgtctggtatgccatatttagcgcggtactttccgtcatatccatacgcttcccaaaggtgctcgggggtaataccgatataatcgcgtcaatactttctgtggctttgctaggtatttctcttgtagtttcaaacctcgattttcgcggaagagcgatttccatgagaaggaactatctagcgttacaacggctgtatgctaacacttctgatgaggttcctttaacatctgcacaactagataaataccatgaattactcgatgaagttgagaaccatcttgatattgatgataaggcagcacgcgtagcccaaacaggactgagatcaaggatccctaccgctgatgaaacgcagagtgttaagcgctggaaagcgaagcgatttatcttcacttactccttctatttgctccctctcctaattatttggataaactatgacagctaa

SEQ ID NO: 193730 - DNA, 2904 bp, Klebsiella oxytoca
atgagcagagaaaaagcattcgaaaaatttaagacacttcaggaaaactacatcactcacaaggaaactctttttgaagctaatgaagctgagatcagactcctaatgatcgatgaaattttacagattcttggctggaaaaaagaagaatttacaccagaagccttttgtggaacctcaggatatgcagactatatactgagtatagagaggaatccacgacttgtcgtcgaagcaaaaaagataggtgttacctttggtttaccgacgagttcattaacttctaatgaatatacagtctcatattttaaaaaagcattcaagaaaaagcttactgatgttatagatcaagcacaaagatattgcgtcgaaaaagcagtgcaatatgcagttataacaaatggcgctgaatggttagtttgccctatgttaccaaaacctggtaaaactattgattcaatgaaaggtatttattttggtaatttatttaacggggagttttcttttgatcttatgtatgacctaatgtcgaaggatagcatacataataacaatcttgacaattatctttcagaactcaattattcaccatcagaagtatgttatatcttaaaagatcattttaataattttacgtgggacagcaacaaagataatgaatggattgacgatttttatcaaaatttcttctctcaaataactgaaaaaaatcagcgtaagatgcttgagcattgctttgtaagcgactcaaaacttgaccaatttaaaggtgagattaaaagagcattaaaggattccaaacctagttttctaccaaatgatgcgctagatttgtctccatctgaagggaaagattttattcttgagcacaatactggaaaagttatcatcataactggcgctgttggttgtggaaaaacaacattggtcacaaaatgtctagtagaagccagacagtcaaaaaatatttatgccacgccaattataattgatttgataaatgatgtgtctaaacacagtattgatgtgaaaaatatagtttttgattacctatatgaaaaaataaagaatgactacgaaacagagtttactttagatgaactaagagtaacatttgcacatgaattaaaagtattaaaaaatggtgcttataaagaaattttcaataaaaaccctgagtcttttatacttaaagaagctgaacttctagaaaaagaaagctctaacaagaaaaatatggtattacgcatatttaaaaaaagagctagagaaaacaaatctgtaattattattattgataatgtagatcgagcagcagaaagtttccaggaagaaatttatgcgttatcacatttaatcacgcaggaatcaggtgccactgtaattatcactcttagggagtttacttttttcaaaaacaaagataaaggtttccttgatgttcgtcctgaggataagataatacaccttaaatctccagattttaataaactaatatcaacccgtataaaatacattaaagaacatttgggtgaggattacaggattaaagattggaggaaaaaatatcaattagataaattcctcgaaaggatgaacttttacgcagatgttctacgcaaaaatcttcagctatcaaatgaatccatacctatccttgagatattatcatctgtagcatggcataatattagaactttctatcagttgataaagcatgtacattatcaactagggaataaaataacgtggcgcaagcaagatattatatctactttgacctatcatccagaccatactgaaaaagcttacattccaaatgtatatttgccatatcaaaatattaaccaatgctattatctaaaattacggatattatcttttctaaatgatgcagtttcacctggagaaacctcaagaggaatatctttagatagagtaatgaagtttgcatctttatatggttataaaaaacaatggattgttaaagcaattgaaggttctgttaaagaaagaattatagaatgtattgagttaccttcagatagtgatctcaatatagaatataatgttcaaccatcacatacgtttcggatatctcctcttggaacctgtctgatacttgatatatgccacactcctatatatctttctttgtcctcaatccatctgccttttcatgagaaaaaaccatataatgaagcgaaagatgaacttaataagttagttaactctatatataatgatagaacaataaataacaaccatgaaattatagatctggttgaacatagcaaaatgccaagtttaatatccagttatttatcttctgaatatgagaaggagaaattatcattatcaatattaaaaacacagactgatgtatttttaactgaaaagagaataagcaaactaatagcttcctttaattatacaaacgaaataaatgaagacaatagctgtaataaagaaaaaacaaaccagattaatttatcttttaactttgatgatataaatgaaccaataaacacagatattacatatggagataaggaggtcccttctacgataaaaccattaagcttaaatgaagctatgtctcgtggcagtgaatatattccacttattttcgtggcattggtaattagagcttacttgggccatgaggcaagtattggaactgaaattactgaggcaataaatgatcaccttgtaagtgaagataacaaaaaatttacaaataatgtttctcgagcattacgctctagtgcattaactaaacagaagtggttattaataaggacagatttacaccataagttcagaaagttttccttaagcaataactggcaatctcagtgggaggagatttttaatgaatcaccacctgagatccaactataa

SEQ ID NO: 193731 - DNA, 234 bp, Klebsiella oxytoca
atgctcctcgaaaatgaagtcgataatgccaaaaaattcgcggttattcagcgtttttgggtgtctgttttaatgtgcgtagattatatctctgcattaaaagaggcaactagctataaatttttatttaaaggcttttggtcgataaaatactctgcgtcaggctattttttgttcgttacgctacttttgttctctttgttgatttttttattgtttttcaattggttgtaa

SEQ ID NO: 193732 - DNA, 201 bp, Klebsiella oxytoca
atgggacacaaaataaaaagttgtagctacaaaaacaccgcggcgcgcaatgcccgtgccttacaaatgtctcaggaaggacccattttttgtagggtggtatttgaaaacatttttttacatggcatcacgatgaatcacaccctatcattgtcacgattaatgcaaggggataatgatgaaaaaaactcgtttgattaa

SEQ ID NO: 193733 - DNA, 210 bp, Klebsiella oxytoca
atggatagagttaagttcaaatgccccagttgcggacagacgctgacttttagcgacattctgcacgaagaaacaattgataaaattaaaaatacgtactgtccaggctgtaaagcacttatcagcaaagaagaaatcacgcgacagattcagagcaatgttacaaagcgaattggtattattttcggtgagcaaagtaaccattcgtga

SEQ ID NO: 193734 - DNA, 279 bp, Klebsiella oxytoca
atgaagaatgcaaaaatgctggcgttaattaccgcagataccagcaggattgaaagtaagatttcagcgttacttgaagtgcttcccgagcatgtcacggacgaggttctcggcgtactttctcgactggctaacgagatcattcttgtgaatggttcggtcacagttgctacagacggctccttcaatgtcgtccatgctatggatttcgacaccactgcgtacgacgaggtcatgtccgcagccagggcatttaaatttaatcttgctcatgagtga

SEQ ID NO: 193735 - DNA, 198 bp, Klebsiella oxytoca; identical to SEQ ID NO: 179160

SEQ ID NO: 193736 - DNA, 1275 bp, Klebsiella oxytoca
atggacgatacaaaatacagcattgatctacgaaccaataatggcttgtgggccagagtagcatcttggttcgttggtggtcggctggtaacgccagagcaagggtcgcaaactggccctgtatctgccagcggcgtgctgggcgactcccagataaccgatgagcgcattctgcagatatcgacggtctggcgctgcgtctcccttatttccaccctgaccgcctgtttgccattggatgttttcgaaaccgataagaatgataaccggaagaaagttggcctgaatataccgcttgcacgtttgctccggtactctccaaatcagtacatgaccgcgcaggagtttcgcgaggccatgacaatgcagctttgtttttatggaaatgcctacgccttgatagagcgtaattctgtgggagatgtcataagcctgcttcccctgatgtcggcaaatatggatgtcaggctcgaaggaaagaagattatctatcgctatcggcgtgatgctgagtatgcgaatttcaatcaaaaggatatttttcaccttaaaggcttcggatttagtggcctggtaggcctgtctccaatagctcacgcctgcaaatcagccggggttgccgtggcgatggaggatcagcagcgagagttttatgctaatggcgcaaagtctcccaaaatattaaccactggggatcgggttctgacaaaagagcaacgtactcagctggaggagaattttaaagaaattgctggtggtccggtgaagaaacgcctctggatacttgaggcgaattttcaggctcatgatatcggcgtcagccctcaggatgcagagacaatggcttcccgtaaatttcaggttagcgaacttgcgcgattctttggcgttcctccccatctggtaggcgatgtagagaaaagtaccagttgggggaccgggattgagcaacagaatctgggattccttcagtacacactgcagccatacatatcccgttgggaaaacggaatccaacgctggttattgaaaccggatcaagtcggcgtatatcacgcagagcacaacctggacggattgttgagaggtgattctgcatcacgtgcggccttcatgaaagctatgggcgaggcaggattacggacaataaacgaaatgcggagactggataactaccctccggtacctggcggtgatgtcgccatgcgccaggcgcaatatgtgcccattacagatctaggtaataacacacagccccgcaatgacggggcttaa

SEQ ID NO: 193737 - DNA, 681 bp, Klebsiella oxytoca
atgcctgacatcatcaaaacgctttctttcgatgaaacagaaattaaattcgccggagatggtaagcagggaatttttgagggatatgcctctgtattcggtaatacagattcagacggcgatattattcttccaggagcctacaaaaacacgcttgaaaaacagacgcgcaaagttgcgatgttttttaatcatcggcaatgggaaattccggttggtaaatgggatgccctcgaagaagacagtaaaggtctttatgttcgtggacagctgacccccggaaatagcgcggccagtgaccttaaagcagccatgcttcacggtacggtcgagggaatgtcggttggttttgcggtaacaaaagacgactacagcatttcgcccgctaatggtggtcgcatcttcaaaaacatttcatggctaaaagaaatcagcgtctgcacatttccggcgaacgagctggcaggtgtggattccatgaaaagtatcgacggtattgaaaccattcgtgatgttgaagcctggctgagggattcagtcggtctcagcaagtcacaggcagtagggcttatcgcccggtttaagtcagcggttcggagcgagtccgaatgcgacgaaaacaaagatatcagcgctctgcttaagagcatctctaattttcatcagacattaggaaattaa

SEQ ID NO: 193738 - DNA, 1167 bp, Klebsiella oxytoca
atgtccgaactcgctcaaattcagaaagccctggaagaatcacaaagtaagctgcaggggcttttcgacgaacagaaaaaacagatcgagcagaatggcacgatctccaaacagttgcaggatgatatggcgaaggttaatgaggagatgaccaaaaccggtcagcgtctctttgatctcgaacagcggctttcttccggtcctgataatcctggtgaaaagaaatccttctcagaacgtgcagcagaagagctggttaagtcctggaatggcagtaaaggtaactttgaagcgagcacctttaataaatcactgggaagtggctctgcatctgccgggtctctcattcagccgatgcaggttcctggcatcattatgcctggcttacgtcgcctgaccatccgtgatctgctggctcaggggcgtatctccagtaattcactggaatatgtccgtgaaaacgtttttaccaacaatgctgcaagcgtggcggaaaaagcgctcaagccagaatccgacatcacattcaccaagcagactgccaacgttaaaaccattgctcactggattcaggcttcccgtcaggtgatggatgatgcgccgatgcttgaatcttatgttaactaccgcctgctgtatggtctggctctggaagaagagcgccagttgttaaacggtgatggtagcggtgatgacctggagggtatcaaccatgttgcaacggcgtatgacacggatttgaacgttacaggtgatacgcgtgctgacataatcgctcacgccattttccaggtaactgaatccgaattcagcgcctctggcatcatcctcaacccccgtgactggcacaatatcgccttgttgaaagataacgaagggcgatatctctttggcggaccgcaggcgtttaccagcaacatcatgtggggccttccggttgttcctacccgcgctcagactcaggggacctttaccgtcggtggttttgatatggcctctcaggtctgggatcgaatggatgccaccattgaggtgagccgtgaagaccgcgacaacttcgtgaaaaacatgctgaccattctatgcgaagagcgtcttgcgctggcgcattatcgcccgtctgcgcttatcaaaggtacttttgcgacagagcctgctggcggttaa

SEQ ID NO: 193739 - DNA, 2196 bp, Klebsiella oxytoca
atgagcacatataaaaccggcaacccgttgggttcggcggctgtaaaggatttatttgataacgccgagaatctggacgtatttgttaacgatataaacactgaggtagctaatgaccgtcttggcgtacctcggttaacatggagtggaatcgaacatcaatcacaacgggcaatgtctctttatgggtatatcacgaagaaatcttttgaattgggtgctaccctcgacactcctaacactgttctccagtgggaaagtaaaggcgagttttacagatgggatggagattggttgtgccccaaagtagttccgcctaactctacccctgagacggagggggggattgggcgtggaaagtgggtcggtgtcggtgacgcctctttacgtcatgatcttgacgcaagtgatggcgcaaaattggtcagtggcattgggtttgtctcaccagaaatgtttggttatatacccggtatctcacctgatgccgtaccttatctgcaagctgcagtcgacgaaggtcacactcgcgggttacctgtaaagttgacagggtgctactacgcaaaaacctttccgcataaaattactctaccttctgatgacgggactgtttatccaggatggatatattctgggaacgatgcgaatatcccctcagaatctgaaaatcatatttatgccgccattcgcctttattccgactcagtcataattggcgatagtatgacgaactgtgccctgattggtgactgggattctaattctccaaccattgatagtcatcaacatgttggttattatatttgcggagattcaccagatggatatattaggcctcagctgactaatcacggagtacggaatttttttatcggtcgttatggtgatggcatcttaaataattctgttgaagataattttctcattcttgattgttgtattagtggttggtttttaggtgcagattctgtttctaatggttttataattattagggactgctatgcaggtgaaatttatggcggtgcatggacgcaaagaaatgctgcgatcactattccgtatcttccaccttatccggctgaggagattttcaaggtgggctgggttgatgctatccggtatactaaatatcacttttacggcaagccacggctgtttggccccatagataaggcgattgatacgtggttcgatacgtatatctataaatccgccaactcagcgcgaacctccgcaggcggcaggctgacaaacaatactgctggcggctattcagcgcgttcgtttcccggcattgcgggccgtgcattcactgtccttagtcggtatggtcgtgcggtaaatggagtgtgcttggcagatgtcaaagtacttgggactcaccgtgttccattttttacagattccggtagccataacattattcatacatcatatgttgaaaaaacatgtctagttgataccacaactactacagtcgcagggaatcaattttatacagattatcatgatagctggaacgcatctctgacaaagcctcctgcgatggtatgtgaaggcagtgccacagttgatagaacggttgtttcagcaggggtagccactcaccaagtcagtcaaaaatcactcacattgaatggtccaataataattaacccgcttcgggatagtttaaatgattattcaacaatgcaaattgcggaatggaacagcgtggaagataagactgtataccattacgatttccgaaggaagtatagcgtccagcgtccgattcgtttttttgataataatcaagaagattttcaatattacaaaggagagtgggcaccaatagttaaatgcggctccgaggtggctaatttaaactcatcgataggaacatacagacgctccggaagattagtgcacgtatcgtttagaatagaagctacatcattatcactgataaatggaggggctgtggtaatctcagggctgccatttgctgttgctaaactggatgatggtggattaacggtttcccctataatttgcagtcgcgccggttcggggattatcctcgcgcaaacgaaccctaccacaaaagatattttgttgctgacaaacagttcacctgctgcattctccataactggcggtagtagcttgacaatctatggggcgattcaatatgtactaacggaataa

SEQ ID NO: 193740 - DNA, 945 bp, Klebsiella oxytoca
atgcaaaacaatcaaactaatcacgaatggattgataatgtaaaaggtatcggtattttattggttattgccgggcatattctttcaggggcaatttcagatattatatttatatttcacatgccactttttttctttttgggcggttttttattatctacaaaaccattttctatttttctgaaaaaaaagacacaacatttaatcataccttatgtaaagtacctgttattcttcacattattaacaatcttaataacattcaagaagcatgagttatcaataaattcattttcatcaatactattctcatccatatatggaggtcaatatcttactggttggataggtgtgttctggttcacaactgttttttatttctcgcaacagatattaaataatgcaattaatactttgggcgaaaagattactggagcaatagcgcttatttttttgctgtgtgcttatttagttccatgggaaaactttcctccatcaccgcttaatgtttttgttgttttttattcaatgccaataatgtatttgggttttatgtataaaaaacacatgccgcactgccataaatctgttttctatattatttccacaatagggattgctgtttattttttactccctgacgctatgaaggttgatatgaaaacatgcacttacggcattccagttattggattagttacggctatagcaatgtcaatatgcgtatttgacttaagcaagaaaataaagagtaaagtcatagtcttttttggaataaactcaatgagcattatgtatattcatcaattcatacatttaacttttgcggaaaaagtaacaggaaatatattactagcattaattatcacacctttattatctgcagcttattgcattttctttaaaaaagcaatgaacctaacctttaggaaaatggacatatag

SEQ ID NO: 193741 - DNA, 555 bp, Klebsiella oxytoca
atgtctgaagaagctcaggatcaatttaatataaaagaaggtggtatcagactactcactcttggtgagataaagttggctcaatctgtttttctatccactattgattattcgaaagtatggatccacagagagagttatcttcctttcaatttacaggataagaatacggcgatgaccccaaatggggagatctattttcgtgatttatatttcgatgatttctcacagacaaccgacagtttgcagcatatgttcatccatgaaatgagtcatgtctggcagcgtgaaaaaggaatgaatgtgatcttcagagggctggtgagctggatggtgagttaccgttatacccttgatggtcgtctcttaagcgaatatccgatggagcagcaggcgcagattattgcagataattttgttttacagacatttgggtatgaaatctggagttaccttgaaaataaaagatatcccgatattacgctcgatggggatacttctgagtcggtgatacgtgagggatataaaaatgctttgaggggttttccatggtga

SEQ ID NO: 193742 - DNA, 468 bp, Klebsiella oxytoca
atggtgagaagtaactattttattaagtttaactctttgttgttagcgtttttttgtcttccaattctgacgggatgccctggaccaggtgacagatttcgttttgatgaaactgcacaggtgagtaaaaagggtgataatgtttgcgtgaatattgataatgcacaagattatcagccagtagatatgggtatcaatctgcgagggacgccttcaaaggagaaagattttaatttttctcccggccttaaggttattgaaggtgaattatgtattccaccatcttattttcattttgaaaatggtagcaagtatattgttgagtttgtacttcatccaacacttgataataaagaagcgagaagctttgtcgttggtgtcggtattaataataatcaagtgtataatttccctttgacagatcgcgaattcgcaaggccgtatggttcaattaaggtgccagaatag

SEQ ID NO: 193743 - DNA, 2517 bp, Klebsiella oxytoca
atgagtctgaccgatacgcttaagaatcccctgtctgcattaactgaaagtgggctgaaccgctaccacctggatattccatcctgtacagcagcactagatgtggaaactttcaccggtaaggagtttatgagtgagctttactattaccaggttatctttaccagcagtgaccagaatatcagctcagcgcaactgctgactaagcctgccacactgaccatggggacagggccactgatggggctggccgggcagaaagtggtgcatggtgtggtgacacattttaagcgtatcagtggttcacgcgaccaggcaacataccagattattattgagccgttcctttctctgttgcgcaagcagttccgtacccaccgctttttcgttaataagtcggtaccggaagttgtcaccgaggtacttcaggaacatggcctgaaaggctgggagtatgaattcaccctcaaatctgactatccgaagcgtgagcagataaaccagtacaaggaaagtgacctcgcgttcatagaacgcctgctggccgaagtgggtattttctacttcttcaccctgcagccggacacgcaaaccgaagtggtgcactttgcggacaagcagagtgcatggaccttcggtaaaacgctgcctctgaacagcccgtcagggatgaatgacaataaggccgactctgtatggggcgtcaacgtccggcaaaacgtggttgagcgctctgtcaccgccagtgattacaaccaccgtgaagcccagaatatcctgacctctgtaccggcagatatgacccgtggcgaaggcgacggagtgacctatggcgaggtttatcactacctgccgcgtcatcttgaacgtggcgacaaaatcacaccatcacctgaaaccggtaacttctgggcccgtctcgagcacgagcgttttctgtcgggacaaacgacggtcagcggatgcagtaatgatgctctgctgtctccggctcaggtgctgaccatcagtgaagtggcgatcccgccgactttaccctccgaaacggacaacggcattatcattacccgcacgggttatactgccagccgtaagaatgccctgttagtgacgtgggaagggatgccttattacgaaaaccgctgctggcgtccggctcttaaaaaacgccctgtagtcagcggtaccatgatggcgcgcgtgaccagcgccaaagatagcgatatctacgcctggcaggatgcatcaggcatgtaccgggtgaagtttgatgccgaccgcgatgacaaacgtcagggcatggaaagtatgccggtgcgcttcgccaaaccctacggtggtgataaatacggcttccacttcccattgattcagggcactgaagttgctattgcattccacgaaggcgatccggatcgaccgtatatcgcccatgccatgcacgactcccgccacgttgaccacgtcaatgaagccaatagtacgcgcaacgtcattcgaacagctggcctgaacaagctgcggatggaggataagcgcggcgaagagcacgtcaagctcagtacggagtatggcggcaagacccaactcaatttaggtcacaacgtgaatgcttcccgcgaactgcgcggtgaaggcgctgagctgcgtactgaccgacatgtttccattcgaggtggggctggggtgtttattacggcagataaacaaacgctcgccggggacaaaatgctctccatgaaagaggccattgcccaactggaaaatgctctgacgattgcaaaaagtttgtcatctgctgctgaaggggccgatgcccttccagcagatactgcgagtcagcagacgcttaacgcagctctcaaagagctcgctaaaccggggatcatattgaatgcacctgaaggggtgagtatcaccagtcctcaggctgtgcgtgtagcttctggtgcagccagtgtagggataatgtcccagcaaaatactgatatcagcgcgctcaagcgttttactgtggctgcgggtgaagctgtgagtgtgctggcccgaaaggccggaatgaaactttttgctgctaagggaaaagttgaaattcaggcgcaggatgatgcgcttgaggctattgcgaaaaaagacgtcacggtgaccagtgtggaaggcaaagtagtcattacgggtgcaacagaactggttgttaactgtggcggtgcatttatgaaactctcaggtgggaatatggaactcggtgcaccgggtaatattttactgaagtgtgccaatgttcaaaaaatgggaagtgcggattatgacgtacctaaaccggtgcttccgcaagggtatagcgagagatttgttgcacaggataaggtgtctggcgatatcctggctaacacgcgatatcggataaccactgctgatggttctgtttatgaagggcgcactgacagtgaaggtaagacggctgaaatattcggtgcggcaaaaagcaaaatcagtattgaactgctcggtggttaa

SEQ ID NO: 193744 - DNA, 723 bp, Klebsiella oxytoca; identical to SEQ ID NO: 128021

SEQ ID NO: 193745 - DNA, 615 bp, Klebsiella oxytoca; identical to SEQ ID NO: 128200

SEQ ID NO: 193746 - DNA, 582 bp, Klebsiella oxytoca; identical to SEQ ID NO: 103904

SEQ ID NO: 193747 - DNA, 690 bp, Klebsiella oxytoca
atgcatcttgaacgacatagtatcgaaaaagtgggatggctgagggcagctgtactgggggcaaatgacggaattgtttcgacagcgagccttgttcttggggttgcatctgcaaatagcagtccttccggtgttttacttgcaggtgttgcaggactggttgccggagctatgtcaatggccacaggggaatatgtttccgtctcatctcaggcggataccgaaaacgcagcacttgcccaggaaaaaagggagctggaaactgattatcagggagaggtgcgggaactgacttcactttatatgcaacgtggactggagccagagcttgcccggcaggttgcggagcaacttatggtcaaagatgccctggatgctcatgcccgtgaagaactggggttgacggatataaattctgcacagcccctacaggcagctgtcttttctgccctgagtttttccgctggtgcggtgttacccttaatcgtggcatggctctcccctctgaaactggcttttttgttgataatcctttccacccttttttcactggcggtccttggctatatatcttcggttttgagtaaagcctctcctgtcagggcgatcataagaattacgttctggagtaccatggctatgcttttgtctatggggattggtcattttgcagggcaggccctgctttaa

SEQ ID NO: 193748 - DNA, 597 bp, Klebsiella oxytoca; identical to SEQ ID NO: 103906

SEQ ID NO: 193749 - DNA, 369 bp, Klebsiella oxytoca; identical to SEQ ID NO: 103907

SEQ ID NO: 193750 - DNA, 762 bp, Klebsiella oxytoca; identical to SEQ ID NO: 143810

SEQ ID NO: 193751 - DNA, 762 bp, Klebsiella oxytoca
atgatgatctcatatcaggaacttgttcgcaccttccctaaatcaacccttaaaaaccatccacatgcttaccgttaccaatgtgcatccagagatttacatcaagattgtaataagtggggattcagggcaagcacccttgaaaggacgattttacaactaatagccgatagaatattcttacagacgaaatatcaaccatctggtttagaagggaaaatagcggacatacaatcgcaaattgagaactatgtattggctataggttcagctaaaagccctgagatcattaatagcctcacttcgcaaattgatcaactagaacaagaaaaacaaagtctgatagtggaaaaaagactatacgatgaatcaatcgtgcaaatgaacactgaaggttgggacaagttcaggaagtttgacattgatgacgcacttaaccctttacgcacaaaaataagagcaaacattaagaccgttattatgcgcgtagattgctccagaatagataagaaacacaacttgtttaccatcacataccgcgatcagcataaacagcgtatcgttatcgaaaacaactcaggctggaagaagggtaagatttatgttgaagcgcagactatcaacgatattcaaattcttgaatctgaaggtttgatactgcatgaccatattgacatattgatcaaccgagacaagttcatgacggaagcgaaaaaacgactagatcatccccgaacactgatcgatgaactgacggaataa

SEQ ID NO: 193752 - DNA, 1449 bp, Klebsiella oxytoca
atggcctactatgatggctgcatagaagtgaatttaagcaccatcaagccgatgatcgccttgccttttcaccctgccaacgtatatgaaattgatacgcttaatgagaatttgcaggatattttgcacgaagttgagattgcggcggataacatttcccagggacgcgccaggctctccctgctggataaagtcgaacatggaaagctgcggattcagcaggggatcatcgccggctgcgctggtggaaattatgttaacgtggtcgaagcggcacatgccttaaaaaaccactcctgtggtgacaacgctttctctctgtcgatatatccctcctctcaaccggtattgatggacctgactaaaaaaggcatgaccagcgcgctgttgagcgccggcgcgattatgcgcaccgcattttgcggcccctgcttcggcgcaggcgatacgcctatgcacaacgggttaagtattcgccacacgacgcgtaattttccaaaccgagaaggatcaaaacccgggaatgggcaaatgtcggccgttgcgctgatggatgcccgctccatagcggcgacggctgccaatgggggcgtgctgacatcggcttgtgaactcgattgctgggaaaatattccgcagtatgaatttgatgtttcgccttataaaaatcgtgtttatcaaggctttattaagggggcgacgcaacagtcgctgatttatggtccgaatattaaagactggccggagatgagtgagctaacggacaatattttgttaaacgtgacctcaaaaatcatggatccggtgaccaccaccgatgaactgattccatcaggcgaaacctcatcatttcgctccaatccgttagggctggctgagtttaccctttcgcgacgcgatccgggctatgtcggccgtagtaagaagattgcggcgctggaaaaattacggatcgagggggacgatccttgtcgcatggatccgcagctggaggaggttttttcccggatccgccaactgccggggcaggaaaatgtcacgcttgagcagacggagattggcagcatggtttatgcggtcaaacccggcgatggttctgcacgagagcaagccgccagctgccagagagtccttggtggcctggcaaatattgcccagcagtatgccacgaagcgctatcgtacgaacgtgattaactggggaatgttgccattgcagatgaaggcgctgccggagtttgaggtcggcgacttcatctatatcccggggatcaggtcagccctggaaaccgatctgcgtcagattaccgcgttcgtgatcggccacgatcgccccattaaagagatctctctttacatggaggggctcacctcagcagagcgggagataattaaggcgggaagcctgattaattataataaattacgcttaacaacccaccatcagtag

SEQ ID NO: 193753 - DNA, 654 bp, Klebsiella oxytoca
atgaaggaaattttggaacaattttttaaatttattcaatactgtatggataacagtgtaattgaagccgggactgcattattcattgtcatgtgcatgattgtattttgtttatctcttttaaaaatcgaattcattagcaatatgattgatacgataaaaaatcgtcgaaaaaatgaactcttaaaaatactaagtaataattatacttctgcggagcagagacgtagtgcagagatcgagttgagtcgattgcaaaacaaagagctttgcggatttgatgatgtattaaggcaatgctattgtgtcgatttagcaagtaaatatcataatttggtgactatatcatttttcaagaagtttcaatcttccatcgtgatatgcaatagttttacgccatctattaagactggtgtatatttgcggattgaatggtttcttggggttatatattctattcacttaattttgattgctggtttgtttatcttcctttctgctttgggaaacaaagaattgtctttttggaaacatggcattctatatcttatggcgatgggcatattatggttatgtgtcattatttcaaagcaatttccctctcgattggatatcagattactggaagaaattaagagacaggaagcgcaataa

SEQ ID NO: 193754 - DNA, 186 bp, Klebsiella oxytoca
atgatgacgtacatttccaataacacccgcgagcaggcgatgctcggcgatttctcaaaaaccattgatgatgcagtaatggatagcaacgaagcgcagcaggagatgctgttgcaatatctgtcaaatccagcgctagcaaaaggctttgcgcgcgtggtgtttgatttactgaaaggagtgtaa

SEQ ID NO: 193755 - DNA, 414 bp, Klebsiella oxytoca
ttgctgcacggcattattgcccgtaacgaagctctggagtggagcgtctttcgcgggaacagcgcgcgcgtacatctcggcgaactggggacgcatttcccgcccgcaaccgaagcaggcgcaccggaattaaaccgtatttttgccgaaggtgttagccagattaaaacgttgccgccgtttgaaggtgggctggcgatgtttctgttcggcgcatatttccagtttttctttgacggtaataaacgcaccagtcgccatatgatgaacggctggctgatgcgtcatggccataatccgatcagtatccccgccgcgcgggcgctggaattcaacagtaaaatggtccgtttctatcacagcaaagatgccaccgagatgatgatattcctcaccgagtgctacaccctgtaa

SEQ ID NO: 193756 - DNA, 798 bp, Klebsiella oxytoca
atgagccagcttaacctgcctcctgagttgttagcatctttagtaaatgtcattacaccattcaatgaagatcagtttattgataagctgtatgatgatatcaattttattatggctgatttagaaaggtcgtctaataaatattattgtgatgatgaagataaaattacaaatttaatagcgttatccttaagaatgaaagggtatgatgctactgaacaaactaactcaaatggaacggttgatttaactatacgggatgcgcaaagccattttacttggttggccgaagccaaaagaggttatagcttaaattctgtattcgaagggctgttgcaattgattacacgttacgtgaaaagagaacaatatgccggattgctaatctatcatcaaaaaccaggagctatgacattccttaaggattggtatacgtatctatcatctggtaattataaaaactatgcaaaaatcaaggatagaattgatgagtgtaataaatgctttaatttatcccctgttgcatattcgatgatacctaccgccaactccaatttttttgatttcacagcagttaaacccaatgatggtactgtgaaagtaagatgctttatcgctgacttacatttcaatcctatggataaaagtgctggtaaaaatgccagccttgccaaggggcaatgtaaaatatccataactgacatatgcacacaatgggagtctgatggacaacttccgaatgatgttaatatcatcttccaacatttaaaagatctgcatccagaatattttgcttaa

SEQ ID NO: 193757 - DNA, 1080 bp, Klebsiella oxytoca
atgactgcacaaacaaatttaaaccagcaaaccaatcctgttagcaacgcggatagacagcgcttatctaacttattgaaaggattgcaagaaacagaccagttttcgtatactacgcagttaggccctgtatacggattccctgtgtctggtaaaggctggagcgcatgccttgacctcatagaagatagcatcctcaatccaactacagatagaccgaatgcaaaccttgacaatcttgattctctagtagacagagtcattatttctgcttcacatttctattccatcgactcaattacacctaccgatcctcaaaagcgggcgctggatcatcttgttgtaagtgcacctctagacagaagcgtggcagatttttatcccaagaagaaatatactggcgaaataaatacatctgttgtatatccaggtacttatcttactaaaacaaaaaatatgggggatgggataatattcatcttctcttatatatacaatgaatcaccacgtatacctggagctgttttaactcatactctttcacaccagttttttacaatagcatttattcctaatgattatagtcgtattgagttccgcgttccaaaaacaatccctaagagacacttagccaaagcaatgttaggtgtgaagaacgcaatgaaccacatttttgaacaagctcaaattagattaaacaagacatcacttaatttttacaaggctatttcaaaattgcacgctgatagtacttatggaagagccgtacatattgtttataatggcaccaatactggctctgatgttaagtttacatgcagaactaatcctgcatacaatgcaagggagcttgaggttaatgataaaagtaataataatgatagttttgaatgtcgagctatagctgttcgtttagatactcaaaatgcaagtggcgtagttagaacagaagttggtttagaaccgaataaaaagcaatggttagatgatgctatctgtcctgagttctttattgaaaacccagcagacactgcttcgttaaacggtataataaatcatgtcatcaacgaatctaagtga

SEQ ID NO: 193758 - DNA, 897 bp, Klebsiella oxytoca
gtgagcaaaaacatttcaataacatccgaagaacttaacagcaccgatatgatttccattgtatcttcttttcccagtaattttattaaccatcgttcaccaggcattccaaatgaattaagaaggaagatcttacatcagcagtataaaaatagaatagtttccgatggccttgaaactggtcatttacagcttactgataatggttatatattcaaatccaaacagagcttttcatcctttgctggttttgtctttgaagcgtatttggttgatgagtttaattcaaaaaggactgcacgtttaagagcgtttcagtgggcgacggaaagatcagagggctggtcaactaagactttcgatgaatacaaagctgtgggtactgggcttttatcaacgaaaaccaattacttgggttattatgagccccaaagcaatgctgatattatttttctaaggaaaagccctttactcgacataatggagcccgctttgatttataatcagcaagtatctgcaaaaatacaagtaaaaagtattaaaaatcgttttaaagaagatattgttgataaggttatatctggtaaatatctccgtgttattacaatgcttagtgataattttggtaggccctcttgggtgatttgccacaatattttgcatcatatgctaaggacaaatgctatcacttcagatgtttacgcaaataccataggaagaatacagggacccgaatattttgatctcaatcaatactatattgatgattactatgattatatatatcaatggtataatggtaatgagtcttctactaaacatactgatgaggccgcagagcaagagattacaggctataagtatgtgaataatgttcttgtgccgattgatgcataa

SEQ ID NO: 193759 - DNA, 1212 bp, Klebsiella oxytoca
atgaaatacaagcctaatgcgtaccttgttaaagaaaactcttcggtgtactccgtcaaggtcactattccgccttatatgcgttccctttttgggaatcgaacagcattcatgcgtacaacaggcacggcagatatcagggaagcccgaatcattcgtgacaaagtcatgcacgaattttttgctatcagagaccgactcaagccaaaaccccaacgtaacagtgttgatcgcgtcctggtggaactgcgctctatcaaccagcatgtaagccaaaatgatgggatagacttcgccacggctcgtgtgtgtccctctcttgtccaactacgggatgaatttattgtccaacacagtgacaggcgcaagctgtctaccttgagcaagtacattaaggcggtggaggtcttcacggctcatttccggcgtaaggatttccagttgcaggaaatcaacaggactatggtcaccgattggttagatagcgccaagcaagagaaagccagccagacactggcgaattatcttggctgtctgtcccaactagtggcacaagcccagaaccgctatcacgacgcgccgaaagccaatgtattcacaggccacaaactggacgtgcgccatgatcgggaaagctacgagccgtttgctggtgatgaactggctaaggtgctcgcgctgctggataatgagatgaaagctgttgcgatggtgggaatgtatagcggtatgcgccttaacgaaatctgctctctgcaaatcagcaatatcaaaaccgttgaggggctatggtgtttcgaggtggcggagggtaagacacgtaatgcggctcgcctggttccaattcatagccgattgacgacactcgttaaagacctcatccagaacaaccacaacggctttctgttctaccatgcaagcatcacagaacgtgcagatggcaagcgctcaacgtggcatacacagcgattcacacgggctaaacgtaaggcattgggtgaggaaggcacggaacgaaaggtgtttcatagtctgcggggaatgttcatcagccagcttgatcgtaaaggtgtaccagaggacaggatcgctttaattgtgggccatgagcgcgggaaaacggagagtttcagaacctattcccagggcgcggggatgaaggaactatcagagtatgtagagttggtgggttatgaagggctgggtgtgtag

SEQ ID NO: 193760 - DNA, 471 bp, Klebsiella oxytoca
atggaaggccataactttgagcaactaaaacagcatattttatcattatctgaatcgcaggtttttgaagttgcacggactgaatggaaactgcactctattgaattatcagaggaatgggacagttgcccttgtggtcaatctattaaagaacactgctatatcgaaaatcagaagaacggtaataaaacctacgttgggaatgtatgcatcaacaggtttatgaaaattgacacaggaacgctcatcgatgggctgaaaagaattagagaaaatatacgagcaaatgctaatgaagcgttgatcgagtatgccatgcaaaaaggttatctttacggtgaaaaagattacaactttctgttatcaacaatgaataaacgtaaattgtcggaagcccagttatcttggaaagaaaaaatcaataaccgtatcctgaaaggtactgtggttcaaaaaagaacatcacgttaa

SEQ ID NO: 193761 - DNA, 213 bp, Klebsiella oxytoca
atgaaactagctttgatcggtactggcaacatgccgctgatgcagtggattctagatggcaagggcgatgatgcgatcatcaacatgtcagcattggcgcgtcggcttgagtgtagtcgctccagcctacttgaccgcattcaggcctacgggttcgattctgctatcaagcattacctcaacctacagcgacaacgaaaactgaaaacttaa

SEQ ID NO: 193762 - DNA, 711 bp, Klebsiella oxytoca
atgaccgctgaggatgtagttgcaagtcataccctgaagcattacctgcaaacccgccgtgacgttgaatatgcaatggcacagagtcttcttcacaatactgtagaggcgacacacctgcgtgaaggcccaaccattcactgggatcagttctggggcattaaccagccgtctgctgtggtgaaaactggcacaagtgctaacgtcattactgagatgcaaaacgctgtcacgttgctgaagaaaaatctgggtggctggtcttccagcattaagcaggtttatctgctggcgagtccgagtctgttcactgccattcaaggcaacccaaccgcatatcaggctgcattatttggagcgacttcccgcggcatcattttccctgacaccttgggtgcatatgatcgatacaacatcgggcgcgtaactgtagtgcaggttgacgatccgctgtacggcattgcagatggtgaaggctacatgctggcgacgttctccaacatcgtagagggcgacttatctccttatatgacctactgcacgccagcctcacgccacgcagaggttgctaatggtccggtttatccgtcgtaccattacgttctgcgtgataaattcatgaattacgaggtggtcagtgagctatctcagattcagatcccaatgcgtccggacttcgttttgaaaattacgatggatggcgcagcgtaa

SEQ ID NO: 193763 - DNA, 1299 bp, Klebsiella oxytoca
atggaaataatagatcaggattcgttttttttacaggaatggggccttgattcagcattggttgaaaaaagtggtttatcagtagacactttaaggtctatcgtacaagactacaaaagcaatcagctaacattgctagatgaggctgagtatatcgcaaaaaaaatccaacgttgtgattctgtacattctgttcgttggcgtatcaaagatacttcccatcttttaaataaaatcatcagaaaactaacggaagatgaaccgtctgaaaagtacaaaggaataagctcaggcaactacaaatctataattactgatcttatcggtgtcagagcaatttatcttttcaaaagtgactggaaagacgttcacgaacatattttatcaaggtggacaactaaaaatgacgaatcagtaatgatatatcaccgtgatggtgatattatggatatttatgcaggtcatcctgaatgcaagcaagaaatacacaagcataattatcgctcaattcactatgttgtgccagcaacaaatattgaatctgtccaagtgtattgtgaaatacagacaagaactatttttgaggagggctggagcgaaatagatcatcaggtaagataccctgattactccgatgatgaaaacctaatgagctatttaaccatatttaataggttagcgggaagtgctgacgaaatgggcagttatgtgaatgaactcgtagagttaatcaaaaaaaacaataaattagagagtgagcgggatttaaaagatcaagcgtttgattctgaaaaagaaaggcttgaggctgaaattaaaagtctatctgccaatcaaagcaatttcgcggaaatgaagagtgcatatgataaactcatagaagttcagaatgaggaaatgaaaagtttaaaggaagaactaaaatctagatcagacgaaaaaataaaactgaataggcaaaaatcccctgtgtcaaagattattagtcaaactgatacggttaaaacaaatgatagatatgagggaaccataaagatacaggtattaagaactaatgacttcgcatctttcgctggccatttcactccagcattagaatcaataccaaatgtaagtgtcacaccaattgaaacaacagcaaagaatacaaagatatctgatttgagagttaatactggagtgggtaatacaagagattttaacgctcatgtttttaatgacaagttaaaatatattgaggaaggcgaatatttattttcttttgtggcaaatctaaacgaattaacctcaccgacttag

SEQ ID NO: 193764 - DNA, 435 bp, Klebsiella oxytoca
atgagcaaaaaaatggataaacagtgcgttatgctggccgccgggctctccagccggatgggcaaatggaaaatgatgatgccgtggggcgagggaacgattctcgatagcgcccttgccagcgccctggcgttctgcgatcgggtggtgctggtgacgggatttcgcggcgacgaactggccgcgtgctatcgggatcatccgggcgttgaggtggtctttaacccgcaatatcaggatggtatgttctcttctattcagtgcggggtaggccatattcgcgcttctttctggcgctgggcgatatgccggaggtcacgcccggcgtctaccgccggctgtgggccaacgccgacgccgggagctgcattattccagcctacgatcgcggtaaaggccatccggttcttctgccccagcgggcgatttctctga

SEQ ID NO: 193765 - DNA, 333 bp, Klebsiella oxytoca
atgaaagctcaaattgcaaaaagaacacgtcgaaaattcatcagtagattgaagaaaaaactgtctaacacgattaaaaatgaaagtggaagcccagagcaccttttgaaaaataagctacaagtaaaactcaagagatatattaaattaaaaattgataaatcatatttttctactagtgaaaaacgtgaaaatatatctgccccaatcaatattgattactatgatactacaaactatcataaaacgaatgtttttttaatgaagcttcgccgccttatacttgacaaaaaaaagaatgtctgtatcaatttcaatgccacaaaaaaataa

SEQ ID NO: 193766 - DNA, 774 bp, Klebsiella oxytoca
atgatttcctttttggctgaggttgatacattaatatcccatagtacactagggcgaggatgcataacatttaaccaccctaaaatggagaaaattgaaagtatactgaagcaaataggtttttatgatcttttgagaaaaggtgcgcgagaaactaaaaattttgatgatgtagcatattggaattatgcatcaggggcacagactgatacacaacaagcttcagaggcgataaaagaaatagaatttaaaataagtcaaaaggctcagagaaaactttataaagggtttagtgaggcgatggctaactgtgtggaacatgcttattatggtgacaaaaatcaagatgactcatgtacaaaatggtgggcattcgctggtgttaaagataacaatcttattgtagttatatgtgataaaggtatcggcattcctgaatcacttccacttaccagaaccgatgaaattattgagcacctgaaaaaccttcttcagttgcgaaaacttaatgactcagcaatgattaaaatagcctcccaaatgggcagaaccagaactcagcaaggtaatcgaggtaaaggtttaaaagatatcaaagctattattgactcactaaatgaaggtaatttatccatttacagtaacaaaggttactatagatattttagacataattcaaaacttaatgatcatagaagagagcacaaatccagcgtgtgtggtacaattgtcgaatggtctatcccgttaaccgcagatgggaaggagagttaa

SEQ ID NO: 193767 - DNA, 342 bp, Klebsiella oxytoca
atgaaaatagtaaaagtatcagaacgttttccatacccaggaccaagatttaaacgtcttggtccacagtctggagaggaatttaaagctttcatgttaaaaatattcaaagacacttatggggatgattttacaaaaaataacaatattatcttaatgattgatttagatggcaccccaggctatggttcctcatttttagaggaagggttcggagggctaatacgtgagggtgtaccttataaattgcttaactcattaaaaataaaaacagatgaagagcctgagttggctgatgaaatcaaagaatatattgacgatgaatataaaaagaaaagctaa

SEQ ID NO: 193768 - DNA, 1815 bp, Klebsiella oxytoca
gtgaaaaatgcaccgaaccttaaacatcttcccagggaaaaatttactgaggcgattatttttgcgggagcagatgcatatgcgcatgcaaaaggatgggaggaaggcctgggtaaacaggttgcagaggatacaacccctcctatctacctgggaccaaaacagctggctgagctggcaaacctgaatattgtcgataaagggcgacggagtgcccgcgtatatctggccggagatattgaaccgatacagattaacgctattggtgaaaagctggcgctggcaggtgtcctggatgcgagattgtataaaggcattccagatcgccatccggaggactggcacgattatctgaaacggctcagggaggagactgatagtggggaaagcatagtggtcagtctgccagtggctaagcgagaacccttacaaaatagcgtagtgccagcattgaaccagatgggggccagccagcgcggtgaggtgctgttggctcattatgatggcaacctggcgattcatgccgactctgatacggttcaccactacaacggtgttgtctggaatccactaccggataaagagttgcagcgtgaaatggcacagatctacatcgattccgaggtggcttactcgcagaacgctatcaagtccgcagtggaaaccatgaaactgagtctcccggtcatgggggttacagcccgcaaccttatcggcttcagcaacggggtatttgatacccggacggggcaattcagggagcataacaagaccgactggctgctgatcgccagcgaactcccgttcagtccgccggcagaaggcgagacactggcgactcatgcgccgaacttctggaaatggcttcgccgttctgtggccagtaatgaccgaaagaccgatcgtgtattggctgcgctgtttatggttctggcgaaccgttacgactggcagttgttccttgaggtcacggggccgggtggcagcggtaaaagcgttatggcggaaatctgtactatgctggcgggcaaggccaataccgtctcggctagtatgaaagcgctggaggatgcgagggacagagcgctggtggttggttactcgctgatcatcatgccggatatgacccgttacgctggagatggtgccgggattaaagcgattacgggcggcgataaggtgtcgatagaccctaaacataaggcgccatactcgacgcggatacaggcggtggtgctggcagtcaacaacaacgccatgacgtttagcgatcgcagcggggggatatcgcgccgccgggtgatattcaacttttccgaggtcgtgccggaagacgagcgggatacgatgcttgccgaaaaaattgagggggagctggccgtcatcattcgtcacctgctgacccgttttgccagccaggatgaagccaaacgcctactgcacgaacagcagaaatccgaagaggcgctgactatcaagcgtgaaggtgattcgctggtagacttctgcggctatctgctgtcgtcagtggcgtgtgatgggatgtttatcggtaatgccgagatagtgccattcagccctcgtcgttatctgtatcacgcctacatggcatatatgcgggccaatggcctgaacaagccggtgtcgttaatgcggttcggtacggatatgcccggagctatggctgagtatgggaagaagtacgaaaaacggaagaccaagcacggtatcaggtcaaacgtcaccctgcatgatgattcagaagactggatgccatcatgcaacagcaactcagaaaacggtgaggtagagtaa

SEQ ID NO: 193769 - DNA, 372 bp, Klebsiella oxytoca
atgcataacccggcagagttaaacgaatcgcttgaaaggcgtgtggaactgctgactgaaaaggtgctgttccttgagcagcaggttaaaacactgactgacagccaggggggagaaatccccccgggtatggcaccagtatctacgctggctgctgagttcggtatctccaccaaaaaggcggaagagctggcgaaaaacaccggcgtgatgatggcgaagttaaaagcaggtggctttgttgcgccggaagagaaattcagggaagtggccagacaggtgttacgtggcgctaaacgtaaatacggatcggcctactggtatcacccgttgttaggtaaattccagatgagcggagggatccctaagtga

SEQ ID NO: 193770 - DNA, 198 bp, Klebsiella oxytoca
atgtctaagctcgaaatattgaccccgaagaaggcgaaatcgagaactttacagctttcaacgctgcttatggtgatttcagagaacgcggtgcaggagcacgaaagacagcatctggtcgagcttgcgtacgacatttcgtgtgagcttgcttccttcatgcttgatcaagaattgccggaggtaggccatgcataa

SEQ ID NO: 193771 - DNA, 279 bp, Klebsiella oxytoca
atgcgtaaccctcaaccgaaaaactttacctggctgtttctggccacttacgccgactcgcgggcgcttcctgtcgttctgcgcactcaggctaataccgaagatgaagcccgttcacagcttagtggtgatttttccctgacattcgcggcaaaaattcgttccgattgtcctctcacctgtcattgggtggatcgggatagttctgttttgtggtctgtcatgggctgcgatgctgacgcctcacttcagcaaatgaagggggccggcaatgtctaa

SEQ ID NO: 193772 - DNA, 201 bp, Klebsiella oxytoca
atgagtgatttaaccgtccatcaggctgctgaaaaagcatatcaggcagaaattattctcgccctgatgcagataaggcaggttgagaaaatggaatctagtgaagtggccgcactggtaaatctgctcaaagatctggtcggtgatacgggcggttttcttggtgaagaagtatcacgtgaggaggaggaaaatgcgtaa

SEQ ID NO: 193773 - DNA, 213 bp, Klebsiella oxytoca
atggctggatcacagcatacccaaactcaccccaaatttacatggcgttttctctcgatttctgagcgttctcctgtcgccagaccgttggttatttatgtcaacgcatccagcgagcaggaggcccgcgacactatgccgggagtaagcctcattctcgactcccgcctcccataccatgcctttcaggctatggaggtgcgccatgagtga

SEQ ID NO: 193774 - DNA, 864 bp, Klebsiella oxytoca
atgatcgcgcataaaacaaaggcagctttgcagagctgccaatgtcactaccaaaaactcaagcaaaataagaataccagggttaatgctggtggtcaaaacctcacccaactcaattttgagggcgctgattttagtggtttttttagccagcgcaattctgcgcccactgattttactcagcttttatggcaaagcccaaaagtgagttttgcgtataactcattgattcccgcattcttcctaactttggggaaaaagggcgggaaatcaaaccctaccctgtgctttctgtttcttcagtctgattaccgtgttagccaaataagggctttaacaatccagtatgtggaatacgcagttgcaactaaaaaaacaacagcgatggcgtctcgccatttaccccgttccgtgtcaggcataaatcattcctctggatctgccttagcttttttgcgctggtcttccttgagctttttgagaaatgattccagcgggaattgcattgactcagcttttgattctgcttcgacgggttgcgaattcttctgctcttttgtcatgtgtcagcccttaggctcaatgccgcgctgctgtagttctttgcggatgatgcgcttgatccaagcagccagtgattcgtcgccatcctgttgttgtgcttgttccattagctcacgtagctcgggatctaatctgaactggaatggaggattaccacgtctttcatttttgtgtgttgacacgttaattacacccgatgtaatgtgtttatgtgtattgacacattacatacaagaaagacaaatagcaacgcctcggagtgcgggaacactaccgaggcgtctaaccacaaaccgttag

SEQ ID NO: 193775 - DNA, 813 bp, Klebsiella oxytoca
atgactcagaaaaaattaactgtcttaactggcagcggccagactcaacctgaaagcaaccagaaggatatttccagcaataattttgcttcgagaatccccgtaatcataagcaatatcggcggaaaagaaattcagtccgtaagcgggcgtaatctgcatacgtttctggctgtagggcgcgactttaccaactggatcaaagggcgcattaagcagtacgggttcgtcgaaggggttgattatgtgactgtcgaatatttgacctcgccaaaacgggcgagctcaaaatcccgccagcgtattgagcacgattacattgttagcctgaatatgggtaaagagctttcgatggttgagcgcaatgcgcaaggcaagatggcgcgccagtatttcatcgactgtgaagaacgccttcgccgtgtggcgcccgaggagcatgaggctgcgttgctgacatggcgtaaaaatcgtgtggctgcttgcgaggatcataaaagcatggccgatgcgatgaagggctatatcgaacgcactggagataagcagcacggctttgcctacagcaatgaatgcaccttcctcaatagccttgcgctgggtatgcatccgcgagtctgggcgaagcagaaagatattccggttaagcaggtgcgcgacaacatgaacgccgaacaactggcgctgctggcttatctagaaagccgcaactgcgctctgttggatctggataccagtacggcaacccgcaagacaaaactcactgaactggcgcaacgttggctggttaaaagagtgggaggtacagcatga

SEQ ID NO: 193776 - DNA, 285 bp, Klebsiella oxytoca
atgctaaatatcacctttaccccgccaaatcctgaacaacggcgcaccctcctggaagagtacggattcaagttcgatcgccgaatccgtgaagaggaatgtagcgagatcaccagcctttcccgctccagtcgctggaaaatggaacaacaggggcgcttccctcctcgctgccattttggccgcaatagctgcgcctggcttctgtcagatgtgctctggtgggtccgtaaccctcctgctgtacctaacgtcaataacccatatagccgtaaatcggcttaa

SEQ ID NO: 193777 - DNA, 789 bp, Klebsiella oxytoca
atggcaataccattacgtgagtattattcattatctcgtgctgctgaattacttgattgtaaggtggaggatttaattcattgggcctccactggggggattaatatatacctgtcgattgagtcaggtatgggatacatgcacttctgtaatgaaaacgatgagttagaagagaattttgaagaaaaattattggctcgtgatggattttcgattgtaagtgctatttatattttggaggatgatactgctaaaaatttcttccagaaagagccaccttttgaagggttccagccatgcacttttaatggattgtgggctttgcctcgttcagcatattgttatgatgatttaatggaatttaaacccagtttttttgacttatggttatcgtcaaataagttgatgtttatagcttttgaagatgatagctacttaaatccccttgaaagtgatctttatttaatgaagtctgattttttattaatttcaaagataataaatggtgttgaaatgacaagcgcttttaaggagattccaaactactttaatgaaggaagagagcagctaagtttaaaatttaatgaagacgctagttcaatttctcaagttagaacttccagaacagccagggatgcaataaaaataatggcaaaaaaacattatgctgaagttgctgggaattataaaaagtttgctgaggtgttgagtgcggaggctaaggagattgaagggatgacgggggttagatttgatgattctacagtcggtcgctggatgaaagactag

SEQ ID NO: 193778 - DNA, 1227 bp, Klebsiella oxytoca
atggcgggcactaacaagctaagtgataaaaagctcaaggcactacagggggccagccgtgatgcgccagaaatgtatgctgatggtgaaggtttaagcgtcagggcatcaaaacagggtcaactgagttgggtattctcgtaccggttgggtggaaggggtagcaaactcgaacgtttaacgcttggccgttaccctgatttgtcgctaaaagctgcgagagaaaagcgggaaaagtgtcgtcagtggctggctggtggtcttgatccaaaaacagagcttgaactgagcaccgaagaaactcttaaacctgtgacagtacaggatgctctcgaatactggctggtgaattacgccaggagaaagcgcagtgatgaggagctggtaagggcacagctacgcaagcatatttacccgcgcctgggtcgttatcccctcaccagatgtgaaacacgtcattgggtggcctgttttgatgaaataaatcagaccaaacccatgaccgccggccgcatgttccagatttctaaacaggcgctacgtttttgcaaggtgcgccgctatgccgccagcgacgctctggcctttctcactattcaggatgtaggccagccatccggccaacgtgacagagtattgtcagatagcgagctggctgatgtgtggcgttgcactgacagcgatgatcagcagccgtactattcacgtcttctcaaaatgctggtgctctttggtgcgcgaacgatggaggttcgtctctctcgatggtcagagtgggattttacctcgtggatttggaccgtaccgaaagagcacagcaaaactcgcgagaaaatcgtgagatcgatacctgaagctatacgcccgtggctggaagagttaaagcgcgagacggggaaaacagggctgttactgggagaagagcgtacccgtcaggctgtatcattgaaagggcgcaggctttataaagatttccaccataatgagccttggacgcttcacgatctgcgtcgcacgttctccacagggctaaacaatatgggcatagcaccgcatattgtagagctgctgctgggtcatgctctaccaggcgtaatggctatttataaccgtagcctgtacctgccggagaagctggacgctctgaacaaatggcatgaacgcttagaacttcttgcgggtaatcataaaaatgtggttctgttacctgtagcaaatagagattaa

SEQ ID NO: 193779 - DNA, 1299 bp, Klebsiella oxytoca
atgtgctctggatctctggggcacaaaatggctgacgattttgatattattatcatcggtgcagggatagcgggcaccgcctgtgctttacgctgtgtgcgggcaggtctttcggtcctcctgcttgaacggggcgaacttcccggcagtaaaaatctctccggcgggcgtctgtattgccacgcgcttgccgaacttcttcctaactttcaacaatccgctccgcttgaacgccgtatcacacaggaaagtctggctctgctgactgatggtggcgcaacaacttactccagccttcagccaagcggcgattcctggagtttactgcgcgcccgcttcgatccgtggtttgtgagtcaggccgaagccgaaggtgcgcagtgtattaccggtgccaccgtagaggcgttgtaccgcgaaaatggccggatctgcggcgtgatttgtgataacgaaatcctgcgcgcccgctacgttgtggtggcggaaggggcaaacagcgagctggctgaacgtcatagtttactgcctcgcccctctccgttatctatggcgctgggcatcaaagccgtactggcgctggagcaaaagacgctggaagatcgtttccgcctggagagaaacgagggggccgccatgctgttcaccggcggcgtgtgcggtaatttccccggcggcgcgttcctttacactaatcaggatacgctctcatttggcattgtctgcccgctctcttcgctagagaaaagccccgtgccggcggctaaactgctggatcatcttaaggcgcatacggccctgcgccctttgctgcgcggtagtgaaacgctggagtacggcgcgcacctggtgcctgaaggcggattgcatagtatgcccgtacagtacgcaggggaaggttggctgctggtcggcgacgctctgcgcacctgcgtcaataccggttttaccgtgcgcggaatggatatggcgctcagcggcgcgcaggcggcggcgcaaacgttgatcgtggcctgtcagcagaaagccccgcaaaatctgttttctcaatatcatcagaatattgaacgcagccagctatgggcggttctccagcgctaccggcacgtgcccgcgctgctgcagcgccccggctggtatcgccaatggcctgcgctggtggaggatatctctcgcgaactctggctgcagggcgagcgccccactccgccgctgcgtcagatagtctggcgccatcttcgccgtcacggtctactccatctggcaggggatcttgtaaggagtttacgatgtctgtag

SEQ ID NO: 193780 - DNA, 261 bp, Klebsiella oxytoca
atgtctgtagcacgcaacgtctggcgcccagccgacagcccgcatattgttccctccgcgttgccaaacgaagcggttgtcgaactgctgattcaatcctgccccgccggacttttctcacgtacgcaggaaggcaagctgcatatcgattaccgcggctgcctggagtgtggcacctgccgactactctgcgacgaagccacgttacaagaatggcgctatcctgactcaggttttggtattacattccgttttgggtaa

SEQ ID NO: 193781 - DNA, 576 bp, Klebsiella oxytoca
atgcccctgctacacctgctacgacaaaatccggtcattgcggccgtaaaagataatgccagtctgcaattagccattgattccgactgccagtttatctccgtgctctacggcaatatctgcaccatcagcaatattgttaagaaaatcaaaaacgccggtaaatatgcctttgttcacgtcgacctgctggagggggcatccaataaagagatagtgattcagtttttaaagctggttaccgaagccgatggcatcatcagcaccaaggccccgatgttaaaagcggccagggcggaaggttttttctgcattcatcgtctgtttattgtcgactccatttcttttcacaatattgataagcaggtggcgcagtccaatccggactgtatcgaaatcctgccgggctgtatgccgaaagttctggggtgggtgacggaaaaaatacgccagccgctgattgccggcggcctggtctgtgacgaagaagatgcgcttaatgcgatgaaggcgggcgttgcggctctttcgaccacaaacaccaccgtctggaagctagcaaagcggcttaattaa

SEQ ID NO: 193782 - DNA, 855 bp, Klebsiella oxytoca
atgaagattgcgatggtgatgaccccaggcgatagcgtggtgatggctcactggatggcgacagccgatctcgcttcagcggaaatggagcgctggattatagatagcaagccggaagtggctgagcagctccttgatgcgttggttgctcagtggcagcagacgccggtcgatatgctgatattcccgccgggcatggcaggcgatgagctggcaacaaggctggcgtggcgtttacagggggagagcgtatgtcaggcgctgtcggtgaatataccggaaggatgggtaacaaagtcgcactggggaaacgcattgattgcgacgcttgagattacggcccgaccgttttgtttgtctttgtcgcgtcagcctggcgtgaatatggctgccgatatttctgtcgaactgacggttcgccgtatcgtaccggctgccttacctggctggctgatgggcatcgaaagcgttgaacgtagcgaagtccatcccttgctggaggcgaagcagacgttggttgtcgggcagggcggcgaggacgttgatgctgataaaatcacggctctggcgcagagtcttggcatggaggcgggttacagccgcgcgcgcgtgatgaatggcggctacgatgcaaatcgtcttgtcggaatttccggtcaactgctggctgcggaggtgtgtatcgtggcgggggcatccggagcggcggcgctgatggcgggagtcaaggactgtcagtttatcgtggcgattaatcatgatgccagtgcgccggtattttcccaggcagatgtcggtattgttgatgactggcagccggtgcttgacgctctggccaattgtgttgaagcgtag

SEQ ID NO: 193783 - DNA, 783 bp, Klebsiella oxytoca
atgaacattctattggcatttaaatcggagccggacgccagcatgctggcggaaaaggactggcaggctgccgcgcagaacacctgcgggccggatatttcgctattgcgcagcacaatcggcgccgatgaacaggctgccgccgcgctgctgctggcccagcgcagcgcgggctgtgagatgaccctgaccgcgttaagcatcggtgatgagcgctcggtgcactggctgcgctatctggccgcattggggtttgagcgacaggtgctgctggaggcggccggagattttcggtttgcgccgtcctttattgccgcgcggcttgctgagtggcagcgcagctatggtgccgaactgattgtaaccggctgccagagtagtgagggacagaatggccagaccccttttttgctggcggaaatgctgaactggccctgtttcacccaggttgaacgattcactcttgaatcgcctttcgtggtcgtggagcagcgaatggcatccggtatccgccgctgccggatacatctgccagcggtcattgcggtcagacagtgcggtgaagtggcgttgccggttcccggtatgcgccagcgtctggcggcggcaaaggcgaaggttgagcgtcagatagtggcggttgaggcaagacctgaggttcgatgtttgcgcctggttcgcccggaacagaggcgcagcgcggtgatgattcacggaaaaacggcccaggagaaagccaacaagctatgggataactacttacgccaaaggaggcagccatga

SEQ ID NO: 193784 - DNA, 1350 bp, Klebsiella oxytoca
atgaacacttcaccggtgcgaatggacgacttaccgcttaacggttttcattgccgcattgctgcactgaccttcggcgcgcatctggttgatggctacattcttggcgtcatcggctacgctatcattcaactaacccccgctatgcatctgtcgccttttatggctggaatggtcggcggcgcggcgctactcgggctgtttatcggtagcctgattctggggtgggtctcggaccatattggccgccagaaaattttcaacttcagctttgtgctgattaccatcgcttcatttcttcagttttttgccaccacgcccgagcagcttattggtttacggatcttgattgggataggtctgggcggggattactccgtgggacatacgctgctggcagagttctcgccgcgtcggcacaggggggttttgctcggcgcatttagcgtggtgtggaccgtcggctatgtattggcaagtctcgctgggcactattttattagcgaaaaccaggatgcctggcgctggcttctggcatcatcagcgctcccggcactgttaatcacgctacttcggtggggaaccccggaatcaccgcgttggctaatgcgtcaagggcgattcgccgaagctcacgccgtggtgctccgttgtttcggaccgcatgtgctgctcggtgatgaggttaagacgagtaccaataaacgtatcagaaccctgttttcatcccgctactggcggcgaaccgcgtttaacagcatcttttttgtctgcctggtgatcccgtggttcgttatttacacctggcttcccaccattgccgaaacgattgggcttgaagatgccttaaccgctagcctgttgctgaatgcgctgctgatcgttggcgcgctgctggggctggtattaacccatttgctatctcatcgccatttcctcctcggtagctttcttttgctggcggcggtattaatcgtgatggcctgtctgccgtcgggcagcccctggacgctgatgcttttcgtcttattcagcaccacaatttctgcggtcagcaatctggtggggatcctacccgcggaaagctttcccacggatattcgttcgctgggcgtagggttcgccaccgccatgagtcgccttggcgcggcaatcagcacaggtttattgccgtggactctggcgcaatgggggatgacgattaccctgctgctattggccggggtattgctgattggttttatggtgacctggctgtgggcgccggaaaccaaagcgctgccgctggtcgcggccggaagcggtgaccgaggacaaggagggacaaatgaacattctattggcatttaa

SEQ ID NO: 193785 - DNA, 1455 bp, Klebsiella oxytoca
atgtctttatcccgcgaagcaattgttgatcagctaaaagaaatcgtcggtgccgaccgcgtgatcactgatgaaactgttttaaaaagaaatagcattgaccgctttcgtaaatatgctgatattcatggtgtatttaccctaccgttgcctgctgcggttgttaagctgagttcgacagaacaggtttctgacgtgctggcctttatgaaccaacataggattaacggagtgccgcgtaccggcgcatcggcgaccgaaggtggcctggaaaccgtggtggaaaactccgtggtgctggatggggccggaatgaaccaaattctcaatattgatattgagaatatgcaggcgaccgcacaatgcggcgtgccgctggaggtgctggaaaatgccctgcgcgctaaaggctacaccaccgggcactcgccgcagtcgaaaccgctggcgcagatgggcggcctggttgcgacccgtagcatcggccagttctccacgttgtacggcgccattgaagatatggtggtcggtctggaagctgttctggcggacggcaccgtcacccgtattaaaaacgttccgcgccgcgccgccgggcccgatattcgccatatcatcatcggtaatgaaggtgcgctgtgctatatcactgaagttacagtaaaaatattcaagtttacgccggaaaataacctgttctacggctatatcctcgacgatatgaaggtcgggtttaacatcctgcgcgaagtgatggtggaaggatatcgcccatctattgcgcgcctgtatgatgcggaagacggcactcagcacttcactcattttgctgacggcaaatgcgtactgatctttatggcggaaggtaacccgctgatcgctaaagcgaccggcgaagggattgcgcaagtcgtagcgcgctatcctcagtgtcagcgcgtggacagcaaactgatcgaaaactggtttaatcatcttaactggggaccggaaaaagtggccgctgagcgcgtccagatcctcaaaaccggcaatatgggcttcactaccgaagtttccggctgctggagctgcattcatgagatctacgaaagcgtcatccaccgtatccgtaccgaattcccatatgcggatgatatcactatgctaggcggccactcttcgcatagctatatgaacggcaccaatatgtacttcgtctacgattacaacgtggtggattgcaaaccggaagaggaaatcgataagtaccataacccgctgaacaagattatctgcgaggagacaattcgcctcggcggttcaatggtgcatcaccatgggattggtaaacaccgcgttcactggagcaagcttgaacatggtagcgcgtggccactgctggaagggctgaagaaacagtttgatcctaacggtattatgaataccggaacgatctacccgattgaaaaataa

SEQ ID NO: 193786 - DNA, 786 bp, Klebsiella oxytoca
atgtcgatcgaatctcttaatgcattctcaatgaatttcttctcgctgaaaggtaaaacagcgattgtcaccggcggcaatagtgggctgggtcaggcctttgctatggcgttggcgaaagcaggcgccaatttgtttattccaagctttgtcaaagacagtggggaaacgaaagaaattattgaaaagcagggggttgatgttgagtttatgtacgtggatattaccgctaaaggcgcacctgagaagattatcgccgcctgctgcgagcgctttggtacggttgatatccttgtcaacaacgccgggatttgtaaactgaataaggtgctggacttcggtcgtgcggattgggatccgatgatagatgtaaacctgacggcagcttttgaactcagctatgaagcagctaaaatcatgataccgcaaaatagcggaaagattattaacatctgctctttattctcttatcttggtggtcaatggtcaccggcttattcagcaactaagcatgcgctggccggttttaccaaagcatattgcgacgaattagggcaatacaatattcaggttaacggcattgcccctggatattatgcgacggatattactttagctactcgtagtaaccctgaaactaaccagcgggtactggaccatattcctgcaaatcgctggggagatactcaggatttaatgggggcggccatatttctggccagtcaggcatcaaattacgttaacggtcacttgttagttgtcgatggcggatatctggtgcgttaa

SEQ ID NO: 193787 - DNA, 1299 bp, Klebsiella oxytoca
atgcaacagaattcatatcgccgttggataacacttgccattattagttttagcggtggagtcagcttcgacctggcctatttaaggtatatctatcaaatcccaatggcaaaattcatggggtttagcaataccgaaatcggcttaattatgagcacctttggtattgccgccattattctctacgcccctagcggggttattgccgataaattctcgcatcgaaaaatgattacctcggcaatgattattaccggtctgctcggcttgttaatggccacttatccaccgctatgggtcatgctttgtatacaagtcgcctttgctatcaccacaattctgatgctgtggtcggtatcaatcaaagccgcatctctgcttggtgaccatagcgagcagggaaaaattatgggctggatggaggggctacgcggagtgggtgtgatgtcgctggcggtatttaccatgtgggtattttcccgcttcgcgcccgaagacagtaatagcctgaaggcggtaatcattatctacagcgtggtttatatcctgctgggaatattgtgctggtacttcgtcagcgacgcccctcagcatagcgataccgcgaaagacgagaaaaaagcgttccagctcagcgatattatggccgtgctgcgcattagcaccacctggtactgcagcatggtaatttttggtgtctttaccatctacgccatcctcagctactccaccaactatctgacggaaatgtacggtatgtcgctggtagccgcgagctatatggggatcgtgatcaacaaaattttccgcgccatttgcggcccgctgggcggcattattacaacttatagcagggtgaaatcaccaacccgcgtcattcagctgctgtctatcgttggagtcctggcgcttatcgcgctgctggcaaccaactcaaacccacagtccgtagccatggggatcggcctaatcctgctactgggattcacctgttacgcttcacgagggctttattgggcgtgccctggggaagcaagaacgcctaattatattatggggaccaccgtcggtatttgctcggtgattgggttcctgcccgacgtttttgtctatccgattgtcggccactggcaggatacgctccccgcggagcaagcctaccgcaatatgtggctgatgggcttattcgcgctatgcctggtgatcttctttaccttcctgctcttcaggaaaatacgccgcgtcgacgccgccaccgaaagcgacacattgctggccgctgaaacaaccagcgagtga

SEQ ID NO: 193788 - DNA, 705 bp, Klebsiella oxytoca
atgagcttactttataatgttaaatgggtttctctctctcaggttatacgtgttttatgccaagtattagcaatggtctttttttctcgatatcttactcctattgaaattggcatcatggcaatgactgttattgttgttaattttgttaatgtgttacgagatatggggtcttccgctgcgattatacagaaagataatgttacagatgagctaatatgtagtgttttttatctgaatttattaatgggggctggtttatttttcttggtttatttttgttcaggtttgattgctgctttcttcaaggagcctcttgttagctcaaccttaagcctggtagctatagccttccctataaatagtgtgactagtgttcatttggcattgctagagagagattcgaaatttaataaaattgcagccgtagaaatcttttcatctcttctgtcgttatcaatagctgtgttatatgcaatgaatggtggtggtgtctatagccttgttttgcagacgcttttatattcggtgtttagttcacttggcttttggttttattcaaaatggttgcctaaattcaagttcagtcttattgatataaaatcaattttctcatttagctctaatctaatagggtttaatataataaattatttttctaggaatagtgatcaaattataataggacgtttttttttctgctga

SEQ ID NO: 193789 - DNA, 1275 bp, Klebsiella oxytoca
atgagccagtacagagcatatcccgcgtataaggattccggcgttgagtggattgggcaggtgcctgagcattggaaggtagcgagagtcaagcgactggcgtcattgcgcaatgaacgacgaaatgatgtatctactgataccatttatatcggacttgaggatgtagaagcaggatcagggcagtacaagccaacgaatggaagctcccgtcaatcagaagattcaactgtaggcatcttttatgaaggggatgtcctgtacggtaagctgcgtccatatttgcgaaaagccattatttcagagatggcagggtgctgctcaacagaatttttggttctgagggctgaaaaaacagaacccagatggctgcaagaatggcttttaactcctgatgtaacgcatcaaatagtgtcaggatgcgagggagcgaaaatgcctcgtgcagattgggggcatatcggttcaattgaagttgtatacccagatcagcctgagcaagcgaaaatactaacctccctcgaccgcgaaaccgcccgcattgatgcgcttatcgagaagaaaacccgctttatcgagctactgaatgaaaagcgccaggcgctgattacccatgctgtcaccaaggggctagaccccaacgtgaagatgaaggattccggcattgagtggattgggcaggtgcctgagcattggaaggtagcgagagtcaagcgactggcgtcattgcgcaatgaacgacgaaatgatgtatctactgataccatttatatcggacttgaggatgtagaagcaggatcagggcagtacaagccaacgaatggaagctcccgtcaatcagaagattcaactgtaggcatcttttatgaaggggatgtcctgtacggtaagctgcgtccatatttgcgaaaagccattatttcagagatggcagggtgctgctcaacagaatttttggttctgagggctgaaaaaacagaacccagatggctgcaagaatggcttttaactcctgatgtaacgcatcaaatagtgtcaggatgcgagggagcgaaaatgcctcgtgcagattgggggcatatcggttcaattgaagttgtatacccagatcagcctgagcaagcgaaaatactaacctccctcgaccgcgaaaccgcccgcattgatgctctgattagcaaggcggaacaaagtatcaccctgctcaaagaacgccgcgccgcctttatcaccgccgctgtcaccggccagattgatttgcgaggaaaacaataa

SEQ ID NO: 193790 - DNA, 684 bp, Klebsiella oxytoca
atgaaactgacgaaaagtagtccactgactgaccgggaaatcgactggctggaagaggcgttgctgaaatacggcaatgatgactctgtgctctgtttctctgagctggatggcttcctgacggcggttgtctctggcccgaatatgatcccccctaatacctggctcagtgctatctgggggcgaggtgattaccaccctcgctggaccactgaaaaagagatgacgcgttttgtggggctgtgttttcagcatatgaacgatatcgctggttgcctttatgacgcccctgaactgtttgagccgattttcaatgagcgtgaggtaaagggggaaaaatataccattgtggaagagtggtgttttggttatatgaaaggaaagtcactggatgactggtctggtcttcccggtgagttacggccttctctggaagtgatcgctcttcatggcgtggagaagaattttcctgtacttgagaaaatgaccggagagcagtttgagaaaagtatttcccttattcagcctgctgcactggcactttatcagtactggttgtcagtgagaatgtcagaggcatcatcccggcctgttccagtgaagggggcagaaaacatgcccgggcgaaatgacccgtgtccgtgtggcagcggtaaaaaatttaagaagtgctgtctgcattga

SEQ ID NO: 193791 - DNA, 1251 bp, Klebsiella oxytoca
atggctcgtgattcgctttacccagtgagcgttaaagctggaaaaccgatccttggaatgctacctacaggatggcaaaagttatcattagaaaagtgcttaaatatagaggcaagaaaggcatatatacaagataatcaagagtatgacttagttacagtaaagcgctccagaggtggcgtaataagacgtgagcatcttaaaggaaaagatatctccgtaaaaagtcaattctatattaaagaaggcgactttctcatatcaaaacgacaaattgtgcacggtgcttgcggtcttgtacctaaagaactttctggctcaattgtatcgaatgaatattgtgtgcttacagggaagtccggtttttatcttccttatatggaatttctatcggagtctctatatttccagcaaacctgcttccactctagcattggtgtgcacatagagaaaatgatttttaagttagatagttggtttaagtggccatttaatatccccccactgtctgaacaaaagagaatcgttaaaatcctgtcaacctgggataaggcgatttcggtgacggaaaagctgctcgccaatagtcagcagcagaaaaaagccctgatgcagcaattagttaccgggaagaaacgcttgctggatgagaatggggtgaggtttagtggggagtggtgtacgtgcactttgtctgaagtagcacatattattatgggatcatcacctaaatccgaagcctacaacgataatggcttaggtttgccattaatacagggtaatgccgatataaagtgccgagtttcatgtcccagagtttatacgtctgacattacgaaagaatgtactcctggagatattcttctaagtgtcagggcacctgtaggtactgttgcactttctcaacataaagcatgtatagggcgtggtatatcggctataaaatccaagagaaaaatgagtcaatcatttctttatcaatggtttctttggtttgaaccaaaatggtgttacctatcacaaggtagcacatttgaatcaattaatagtgatgatataaagacattaaaattatcagtgcccaattttgaagaacaacaaaaaattgccgccgttctgtccgcagccgacgttgaaatctccacgctggagaaaaaactcgcctgcctgaaagacgagaaaaaagccctgatgcagcagttactgaccggcaaacgtcgtgttaaggtcgatgaggcggttgccgcatga

SEQ ID NO: 193792 - DNA, 309 bp, Klebsiella oxytoca
atgcgcagccacttattatttcttttactgactttgtccataggatcgcaagcctgggcctccccggaatctacccagctagccctcacgctaaagcaactcgacggcgtaaaaaccttactggaacgcgcccggagcagcgccagtaccgctccacaatcgcgctacttcttcgactacttacaggcgcagcaggacatctccgccgttgaacagggcatccgccgctaccttagcccggcaagggcgcagccgcgtgtcgtccagcccctaagcgccagctaccaacgggagaaccccgatgactga

SEQ ID NO: 193793 - DNA, 1707 bp, Klebsiella oxytoca
atgaagcccacccttgagctttttcgcagccagaatactaaggctgtggcattgctggacaagctacgagctttccttgaacaaggaatcgcacttggcgtgaatattgacccttccctattggccaagctcgaaaacgtgagtgagcgccttgtgggcgaaaaactgaagattgcactgattggggggttttctgaaggtaaaacatcgattgccgcagcctggatggaacgcttagacaagacaagcatgcgcatcagccagcaggaatcttctaacgaagtgaaagtgtacgaggtggatgatgatttcgtgctgatcgatacaccggggttattcggcttcagagagcaattcaacgcagacttacaggagatggaaaagtacaaggacatcacccggaaatacgtcagcgaagctcacctagtgttgtacgtgatgaactcaactaacccaattaaggacagccacaaggaagacctccactggctgttccgaacactgaatctgttaccgcgtactgtcttcgtactcagtcgctttgatgaagtcgcggatgtagaagacgagagtagctatgcgcaaaatatgcagattaagcggagcaacgttgaaaatcgtttgcgtgaagcaatcggcgcgagtgatgccgaggtggcagcactcagtattgtagccgtttccgccaacccatttgatatggggactgattattggctggaacgcattgaacaattcaaggcactctcacacattgccacactgcaacaggctacagctcataagatccaatccagcggcggccctgaggcaattgccgagcaggcatgcaaaagcgtagtgcttgacgtactgcataaggaattgcccgtagcagtagaaaatgaccaccgtcttgggaaggaaatagagcgtttgaccactgtgaataaccacctatcccaacaacttgatggtgctaaccagcagatcagtgaggcgcgcatcggccttcgtgattttattgcgcggtatttttccggactcatcctgcgaacccagggcctcagtctagaaacattcaccgagttctatgaagacgaaatcggaaaagatggtgtgatggtaaccacccgccttcagaacgaattcgaccgccaactcagtggcgtcagtcaggaattgaaccggatgcgtttgagcttcgatgcagaaattgagcacttcaacagtacggtagttaattttggtaaacaaggcataagctacgttattaaaggcaacttcatcaacaacggtaatgttctcgcggcacgtaacggagttgtcaccgcggcgaaagcgctggggctggatttgagtcaagcgcttaaattcaaaccttggggagctgtgaatctggctaaaaatatcaatggtatactcgcggtcgcaggagtggttctggaaatttatgattcatacaaacgccacgaacgagaagaaatcttccgctcaaccatcaaagacatcatcgctaacttcaattcgcagcgcgaagaattgctggcgatgattaacagtgactcgttccaagtcagctttttccctgactacacggctctaaaaactaatgccgatgacgttcagagcgcgatcaatgcccaaaaacttctgcggacacagttccagatgtggcgtgagaaaggggagttaatcgaagctgagttcactcacgtcgagaattaa

SEQ ID NO: 193794 - DNA, 2190 bp, Klebsiella oxytoca
atgacctcagatgaagcgttgcctgaaaggctgtatcacaggctgttacaacacgtcagtaccttattcgattccttggcacacaatagcgaagacccaatgctggcgagtgctcaagagcaagctcgcatgaaactgaatgccatcaaagctgctataaatcatgccatcgacgaactgcgccataatgcggaacacaaaacgtttacgattgctttctacggtgaaaccaacgcaggtaaatccaccctcatcgaaactttacgcatcttgttcaaagaaagcagcaagcaagcgcagcgtgagcagttcatagcattacagcagcaatctggactcagcgaggagactttgcaagctctggaagctgaaatttcagcatgtcgcgagcagcacggacgggtacagcttgatatcgatcaaacgatcgaacgccatgacaagtggcagcaagatcatttgttgcaagaggcctcactcgttacacggatcgcacaaatcaaagctgacgcgaactttctccagcgtcttttcaactttctgcgcaaactccccgaagaaaaagccttgctgcaactacaaacctgtacagcgaacttgtcagctcaacgtgacacagatctccggccactttatcaattaagcgaaacaattgaggcccagttggccacggagagtctgaggcataccactatactgaacaatctgtacttactggcagcttatgaagacggcagcatcattggtgacggacgttctgatttcacccggcaaacacaagaatacgaattcgaacagaatgggcaggctttcaagttgcttgatgttccaggtatcgagggcgatgagagcaaggtctgcgagcaggttaacattgccgttaaacgagctcacgcagtgttctatgtcactgccaaggcgactcctccgcaaaccggagatggcagcagacccggcacactggaaaaaataaaagcacagctcggcgatcagactgaagtctggacagtttacaacaagcgcgtgactaatcccctagcgctgcaaaaacccgcactggtcagtactgatgagcgagctgcattgggtgacctggaccgcatcatgtccgaacaactgggcgaccactaccggcgcagcattaccctctgtgctttgccagccttttacgccactgctacctgcttggttccacgctcgaccgccgccaccagccgcaataaattccttgatgccttcgacccagatacacttatggacaaaactggggtcgggcaattctctgaactcctgacccaacaattggtcaccaacgtacaagaaaagatccgccattcaaatttaaacaaagtgaaaaaggtgcttattaacgtttgtgccggaatcaagactctgcagaccgatatcttcgcgccacttgcagctcagttggatgacgaggctcaaactgctcaacatcagtttgacatggcatttaaatcactaaaagcgcgcctacgtgccactggcgaggagtccatttctattttcgaagaggccgtacgcactcaaatctatggccatatcaaacgcgacattaataacgaccagttcaaggaagcactcgagcagttgctgaaagaagaaaattcaaatcttcagcaccagcttcctaaagtgcttgataaacagatcacgcgctttcagtcggatgtcagcgacatcatcaagcggtttgaggtccatgctcgggaactgatggaaggttactcacaggtaaccaagatccggataaccagcgagtttgagctgaagatcgatatcgacaatggcatcagcctgtgggggctgcttggaggtctagcggctgcaggtctgatgatctggaaccctgtagcttggccactgatggctctgagtgggttggggatatttattaaccttattaaagcggtctggggcttttttgatactgattacaagaaaagccagcaacgtaaagccgctgataccaaccttaaaaaagccagcgacgccattcgtaagacatttgccgacacgctggttcaggcactccctccacttcagaaaactctcgttcaaattgagcactcgcttaagcaacccgcagtgcaagctcgccatatcaaccaaacactcgatgtcgctcatcttggcctgaagaaaatggcctgcgaccttactgactaa

SEQ ID NO: 193795 - DNA, 633 bp, Klebsiella oxytoca
atgagtgagcagcgaccacctccatcacgcccgtcacagggaccgattggctggttgctgtcattgctcggtctgattatcggactagttattggtgcgctggtgctacgagtgatgttggaactggtggggctctatttctggtggccgcaggagggaagcaggcacgcttttcaggtgatgaagcaggagcaggctgaactggttattgcgttacagccacatccactgaaggatgaaattgtcatgctgctggagaacggggcaactcgcgtgcttatgcccaactggcttctgaagaaaccgttcaccggcctggcctatacgctggtgagttttatgcagcgcctgatatggcttgccgccatgctccccctgctctgcctgtgtgttttaatcgggctgacagaaggtctgatgcggcgggatctgaggcggtttggctccgggctggaatccgtttttctccaccgttatgtcatcaggtccggcagttcagtcgccaccacgctgtgggtgttttatctggcacagccgctgtttctgcctgcaatactggttttactgcctgccgccttctggtttggggtaacggtatggatggcggcggggagttttaaacgttggttatga

SEQ ID NO: 193796 - DNA, 1116 bp, Klebsiella oxytoca
atgagcgtcggtattgttacatttttcaagtatacacagcttggtttttatcgttatggtaatgatgattattgcgagccacttgaaatggatacccttctttcatccctccatgtgtggtttcaggatagaatttcactagaagacacacttctttgggatgacgaaactcctggctattctcatcgtaaaaaggtttatcttaaagcaatcgaaaaagatgaagaaacgggtgaatatatccttgttctttggagagccgtaggaagtggtgatggtgtttatggaataaaagctgatgcacggctcgatgacaacactttatatgatgctaataatgcagccgctggagatcgagtcatttggggtgaagcatcctattattggtttattccatctaaaaatttgtttgcatcaatccgattctctaattcaattgcagataccaatctaatgaatttatttttcagggattttgtctgcttacacgctgattttagagaaaaacgccgagaaattaaagaagggagcacaggttcttacacaaaaataacgttccctgcgcagcaagctggtgaaactggaaatctgtggtttcgtatcagctcaaagcaatacacaaaactcacaacacgagctgatctaggagctatcgcccgtgacataactcattttgttaagcgtgaagtgattgcagcaagagatgtaaatcaatccgattggacaaggtttttcggaaggctcccttttgtctctgctgaggttacaaaagatactcgtaaagttgaggtgaatattgaagctaaaccaacggcagaagaattgcagcaaattttcgaacaatatgccgaggattacaacggtggtttagatggttggcgtaaccttgggtttagaaaagagggagtgggtggtatttgttggttgaatagttttgtggtaaaaaatgttctgccgattgatgatacaacaggcggtggtgtggacgaaacgggccattatacagcgcagcgccttttcacagccctacaatttaaacgcgatggtttgcttgcaccatttggcgttggcgcggaggaagccactgccccccaagctattcaggaattaccatga

SEQ ID NO: 193797 - DNA, 528 bp, Klebsiella oxytoca
atgaataaatctaaagttattgtttggcatatactggtagttttggttgtaacttatttaagctacagctttaggctagatatagattttaaagatgttgaacctataatttctatcttgcaaaatacatcagcaatgatttttacaataatggggatctggattgcttatgtttatccgaacgctgtattaaaaattgttcaaccctcaaaggtgacagtgatattttctgacgatgacttaaagagagttaagttgctggtgggggtagttatttcctcagcattaattttgttattgttattggttggggttgtagtaaaaacgtttgtgataaagacttatctatttatgcagtaccaatcagcatttacagttattggtttatggtttttactctctttaatttatgcacaattattttgcatatatgcggtaatagcatctagcgtaaatttcattatcgatttaaaaaaccttaacactaaaaaacggctatcagaaaaactcgatggcaaaattaaataa

SEQ ID NO: 193798 - DNA, 984 bp, Klebsiella oxytoca
atgaccactctcgtgttttcctattcccatgcagatgaagcactacgcaatgagcttgaaaagcatctttctccgctgaagcgaaccgggaagatcacgacatggcacgatcgccgcatcgtccctggccaagagtttgaacgtcagattgaccactatttttcgcaagcagatatcatcctgctcctcatcagcagtgactttatcgcttctgattactgctatcaggtagagatgaaaaacgcactggaacggcataaccggggcgaggcggtggtcattccggtaattttaagagactgtgcctggcatcagttagaattcggcagcattatggcggcgactatcgacggtaaacccatcactaagtttaccagtcacgatgaaggctacgttcaggtcgtcgaggccgtctcgcgtgccattgcccagatggaagcaaaaaaaccacagcaaaccacacatatctcttcaccggctccggcgaatccgatgtttcagggagtagattccgtttttacaccgcgttcaagcaacctttctctacccaagaattttaccgatctggataaagatcgcgccagacgtgagggctttgaatatgttgcccactattttgagaattcgttagatgaactcaaaaagcgccagcccggattagacatcgattttaatcggcttgatacagattcattcacctgtgctgtgtatatcaatggcagtaaggtcggccaatgtggcatctggcgtggaaatcaacaccatggaatgggggatatttgttacagccaagataatgttgttcgaaacagtattaacgaaagtctgagccttgctgataacggccagactcttggttttcgtgctctgatgggaggcttcagtcgcggcacctcacgagacgaactattgacgaatgaagggatgtcggaacatctctgggaaatgttcttcgggataatcaagcaaagaatgtcccgataa

SEQ ID NO: 193799 - DNA, 1500 bp, Klebsiella oxytoca
atgacactgattaacctaaaagatctcgaggcccatctttggcatgcagcccatattatcactgggcctattgatgcgtcagattacaaaacgtacattttccccatcctgttcttcaagcgcatttgtgatgtttatgacgaagaatttgccgatgcgatggagagcgttggggatgtagagcttgccaaggggaagatgtttcaccgtattcagatacctgaaaattgccactggcgcgatgttttcgctgagaccaaagacatcggtcaggccttaaaagactccttccgtggtatagaactggcaaaccctaaactgcatggcatttttggcgatgccagctggaccaataaagaacgcctttcagatgagttactggctacgttacttaatcacttcaataaggtgaaccttggcgtttctaatgtccgtgacgatgatatggggcgcgcatacgagtatctgatcaaacgctttgctgacaaagccaataagaaagccggtgagttctataccccacgtactatcgttcgtctgatggttaacattcttgagccaaaagccggtgagagtgtctacgatcccgcctgtggtactggtggtatgctgcttgagactatccaccatgtaaaagaaagcggtggcgatccgcgcttgctaaaaatcaaaggtcaggaaaagaacctgacgacggaagctattgcgcgtatgaacttgttcctgcatgggcaggaagatttcgatatcattcgcggggatacgttacgcgaacctaagtttttacaaagcgatcgtttagaaactttcgactgtgttgttgccaacccaccatttagcttgaaggaatggggatacgatctgtggtcgaacgatccctatggccgtaagcaatatggtctggcgcccaaaacaaatggtgattttgcctgggtgcagcatatgtttgcctcacttaacgacaatgggcgcatggctgttgtattacctcatggtgtgctatttcgtggcggagctgagggggaaattcgaaccaaattgctgaaagaaaatcgcatcgtggcgattattggtgtcgcttccaacctgttctacggcactggtattcctgcgtgtattttggtgctgcgcaaatcacgcccggcagagcataaagatcatgttttgatcatcaatgctgaagaaatctataccaagggacgtgcgcagaatacgctgtccaacggacaggccgatgacatataccaaatctatcatgatcaggagcaacaggggccagccgcaaaagaaattgaaggcgttgcgcgctgggtacctttgaacgagattgaagaaaatgacttcaatcttaatattgctcgttatgtgcaaaagccactcgaagaagaaaccaccacagtggaagaggtgctcaaagattttcaacggaagctggctgagctggaaaaagcggaggaggagctggaaaccctgcttatcaaagaagggttcgaggtatga

SEQ ID NO: 193800 - DNA, 1485 bp, Klebsiella oxytoca
atgagtaataaaaagttggaagatctactttggggagctgctgagtttcttcgtgggcaaattgatgcatcagactacaagcagtatgtttttcccttactgttttacaaacgcctgtcggatgtttatctggaagaatataccgaagcgctggaactccatgaaggcgatgccgaatatgccgccatgccgatgtttcaccgtttcaacattccctctgaggctgcttgggaaaaagtccgcaataccagtaaaaacattggcgaagcgatccagaatgcgcttcgactaattgaagccaataacccgcgtttacatggcgtcttcggtgatgcgcagtggaccaataaagagcgcctgcccgatcatctgctggcagatctgattgaacatttcagtaaaattccactaggcattaaatctgttgctcaggatgatctcggtgaagcctacgaatacctgattaaaaaatttgctgatgattcaggccatacggctgcagagttttacactaaccgaactgtcgtgcatttaatgacgcgcattatgggcttaaaaccgggtgaaactgcctatgatccaacgtgcggcactggagggatgttgctaaatgcagtgatggatcttcgttcaagaggggaggagtggcgctctgtgcatctttatggccaggaagtaaacctgctgacttccgcaatcgcccgtatgaatatgttcttgcacgatattgaagaatttgatgtgctgcgcggtgatactctggctgaacctaagtttattgaaaatgatcggctcaagcagtttgatgtaatttttgccaaccctccatattctataaaaaaatggaaccgtgacaaatttgccgctgatccttatggacgtaatctctatggcgtaccgccgcagggttgcgctgattatgcgttttacacccatattatcaaaagcctgaagccagataccggtcgtgcagccatgctctggccgcacggtgttctattccgcgattctgagcaagccattcgtaaacaggtgattgaatccgacatcatcgaagctgtgattggtttgggaccaaatctgttttataactctccgatggaatcttgcgtggtggtccttaactgtaataaaccgcacgagcggaaaaataaagtgttgtttattaacggagtaaaatatgttacccgtgaacgtgcacatagtcgattgtccgatgaggatttggctataatatacgaagcctactttagctctgaaaatataaataacatttcggcattagtggatatcgaggttattaaagaaaacttctataacctttcaatccctctttatgtgcagaatcaaaataacagtgaaacgtatgatatttcacatgctattgaatcttggaaaatcaaccgagtgctactcaaaaaaaatactaaaagtttacttgggaaattatcccagttgggttatgaggtgaaaaataatgcctga

SEQ ID NO: 193801 - DNA, 1188 bp, Klebsiella oxytoca
atgcctgataaaataactgtaaaacttagtgacatttgtcgtgagtttaaactatcaagcaaagatcccattgctgatggttacaaccgatatgttggattggagcacttagattcagggtccttgaagattaggcgttggggaatgctcgaagaagaaagcccaacttttacgcgagtcttcaaaaaaggtcatattctatttggaaaacgtcgtccttacttaaaaaaggctgctatagcagaatttgatggggtttgttctagtgacatcattgttatagagtctaaaccaaacactatcgtttcatctgaattattaccttatataattcagtctgaacctatgtggaattgggctgtacttcattcagctggatctttatcgcccagaacaaatttctcttcaattacaaaactaagcatttctttaccatcaaatcctcaggatggttgcctacctgttttgcgtgcagctgaaagggcgatttatagaactgaaaatgtactaacgcagttaaagcaatcaaaaattaaaacagcatattctctaatgttggctggaaataactatcaacagctatttggtagagaaaaaactaaggttcctagtgggtggaagcttattactattggcgatgtgcttactgatacacaatatggattatctgattcgctggagtcttgtggtcgttatccagtgcttaggatgatgaatattaccaatggttatgttgatccgaatgatctgaaatatttagactggaaaccagatgatgcggaaaaatatattttgagaaaaggcgatattgtattcaacagaacaaatagcatggaatgggttggaaggactgggatttttgagcttgatggtgactatttatttgcatcatatttaattcgtttaattgcagatgagacgaagctaactccctattacttaacacaatacttgaatcttccaatcgttcaatatagattaaaagcttttgctacaccaggagttagtcaagccaatattaacccgggcagtttaaaaagcctgcctattttagttcctccgttgggtttcattcaggaaatagataaagtattacgagaatttgataaaaatcacaatattgccaaagagtatcatcaaaggatgaacaaacttgtcgatactattaagtcaacatatttcgaatag

SEQ ID NO: 193802 - DNA, 3063 bp, Klebsiella oxytoca
atgtttaacgaacaaaccgtcacagaaaatggaattatcgaccgcttgaaaggattaagtggggtcaaatggacttactgccatggtgagaacctgcctaagcaaacgcaggatatctttgttgatgagtggctaaaagacgcgctttgttcgttaaaccctgatatcggcagacaacctgactatgccgatgaggtcatctacaaattgcggggagtggtcttagaagcccgccataccggtttggtaaaggccaatgaaaacttccaggaatggttgatggccgacaaaaccttgccttttggcgagaatggcgaccatatcaccatcaatctgattgattttgacaatatagaaaataaccactttgtggtggcacagcaggtccactatatcgcggccactgaagtctattttgatattgtcctttatgtgaacggtataccactggtggtgggcgaagttaaaactgcaacgcgccctagcgtgacctggcaagacggtgccgccgacttcatgggtggcaaaaagtactattggaaaaatgttgaatctttctttgtccctaacttgctgtgttttgccagcgaaggtaaaacctttgcctatggtgccatcaatgcccgagttaaagactgggggccctggcataatactgagcttcgtgatgagattctgccgggattggcatcggtactcaacagctgcgagagtttgttaaatccacagaccttattgcagctactggaatcttttgcattattttcaaccgtcaaaatgggcaaaaatactccacctaaacgcgttaaaatcctgccgcgttatccgcaatttgaagcagcaaaacaaatcgttgagcgtgttcgtagaggctatccaaaaaaaggtctgatttggcatttccagggatcgggcaaatccttgctgatgctttacgctgctaaaatgctgcgtgccgataatgcgttaaaaaacccgacggtacttatcgttgtggaccggcgagatctggatagccaaattaacgagacctttggtggagccgacgttaagaatcttattaaagtgcaaagctgcaaaaagttgggcgaatacattgagcaagacagccgtggcattttgatcaccaccatctttaaatttaaagatatcgaaattgacgatagcaaccccaatggcctgaacaaccgtgacaacatcattgtgttggttgacgaagcccaccgtacccaggaaggtgggttaggcgagaaaatgcgctgggcattgcccaatgcccacttctatggcctgactggcacaccgatttctggcattgatcgtaatacattcaagttgttcggtgccgaagaagatcctggtcgctatatgagtcgctatagctataagcagtcgatccgtgacggtgcgactaacccggtgaagttcgaacctcggctggctgaactccgagtggatcgtgatgctatcaacgaagagttcgagcaactggctaccgaaaacaatctggatgaagaagaaaaagcagcattgtccagacgcgccggcaagctggctattatgctgaaatcccccagacgtatggctgcggtgagtaatgatattgttgagcattttaccagccatgttatgccgaaaaagatgaaaggcatggttgtggtatacgatcgcgaagcctgtgtgcagatgtattatttgctcggtgaaaagcttggttttgatgcagttgaagtggttatgaacgttgaccaggctccggttaaagttgaagagggtggcaaaaaagataagctcaataaggactggctcaaatggcatgacgaattggagctacctattaaacaagccgatttcgaacgctggcagcacatcgatgcggaagagcaggtgcaaaaggatctgattgaatgttttaaagatccagtgcatccgttacaacttgtcatcgttaccgccaagctacttacgggctttgatgcaccaatttgctactgcatgtacctcgataagcctctacgagatcatactcttcttcaggccatgtgccgaactaaccggttgtacgaaaccgatgatgtgcgcaaggacatgggattgattatcgactaccttggagtcttcgagaatctgcgtaccgctctcgcttacaaccctgaagaaattgaaggggttgtagagggaattgaggcatttaaagagttattgccgttacaactgaataaatgtctttccttcttccatggtgtggatcgttctatagaaggttttgaaggcattatggctgcgcaggaatgcctgccaaccaacgagaaacgtgatgaattcgctgccagctttggtgtgttatccaagttatggtcagctatcaatccagacccttttttgacaccttatcgtcaagactataaatggctggcgcaaatttatgaatcggtgcgtccggtggggcagacaggtgcgcttatttgggctgctcttggccccgaaacaattaagatgatccatgagcataccgatattaatcgtattcgcgatgatattgacgagttgatcatggacgagcacgctatttttaccctgaccgctaaagaacaggaacaacgcgccaaacgcctggagattgatcttatggggcgtttgcgcggcagtcatgatcctaaatttgtggctttgggtgaacgcttggaaaaacttcgtcaggattatgaagctggtgttatcaaggctatcgactggttgaaaggtctattggatgctgcgaaagataccgtacaagccgagcgcgaaactggtgagcgcccagtaactgaagctgataataaacaggctttgaccaagcttttcttggaaacacgcccggaaactacccctaagttaatcggtgacgttgttgagcaaatcgataagatcgtcaaagcaacccgctttgatggctggcaaaactccaatagcggcccgcgcgaaatccaaaaggcgcttttgctaactctggctcaatttggcttgggtaaagataaagaattgtttcggaaggcatacgggtatatcgaggagcattactga

SEQ ID NO: 193803 - DNA, 162 bp, Klebsiella oxytoca
atgagccaccaagaagactacgctcgtgggtacagcgatggctacaaatcagtacaaggaaacgtcattcctccaatcgcgccaattggcccaatgaccccattaggctcagatccctatgaagaaggatacaaagccggagttgaggccgctggcggttag

SEQ ID NO: 193804 - DNA, 918 bp, Klebsiella oxytoca
ttggattttcgtttcgcattctggaattgcgcgatgtcaccaccaggtcgaaaggaaatgcaatcgccagctaatatggctgatgcggttgagataatcgccgatctgtttacgaagcacgagatattttttttagcgctatgtgaggttaacaaaacgtcatttgaatacatttcaaatgcacttactggctttggattatctctttcagcacaatttatgccggataagacctcaactggaagtgaatttgacattggttatttctatgattcgactcgcgttgccgtccagcatggactcgcacatgccggtagcctaggtacgtcttctgtaaaaattgctcaacagttgtttatggttgtcaacgaagagtgccccactgtcataaacgttctcgtctcacattggtctggtcaactacttaagatcgcagaagattttagggaggagtgttcgaaaggcttacgccattttgtagagagtctaattaaagataatcaacaggttatactgatgggggattataacgacgaaccatactcccatagtttatttaagaatatccgcgccacgaacgaccgagctttagtgctttcaaatcccgatttttggctctacaacccctattggaaaaccctagcagccagaatgccatttacatttaatgagcaacagcatgacttcggtacctgttacagtaagtcaggaaatcgtaaccattggtctacatttgatcaaattattttctcaggtcatttcctaaattctggcccatggtatctgcaagaatcagccaccggtatcgttttgactgataaactacgcgctgccataatggacggtaaacattgttttgaccacataccagtgatcggatgcattagtaaaagagaggctaaaaatgtttcaatttaa

SEQ ID NO: 193805 - DNA, 474 bp, Klebsiella oxytoca
atgtttcaatttaaagagcttattcaaacaggcatggagtccgcaagcaatgttgagcagaatcgtaaaagcgttgatgatgttttttcctcattgaatgatgaattaaagaaagagacccaggggcttatcaccattgaacgttataataaacaaaaaaacgtgttagtggatataataaatacctacactatggtaactcaagggtctgagccggtattggagattaataaaacccctgactccggaacattaaaaatagtattaaaaaatggtttgaatgcctccgtagcccgttgggagcaacatcaagacggctatccttttaccattgaattcttgggtgagcgtaccgactgctgggatcaagaggctttggttaatgcgttaggaaaaattgtggtatctgggcaattatggttaaaggtaaaagaactgagctctcaaactccaccggagccagaattgagttaa

SEQ ID NO: 193806 - DNA, 585 bp, Klebsiella oxytoca
atgttaatgtcagtaagccagtacgccgagcacagcggcatgagtcgccggtcattttacaactgggaaagtaagcagggattcccggcgcgggttgacgggaagattgaccaggaggcctgcgacgcctatctggcacgttaccgtgacatccatgatccacgcgctcagaacgcgaaaagcaaagcggtggtatccggtgtccgcactgttgcgggtagcgctctggtagagatgagtgttgcagagatcaagcgcatactggcatctggtgccgacaaggtggcagggatggatccggacgaacgcgctcaagtggctgcaaaggccgtggagctgtttgtaagcgaaggcccctataacccgccagtgacatttggcagctaccggctgtcgattgttgaaacgccagatgatgaaatcgggcagatcatcgccggtggcgcgtttggcctgtctgctgatgatgtggtttacgagtgccgggattacaccctgactctcatgagtgatgaaaccgaagaaacagccatgcggagggttatcccttcgttactgtacgccctggccgacgataccgactaa

SEQ ID NO: 193807 - DNA, 522 bp, Klebsiella oxytoca
atgattaactttcagcatctcactccgccgcagcacgatgcgcaggcatatggcttttccgggcgccgtatgcagcgcacgcaccggcttcagcaatctgttgaagatgagcaatcccctgaatgccgccattctgatgcacatctgatcgctgtgagcagggaggcaaaacaaaacccgatactggcatttcatcttatcgccgatgggctcccacaccagcgggccatcgccagattacaggtccgtgctcgccagcttagtcagtttacccggcgagttatggagaacgtttaccctggctgggagctccttgatgccgaagaccagaacatggcggcattccagcacagcatgattaacggcgacaccaacggctatcgggctggttttaacgctgctctgtcggcgctggagaagtttgtagagccagttacgtttgacgatatcgctgattcgctcatagaaaaagggaggcaaggacatgggaatgctggccgacatcaacctcttcggaggtga

SEQ ID NO: 193808 - DNA, 777 bp, Klebsiella oxytoca
atgccgttaatgaaattacccacatgggcgctaacagcgttcggtacgaaaggtaagaaaaaacagccccaactatctgaggaaaacccatccatgttcgatttctcgcatctgtcaggaaaaaccaaaacgaaaggcgagtccgataacgggaatgcgccgctgaaactggacaatgacgacacccagatcacccgacctaagcagcacagtcgcggccacaatgtcgcggtatcgactgaagctaaagataacccggttctggcggttcgtttgctgaaggagaccgagctttcttcgaagaaaattaagctgaaactggcatcgtcaccggcggccctttctgtctttaccatgaaatttatggaagagaacgatccaacctgggaatttcaggacgatgaagaaaaagcccgcacggcgctgatgttttcgacgcagaatcgcgacgcaaatggttatatcgctgccaaaaccagcgctctcaaagcattgaagaaaatggaagagcctctgacagaggatgaggtcaaggcattagccgacatagcatctaaaatgcaaaacgattacgacccgatgtcgcctgacaacgtgagagcccgccgtaaggctgatgaagagtatcgtgaggaagtcgcacaggcggccgcacgccgcaatgatcgtatccgggcatctggtgtgagcttgccgggagatactcgtcgcgttaatggcaagattgaaggaccaaacggcgaagtcgagctcctgaaatcacaggtccctctttga

SEQ ID NO: 193809 - DNA, 177 bp, Klebsiella oxytoca
atggcagtaaccagcaaaaagccgattcttgtcgatcagccgattctcgaaggcttacagcgccttcgggatgatgaatgccgacgttctaccgtaggcgcagcgccaagcattcaggagctggcgcgtcaccttttgcgccagggcatccaccggcatgaggcgggcaagaagtaa

SEQ ID NO: 193810 - DNA, 240 bp, Klebsiella oxytoca
gtgataactgatgtttttcccgcctggaacaccatccctgaaaataatatttttataaaaaagtttttatatattttcaaaaacatcatatatatcaatttattgccactccatttgaaatattcaacatatcttaatcactgctatcagttgctactggtagcaactgatagcagtgcagttgacatcaatgacgatggatatgtattatttcgctggtgctgccattactatttttaa

SEQ ID NO: 193811 - DNA, 183 bp, Klebsiella oxytoca
atgagttcaccggaacgttacgaaaaatcaggctgtgcaggacaagtatggccgaaatatttgacaaaggtcataagagttttttctgccaaccgcgacggctctaatggcccgctctgcggcattattgtgtgtgccttgcaaggcacgatctttccgtcggtgaaagtccgacccggctaa

SEQ ID NO: 193812 - DNA, 2100 bp, Klebsiella oxytoca
atgcttaagaggggaagcaatgttcttattagaaaaccaaatgagttattttcaaaagaaaaaaaattagatatcagcgatgatggttatagcgagttcattgaaaaatatgacattcaaaagcttgataatataaaaagcataatgtttggcttggatttgaaaagtttcgttgattttctttattctgagcttgctaaaataactacaaacgaatatccaaatgtttttacaaatactccactattgaaaaagaaaacgttagaacctttcactaacgaactctacaatgctcgtagttttatttttgaagaccataatggtgtaattaatatacaaaacgcaacaaaaaataaatttattgagttaatgttcaaaaaatacgctgaggcgactagtgatgaatcattacaattgtttgataaatatatatcaaagttgccaaatgaaattgacattgaaacttttctaaaatatttatctcgacaattcaatgaattgaatgagatggatgatgttaactctattgctataatggatctttctgttgcatcttcactgtattgttgccttgaggaaaggaacgaatcattcattagctacaataaatttgttgattactatattccaagtgatagttataatcatgaattacatgttttttctgttaatacctcaatgcaaattagtgattcaagccctgataacttagtgaactcaatcttacgatcaatagttttgacaaaaaaagaagcctttccatttttaattataaatattgaagacggactaaatgaatatataagatgtatatcaagaataatatcaaaagaggaaaactcttgtccagtagatatttcatcgttcaaaaaatgccaagttaaattgaatcaaattagacaatccgtacatcttggaaattcaagtaagtttctttatggagatgtaagaatagtaaactacataaccggtactattgatatactatccattgataatactcactatattagtactgccacgcatacgtataatagtcagtataatggagttctttaccttgttgccatccctagttctatatctaaagcatttgaatatattgaagggaaatataatagtcttactccaaataactctacttcatatcttccttatcaaatttgtagcgctgacatcgtcagtcttgataggtttgataatgctgtaaatgtaattcatatacacaaatccattcaatataatgaagctagagagttgttaattagatggttgtcaatttttccagaaaggtttcgtggaatatttgtactaattattgccgctcatcaattaatgacgcctacagaagttgagtcattttgcaattctgttcttgaactgattaagagtagtcagaatgtgatgatgataaaaaaaacagaggattataatggtactataaggtgtttccatacaaatgatgagttaagtcgaatcctttcatatcttgatccaagtttcgtcgataatgaacgaagtgatagtatgacaattgttacggatgtgataatcagtgggtcacaaatatgtaaagcactaaaatattatataacgggggagggagagtcttctgcttatttcgatttgcgagatagtgatggcttgtccataagcgacaagcttaaaaaaataaaaaacatttcactaagttgcattttatatacagaggatgccatttctaaaattgaagaaacactaaatgaattaatcccaggactaggttctgtagatgtttcccatggtagaaaaattaatgggaatgctttttttggaacgacggtagagatagggaataaggataaggaaaaaatattaggtatcctgagcgatgaggaacagtgtaaaataatttatagttttttaaaacttcaacctatgagtggaaaagaatttcgcaatcgctatgttatgtcaaatgataaaataagtaatatcaatcttgtggctcgttataaatcgttacctaagaaatgtttccaatttttatattatggtgttaaaactaataatgatctccatccaatggatcgtgtgcttgagcagaatgatatgagataa

SEQ ID NO: 193813 - DNA, 1917 bp, Klebsiella oxytoca
atgaacaaactttcgcctgaaatgcccgaactgcaatcaatgaatatcactgctgataacatcaccaagcttaaatcattgtttcctgaagcttttaatgaaggcagtgttgattttgaggttttaaagcagcttttgggtgagaatgtagacgacaaagaagaacgctatggcctgaactggcatggtaagcgtcaggctcgtcagcttgcgcttaccccttctcgtggcaccttacgcccatgtaaagatgaaagtgttgattgggataacaccaaaaatctcatgatcgaaggtgataaccttgaagtgttaaaacttcttcaaaaaagttatgtaaatagagtaaagctaatatttattgaccctccgtataatacaggaaaagattttgtttatcctgataactttcaagataatataaaaaattatcttgaaataacaggccaaacagaagaaggaatatacgtaggttcgaatgtagaaactagtggacgttatcatactgattggttgaacatgatgtatccacgccttattttagcaaaaaacttattgactcaagatggagttatttttctatcgatagatggaacagaggtttcgaatctagaacacttgttaaataatgtattcggagaagaaaacaaaatcacttctatctgttggcaaaaaaaagtgtctcctgcaaatgatgctaaatggttcagttcggatcatgatttcatcttggtttatgcgaagaataaagatatttggagacccaaaaagcttaaacgtactggcgaacagctatcttattataagaaccctgatcatgatcctaaaggagaatggaattctgcaacatacacatgtaataaaagcatgcatgagaggccaaacctttattacccaatagtaaacccaaatactatggaagaggtatggcctaaagaaacagcagtatggaaatactcaaaagacataactgaaaaatatataaatgaaaaacgtttatattggggaattgatgggcttgcaaaattcccgcgtgtaaaattatatctttcagaaatggatgatgttgttccaagatccatctggaattatggcgatgtaggtcatactcaacaagcgacgaatgaaataaaggaactattttctggtgaacaagtatttgatacaccaaaaccactaaaattgttaagaagaatagttcaactatcatcaaataaaaacgatgatatcattttggatttttttgcgggttcaggaacaacagctcatgctatttttgaacaaaacaaggaagatggcatttctcgcaaaagtattatcgtgcaacttcctgaagttttattagaaagcaatcgtgaacagaaagccgcgtactctttttgtatgaaaaacaatctccagccaacaataagtgaacttactaaagagcgcctacgccgcgcgggtaaaaaggttcgtgaagacaatccagagtggaaaggtgatgttggttttcgtgttttcaaactcgatacatctaatatccgtccgtgggaagccacagcagaaaccctttcagaacagattgatgcctatgtaagcccaatccttgaaggccgtagtgaagaagatttgctcacagagttaatgctaaagcgtggcattgacttgagtgtaaacgttgaaacccgtcagtttgatgaattaactgtttcttgtgttgacggtggcaaattgtttacctgctttaccagtcaaatcccagcctcttgtgttgaggtactaaccaaggggatcatcgactggcataagagtttgaaggctggcaaagatactgtctgctattttcttgatgacgcatttgaaaataacgttgctaaaacaaatctttgcgccattctggaacaacacggcctgactaacctgcacagcctgtaa

SEQ ID NO: 193814 - DNA, 1542 bp, Klebsiella oxytoca
atgaaaatgtttggtataaaaaagggattttcactattggagctgatccttgctctaggcatcggcagtgcaatagctttaataaaattccaagatatgaaagttgaacaagaggatttagttgctaaaacagcaggggaacaaattaaacaattaggtgaggcagttaatggttatatcagtatgagatatgataagttatctacactgacatcaagcagtaatcaaagtagcgatccgggaccaagaacctgtaattctacaggctgtgaaattgattaccatactcttgttaatgaggggttactacctgcatcatataacgggaataacatatataagtctccctataaaattatacttaaacgtgaaggaaccgcacctaactatgttattaacggtttgattacaacatcatcagcatggatcgaaggcggacacatccgttatgatcttcttggtaaagcaatgcaagttgctggtgttgacagtggtatgacaaaggatgcgacctctgttgctggattccaaagccagtggaaggaacaaaacaccgcattcaacaatattacaagagatggattacttgccttcagagtcgggtataacagctcgttatatgctatctatcttcgtcgtgatggaacactacctatgaccggcaacctgaatatgggtggtaatagcatcactaatgtaaaagacattacagcggcaggggcagggagttttggtggtaatattacatcgaatggaaatataaatgcagcacatgaagttatcgcacataatggatatggggatacaattacattagggggtgatgcatcaggggaggattatgaaataagattaagtaatggggtaaggccattaagcatttattctcctaatgctgcgaattatacaacagtattacaagtgtggaaaaacgcaaaaatacagcaacgccttgcgactaatggtcttgatcctaatgaattgccttcaggctggagtggtggtctaagaactaatgatgtttatgctgccggaacagttggtgcaggctctggaggtgctgttaatgcttatttaaatagtagtggtaatatttatgcatcaaatgacattaatgtagggcatcaggtcaatactcaatatgtctgggcatcaggaaacttaaactcaaactatgttcattctaatggaaatattgatgctgatggtagacttaatgccggggagtttttatacataaatggaaaagcaaatgtagggtcgggttgctctccaaatggtttacaggcaactgcatcaaatggattactattatcatgtgttagtggtaaatgggttaaagcctctggaacttcaggattttttacaaaaaaccaaggttcttgcttggttaataacccggaaacaaatgcctgctcatgtcagtcaggaactatagcgaaagaattgttttatacaacatcaactgaacagttaggtggtggtagtcatggtggcggcacaacagtggttaaagatagaatattatatcaatgtagataa

SEQ ID NO: 193815 - DNA, 570 bp, Klebsiella oxytoca
atgaaaaaaacagtattaattaaaaacaaaaaaagtaaaaaaggtttctctcttttagaactattacttgttttgggtattatagcagccttagttgtagccgcttttatagtatatcctaaagtacaggcatcacagagagcacaggctgaaagtaataacatcgcaacgatacaggctggtgtgaaagcactcttcacttctgcctccagttttactggattaactaactctgttgctgttcaggcgaagatattcccggataatatgttaagtggttctggttcagccgctaagcccatcaatgctttcaaaggaaatgttacattggctgcggataaaactggtccgtcaggggcggatggttcttcatttaccatcacttatgaaaatgttccggcatctgaatgcacgaagatcatcacggcagcagcaggaaacttctatactgcaggtgttggcacagcaggtaatgttaaagctgcaggtggagttttaaatgtggcgtctactgctacagagtgtgataaaggtggaaacagtaataagttgattttcacgtccatataa

SEQ ID NO: 193816 - DNA, 324 bp, Klebsiella oxytoca; identical to SEQ ID NO: 168251

SEQ ID NO: 193817 - DNA, 597 bp, Klebsiella oxytoca
atggaaaaaaccagtgtcatttcgtcgttaaagcatccattcattaatgatgatattattattttttataagagggaatacatggggaaattgaaaacaaaaaatcttaaggaaagtgagtttataagatatatagaaactcatccagttttttcagagtctttatgtaagaagcatggggtttctgttgtatcactaggttattccctttatgtccatagtaatcatttttttctggagaatggttatgtgtcagatgatattcattatgacatggttaaaaataacttaatcatcatgaaaccaactcttaaacgattttataaaagaacaaggcaggtagattataatgattatactttcatatcggggattaaagagcatcaagactattgtatgttattaacgctttgttgctatcattggattgccgatgtgttcactgtctataatcataataaagggagtgatatagtcgttgacgttgccaatgagcttttacaaagaagcattgactacttttcaattgaacatcaaaacgtagttgaatgttttaatgagttaaaacataagttcccacattatagaaagcgataa

SEQ ID NO: 193818 - DNA, 1110 bp, Klebsiella oxytoca
atggtaaccctttcgcgactttttattcatcccgtcaaatcgatgcggggaatggggctcagccacgcttatgcagacagcagcgggctggccttcgatcgtatatttatggtgacggaaaccgacggcaccttcattaccgcccgtcagtttccgcaaatggtcaaatttattcccgcgccgctccatgatggtctgcatctgaccgcgccggacggcagcagcgcgatggtgcgcttcagcgatttctccatacagcaggagccgaccgaagtctggggcaaccattttaccgccctgattgccccggaccgggtgaaccagtggctaagcgggttcttcaaccgcagcgttcagctccgctggctggggccagcgcttagccgcagggtaaaacgtcacgatgccgtccccctctcttttgccgacggttttccctatctgctggccaatgaagcttcgctgcgcgatctgcaaaatcgctgtccggccagcgtaagcatagaacaatttcgcccaaatctgctggtgaccggcgcggccgcctgggaagaagatacgtggaaagtggtgcgcattggcgaggtcatttttgatgtcgtcaaaccgtgcagccgctgcgtattgactaccgtcagcccggagcgcgggcaaaagcatccttccggggagcccttaagcacgctgcagcgtttccgcacggcgctggacaacggcgatgtcgattttggccagaacctgatcgcgcgaaatagcggcgtaatccgcgtgggcgatgcgttagaagtgctggccagcggcccggcgaaggcctacggcgcaggcgagagtgatactacgccggctcctgaagcgcaggagaacgcgacggtggaaatagcgtggcagggagtgagttttaccggtaataatcagcaaatcttgctggagcagctggagcaacagggaattcgtattccttactcctgtcgggctgggatttgcggcagctgccgcatccggctggaagaaggagaagtcagcgcgctgaagaaaaacgcggtcgccgcagatggcaccattttatgctgtagctgcgtgccgaaaaccgcggtgaagctggcgccttaa

SEQ ID NO: 193819 - DNA, 816 bp, Klebsiella oxytoca
atggctaattcagttgtgacaaataaaaaagggaaaggaatttttaaacgagatgaatggattaaagagtcaaaaagtctttatctgtctgcaaagatgctacgtagtcaaggagatgagagtaaaaggaaattctctgatgctaataaaaatgataagtctatttatgaattgatagacatagcgactgcaacagataaaagcagtcgtcttttattaggttatgcttttgaattgctattaaaatcagcggttttacttatgaattatggcgctactgaaaatacaatctctcaaaaatttaagttttatagccatgatttgctatctatgattaaagatttagagctatctttatcagattatgatttaaatttattggatcttttgtctcaagacatagtacagcaagctaggtatccaataggaattataaaagatgagctttatttaaaaacgattaatgaaagaaatgctaacctagcaaataataatttgtttaatgagatggtttccttatacgataaaattaaggcaatggtggttaaattagataatgatgtggagaattgtgctcatttcaattcattaacttttaaagatctatcattttttatgagaggcggtggaggtttaaatgctcgttgcatcgtaatttattcctctgattaccctcaagagaaaaaaacaaagtcttatttaaaaagcattcttgaccgaaatccaaatgggatagtgcgtttgtatacagtttattgggatgaatacaacttttttgaagatacaggtaaaaaactaattccattgaaagattaa

SEQ ID NO: 193820 - DNA, 195 bp, Klebsiella oxytoca
atggtgatcaacatgaaacaccttgtgcttacgctggcgctattgcctgccctcgcccatgcagcgatcacattaactctgacagacgaacaggagacagacaacgcgaagatttgcgtttacagcaatgcgaattatacagagacagtgacgatcagaccgtccgaacactgcaaatacacacgcaccttttga

SEQ ID NO: 193821 - DNA, 177 bp, Klebsiella oxytoca
atgagcgaaacccaaaagaagaaatcagccggaacattcgtaaaattgcctgatgaggtgtttaccactttgtttaaagaggcgcgaatgagaggcataacagtgcaggagatgttaattgacgctgcaaccacactttcgttatcaatcaagagcggagaacgttctactaaataa

SEQ ID NO: 193822 - DNA, 810 bp, Klebsiella oxytoca
atgaccgacattataaacggagacatttacagatactttggtacagaagaagcattaatcgaagcaagccacattaccaaccttaaaacaggtgagcgcgtggaactctccaacgatgcaaaagtattatactcgcgtatgcgcaagcgttatctattctttaccacgtcaagcactggcgggaataaagggagctaccatgacaatgtagaagagttgaaagattgtgctaatctctcgaagagcacaacgctacgatgtttgaaggtgttaaaacaagttggtttagtggttgccacgctgtcaggccgatctaaccaatggactgtagccaacattacaccagattctttcttgcttgagcggaacgcagggacgtcaaaaaatcctgtctgggtggattgtctgaaacatcccgtgtttggcaacgccaaagaagacgtagcgccagaggtgcaacgcgaagaggcgaaagccgatccaatgtgcgacctttacgaagcaccagaagaagcgccaaccccggaaaaggtgaaggcaacacctaagcccaagaagaaacctgcgccaaagaaaaaaccagcgtcaccgcaagctatttccccattcgagtttaaaacgccacgagatgaaaaccgggattggtggtatttggaacgctacaacgatgcagatcagtttactggatttaatgactttgatttgccttatctggcaatgtttgagagtcaggggaagttaataaatcaacattcaatccagcaccttaaaatcaaacgcgaagcatacgaacgatcacaacaaacttag

SEQ ID NO: 193823 - DNA, 1863 bp, Klebsiella oxytoca
atgcttgagattaacacaagtaagattgttaacaccgttactttcaccgtagataaaagcagtattgcggaggctaaaaaagccgctgatgacctgcaacgccattttaagaagctggagaatccgaagattcgtttccaggctcaaaagcaacgaagagctaaagcgcgtgaacaaatagcggattcaaaatccacccctcctaaaacgcccagtgatttaaaacagcaacgacaggcagaaaaggcagggaaagcgcaagccagggaagcggcgaagattgccaaacgtaatgaaacagccgatctgaaactccgaagcgccgggttacaaatacgtgggatcaaaggcaagtacggtttagatcccgcgaaacaatacgaggctcttaaattcattcaacaagaaacagaagcctttaaaaaggggctaattacaagccaacggatgaactttactattcgtgagcgaatcaccgatctacgccgtgaggctgcattacaagcccgtattactgccagtacacagcaacaggcggcagcacttaaacacgccaaacgtacagactacaaaggcgcggcggcaggtatcaaagagaaggggctgaacgtgatcggcggcggtgcaggttttattgctggtacagcggccttagctgctggggctggtgtattggcccgtatccgtgaaactgctgacgataatttgaacctgatccgcaaaagtaaagccgtggcggtcaacccaaacgcgatcaaaaccatagtcactgcaaaccgtcaacgtggtattgattcaaactacgataccgtaagcgataatttcaaagatgtgcgtgagcgcttgggcgagtccgttactaacaccactttcgatcagaagtctggaaaattcaaaggcgggaatggggcgattgataacatcatgaatttattcggatggaacaagcagcagatcgcacaataccaggataacccgttagacttcgtgcaagccgttaccaatgaagggcagcgtagagggatgagtgatgcgtccataggccacctattggaagacctcggtaatgacatgtcctatttggtgccagtgctcaagaataacggtgaggcgttcaatagtaccctcaaaatgttagtgagtaccggacagactctaaatgatcagcaaattcaggaaacctatgcctggggcgacctcagcaccacgttgcaagcggttaacaatggctttaatcagaatcttacttccggcttcctcgaagggtttggtaacgctggtaaggatttagcggagaacaccgctgccctgaatgagacagcaaaatcattaggatctgggcttggaaacctgttagcacaagtgacaggcttcacgaaggaaatcactgatgacctcagcaagtttaacggctggatgaaagaaacattcccttcactgtactctgatcctaaccaaacaccggaagatgcgctctatcacaaagtaacgtctgatagcgccaacagtgcagccagttggattcaggataagacaggctttgatactcgctcagtggggccagctatcatggattggttaggcgttggtggtggtaatgctggaacagcggcaaatcaatacagcctaaatggtgattctcttcgtggttctgcaatgtcactaaccagcggtaacgcgccagcgtacaaccttgcaccagtgtttaatctgacagtagcgccacaagtaccgctaacaattcagagtgacgcttcgcgccttgctgattatgtcgatttccaggcgagagcctcacaagccagcttcatgcaatcgctcacgttgtcagcgttaagcggtcaatcatcaacgggtggctaa

SEQ ID NO: 193824 - DNA, 627 bp, Klebsiella oxytoca
atgccagcagaatttcttgatatcgccatgacgccggacgtgatggatgtccagcatgaaatgggcagcgatgagctgtggcagtcgccgcatcgcccgcgccggggtgagcgcttcggcgccagcgaggaggcgatgattgccacccgcgacagcttctatctggccaccctttcgcaaaccggctggccctatattcagcatcgcggcggcccggtgggctttctgcatctgctggatgaaaccaccctggcgatggcggatttttccggtaatcgccagtacatcaccaccggcaacctgcgcggcagcgatcgggcctgtctgtttttgatggattacccgcgccgtgccaggctgaaaatctacgccaccgtagaggttgtggcggtggatgccgacccgcagctgctggcgcaggtcgcgccggcgaactatcgggcccggattgagcgtatttaccgttttcatttgcaggcttttgactggaactgcccccagcatattactccccgctataccgctcagcaggtggcggagtatagccagacgctgcaacagcgtattgacgaactggagcgggaaaatcagcgcctgcagcagcgtattcatacaggagattcatga

SEQ ID NO: 193825 - DNA, 396 bp, Klebsiella oxytoca
atgaatgatgtggtattatacgaaaaaaatgaatcaatgttttttgccatttgcacggtcttatcattatattgcgatttcatatacgaaatagcatatggatttcataatgaagcggtaatgatcattgaaaatgaaaagtgtgtgggacaggcacttaaaatacaaataaacaatctattcgatgatttcgattactacaaaaaagtgaatggaacagaaaaagtaaaacgggaagatatagatgaaaaagaactctttaacaaagtaatggcagcacataaccaaggagtaaaagcgctaatcatgaagaatcttgaggccaatcttcgagagaaagaggaaggttctgaatattggaagttaaaaatatttaataggtttaatgggatatag

SEQ ID NO: 193826 - DNA, 294 bp, Klebsiella oxytoca
atgagtaaaatttttgaaattaaaagtgtatctacagaaacgttttataatattgcagagcgttcgtttgaggctagttggaaggttatgcaggatatggcctctgataatgtctcatacttggtatatgatgcggattttatgtgtgttttcatcggcaatgttattgagcatatcagtaaaaatttttacatcattatccaatgtgaatgtctggaaggaaagcttgaagaagtaaactttgaagaggtagcggaacgtctggtccggcattcatgggagttttgtaaataa

SEQ ID NO: 193827 - DNA, 288 bp, Klebsiella oxytoca
atgagtgaaaaactgataaaagaatctcaaaaagtatttatgcatatggcaggtttgttttatgaaatcaaaatgaatacgcttaaggaagtccgacccgatgaagcagagatgttaatggaggatgatgcattcatggatagtatttataaggattgtatcaaaaatgcaagcgcatcttttaaaaaggtagtcagatgggagtactttgaacaagggcattcagtaaaaatggttgataaggaggtggtgttgataacattacgtgttaatcacaaacgaagataa

SEQ ID NO: 193828 - DNA, 312 bp, Klebsiella oxytoca
atgaaaagtaaaaacgtactgccttgtgtggtgactgttacgaatgatgagacagaagtatttatggaaatggcaataaataactttagaaaacatcttcaggtcatgattgattgtatgggaaatgattacgagcgtcattttaaagaccgactttatattgaagaagtgattggaaaagtgatcgagcgaacaaaacgagagtttgctgaatcaatgaaagataataaagggaaagaatatcatctgttcttggatgaggtgagaaggaatctgagagttatttattctgcgtatcgtactaactattaa

SEQ ID NO: 193829 - DNA, 216 bp, Klebsiella oxytoca
atggttcaaaacaaaacagataaacatccgaaactgattcgtttgccagaagtaaaaagaagaacagggtttggtaaaacgtggatatataccttaataagagcgggtaaatttcctaagcaagtaaaaaccggattgcgctctatagcatttattgaaagtgagattgatgaatggatttacaaaatcatttctgattctcgcaatcatatctaa

SEQ ID NO: 193830 - DNA, 474 bp, Klebsiella oxytoca
atgacctgcttattcgcaccttccataagcaacgttgaagtgataatacgcggagccgcggtcggcgatattcggccccagcgggcgcatatctggcctggcgtaagcgttaatgccataaagcgtggagaccagcgcggcgataaaaatccactctttcagcggagaagcaaaacaaaacttgcgaagcgacatcggttgattgtttccagcacaccctcggtagtgataatgattgctaatatcaatctcaattgcaagcaacgaggttatcccgggagcggcgcgttgcgcctgcccggggaacccatcatcacatcacggatagcccggctcgtgctgcgcttagccgggctacggggaatgccgcgttctgctcaatatcaggccgtacgccatctcctggtcagcggcttctcgacttccacaatcaggaacatcacaaaaccgataataaaggtgataacccagtag

SEQ ID NO: 193831 - DNA, 549 bp, Klebsiella oxytoca
atgctgattggctacgcgcgggtgtctaccggcgatcaaaacctcgatttgcagaaaaatgcgctggttcgcgcagaatgtgagcagattttcgaagacacagcgagcgggaaaaatgccagacgcccagggctgaggcgtgctattcgtcatttaaaaccaggtgattctctcgtggtctggaagctggatcgccttgggcgtagtgttcgtgacctcattactctggtctcagagctgcaggataaaggtattcactttcgtagccttaccgacagcatcgataccagtacgccagcaggccgctttttcttccacgtcatgagcgccctggcggaaatggagcgcgagttgattgtggagcgtacccgagccgggttagccgcagcgagggagcaggggagagtcggcggccgtcgccgggtaatgactgaagaagtggtggagcggtgccgcagaatgctggagaacggcgctaccaggcagcaggtagccgatgtgataggtgtagacgtgaaaacaatctacaagtacctcccggcgacttga

SEQ ID NO: 193832 - DNA, 297 bp, Klebsiella oxytoca
atgtctgtaaatactgaaaccacccccgcgcaggggcagaccgctgtactggaaaaagagagcgtttacgcctccctgtttgccaaaatcaacctgaccccggcgtcccgcctgggcgatattaacgactttctggatgatgccgcgctgtccgacgccccggcgggcgaacgactgacggcggcgatgcaggtatttatggactgcatccgtcagtccggaaagagcgtggagaagctcgacaagaccctgattgaccaccatatcgcggagctggactatcaaatcagccgctag

SEQ ID NO: 193833 - DNA, 1494 bp, Klebsiella oxytoca
atggctatttttcatcttgattttaaaattgtgaaacgttcagaaggtaggtcttccgttgcgaaggctgcctatcatgctcgtacacgtataacagatgaaagaacaggtgatacgtatgattatagccgccgtactgatttatacggacatttcatattagctcccgctaatgctcctgcacgcatcgtaaaagactctacagcattgtggaatgaagttgaaagagttgagcgccagaacaacggtcaaacatcccgttatttcgatgttgctattcctgccgagttaaataatgaagacaagaaaaaacttgttcttgaatattgtcagaaaaatttcgtcgataaagggatgattgctgatatcgctttccatgatcttgatagcgataatcctcatgctcacgttatgttgacattaaaaaccataggcccagaaggttttggtaaaaaggaaagaagctggaacgacagaaaaatgtctgttttatggcgtgaatcatggtcagctatggctaacagctaccttgctgctgctggttcatcagaacgtattgatcatcgttctcttcaggcccagcatgaggaagcgttagaaaaagcagcagtagctttagataatgaagaaaaagcgttatggcttgctaaagccgctgaaacgaaccgccctgcaatgaaacgtatccacagcgctaaatggcgtagtaaggctgctcaggagcaaagagccgcagaacagacagttcgtgatgcagcgaagcaggaagcggttgaagtctataaaacattcagtgaacttgatcttgaaatcgtcgttgatgtcagaagcttcaccgtggctgctcttgctgaaccagaacaaatcgtattacctgaaacacactccggctcttctactgatgagaatcaaagacctgtattggtagcaccagctcctcatactcgtatgcgtggggttaaatcctatcgtgataaatccaaagtcagtaaggtcgctgcaggtaagaaaccatcggtcagtatttctgattctggaacaaatactattctgaaaacatcctcctctcaaaacctaaacagggcatccagaagcgcccctgacagtaaaagaaagcataaggctactccacgtcaggataatatttttaaacgcttcactgccctcttagttgattttatcagggataaattcatatgggctaaaacagacaaaattaaagttgatattatcagtgaggaacatgataaacgcattgctgaaaattatatctttgacgaagtattaggtcattctgttccacgtgctgaatatgagaaacgcactaagtttaaccaagatgactacaagccaacaccaaatgagatcagccgtttcccaagtcgtcctaaaaatgacataccggaacacgataatagtttgggtctcactcaatctatactatccagaaaaaataatacattaaaattaaaaccgccgggccacagagaatga

SEQ ID NO: 193834 - DNA, 477 bp, Klebsiella oxytoca
ttgttaacgattgccaaaatccaagatgaagccacaatgtttcgaaaattgatcgagaactgtgacaaaaagaacaccagccttgttatagactgttttcctgttatgagttgtaaactttcttcgatgcttctttcttatcacttcttgatgttatggcctgatcttgaaattaaaggagtaagtgcagccacaggcaaaaatgatcggataacgcactactggcttgaaatcaatgacattgttgttgatataacaggagaccaatataatctaatcaatgattatgaacttactaatgaaattataaagggcagaccatttccctcaatacatgtttcgcataataatgaaagctacctctacaatatatttaaaatcaaggaaacacactcatttgtctacggcttccctgaaatagctgatgatttcattgatgaaatggctcatgggtataatcaattattatataaatga

SEQ ID NO: 193835 - DNA, 837 bp, Klebsiella oxytoca
atggcaaaagttaactttttcgacacgcgtatagttaaaaaattttcagactacacatcaacaataagcactattttttcacttttattgatttttgttgacattccaacagaaaataaaattacgcttgggattatattcttattcactttgtcattgttgtattttggaatttggttgaaatcaaataatcttacggaagttaatttagatgtagagggaagtattgtcactgtaaaagctggtgatctatttctacaagacggattcaaggttatagcttttaatgaatactttgatactcaagttgatgacaatattatctctcataaatcccttaatgggttatacattgataaccatttatcaggtcctatctctgatttagaccagagtatttcaaattataagtttgatgaagatgaaatccttgaagtcaaccaagaaaggaaggtaggcaagaaacaaaaatattcgttaggaactatcttcgtaaatgaagattatctattaactgctttttcaaaatttgatgataaaaatagagcgtttcttaccatgcctgactatttaggttttttaataaatttctgggacaaggtaaatcgtatatatgctcaaaaaagcgtttcggtccctatctttggctctggaataacacgaataaaagaacataagaatataagcgatgaagatttgcttaaaataatgttgtggacatttagaatcagtgagatgcgattcaagtttccggcaaagctcactattgtcattcacaaagataaaattgataaaataaatttattggacattaaatcagcaagaaatggcctttag

SEQ ID NO: 193836 - DNA, 552 bp, Klebsiella oxytoca
atgcgtaaaattttagccattactggtcttgccgtgttgttatcaggctgtggtgaaaaaggcgattttgagaaagcgatcaacgcgaaaatttcacaatcaaagctgtgctactcactgcagaacaatgactttgcattcaataaaggttttcctataaaggttaatcatggctaccgttctgcaggatacaatgttagtgaagaaattctgaaaggtcttgcgaatcagggattgcttgatgtttcacaacagcctaacggtttcagcagtgtcgatgttctggaagtaacagacaaagggcaaaatgttgagttttggaaccgggcagaaggtgcgtgtattggtcatcgtgaagttgatgaagtgaaggaatggactgagccgggcaacggtaatcagcaggttgttcatgttagttatacatggaagttggcggatgttccttcatgggtggataaaaaagcattcgcaaacgtcaagggtatgaatgaacctgaagatggcgcaatcaatttagttaaaacaagcaatggctggaaagcgctctaa

SEQ ID NO: 193837 - DNA, 792 bp, Klebsiella oxytoca
atgaaatacttacccggctcactcgaaataaaactgcatgatagattatcaaaaaccgatattcttgatatcttagcagaacatatgacgatgcttgaggaaacatttggcattgaagagttcaaactctattcttttcttgaatgttatattgatagtaaaaaacagtccttttatcatgaagaacataatactgttgtaaattcatttgacttacaaggtaatgagaaacttgagaacacagcaaaaataatttcaaaagatggtaataaaagaatcgtctcttttgataaaaatatcgatgtagatagaatacgtttaacagttggaagtattcagaaacataatccgtatcgatattggtctaacaatattcaagtcattccatcatcagtagtcagcaacatcattcaagataaagaaagccaattacaattagaaagagataaactttacttcctcaaccaactgagacgtaaacaagaagaggaacaaaggcgtaaagagcgtgaggaatttgagcgtccattgaaatcactcattacaaaaaagatcatggaaagcggcctaactgatttagagttcaaaagaacaatatgttcaagctttgactatataaagagccgttctgtaatagcaaaatacctagccaataaacctgatttgttagaaaaatatcatgactccagaataatacgaatgtccattaaaaatgatgaaggtaaagtcggcaaggttgaactttatgatctttctggaacactaatttttgaaagctataaaaacaattaa

SEQ ID NO: 193838 - DNA, 192 bp, Klebsiella oxytoca
atgacgaaacaacagaaaacagcgctgaacatggctaaattcatccagaatcagtctctgctcctgctggagaagcttaacgagcttgatctcgatgtcgaggccgacctttgtgagaaactccacgatgatgcggagcatcttttccgtactctgtcctctagactggatgcattacaggatggtaactga

SEQ ID NO: 193839 - DNA, 186 bp, Klebsiella oxytoca
atggactggatttcacttgctatcgccattgcgctacttgttgtagctatctactcaggaatctcatacttcagagaaaaaaaacaatcagtcgtgcatttaggcgatagcgccctatttaccataatcccttcttacgcgcaccgcgaaaacggcctcagggcgtttctggcaggaaaccggtaa

SEQ ID NO: 193840 - DNA, 309 bp, Klebsiella oxytoca
atgtctgcaacagagtctaaggtaaaaactgcaccgaaaaccagcaaaaaaacgcttaagtctgccgaagctgaggcgcttaaagtggctctcgatgccgcacaggtcgagtatgtcccggtgacggcactggtgaagtctcccctgaacgtcaggaccattccctatccggcggagaaagtctgttcaatggcagattccattgaagccattggcctgttgcagaatctggtcgtgcataacctcccggatggacgcccttctaagagtcaagctgttatcgggatactgttgatccgcctgttttga

SEQ ID NO: 193841 - DNA, 234 bp, Klebsiella oxytoca
atgaacataatatttaatattttctttttcatagttatcaataaaaacattgatatgattcaagtattcgtttggatttatattacaaatttcgttaaatacctttcgagactgcgcctcatcattttgtataaggtatttcatttccgcatttcttgtaatttcaacatctgtaacacaaatatcgaaataaccacgatcgaaactaataacatttgtaaatatacagtctaa

SEQ ID NO: 193842 - DNA, 492 bp, Klebsiella oxytoca
atgactatcatactggaagaagtgaaaatttcagggcaccctggtcctatagaaatttttaaagtaacccctaactcatggaaggtgttcaagtgtttttcccgttcaaccccgaaagcaaactttcatacagacatcaaaagtctacagacagcagaccagagaaaagccaaaaatttgtttacggttttaggtcaaaagtgtgagtctggaaaacctttacatgaaatgtacgacaagaaaaaactccatagcgctttagagttttcttatgaaaacagaagaggtgaacacgtaacggataacgtatggagaataaggcaggagaatttaagattatatttcatatacttacatgacaagagaatagttttgttacacttatggtataaacgagtagacaatctgagtgagtctgaagaaaaacatttaggggatcttgcggaggctatattgttacaggtggaggcagaaaatgagaaaagaaaatag

SEQ ID NO: 193843 - DNA, 597 bp, Klebsiella oxytoca
atgagaaaagaaaatagtaatacagaaatcgctcaagaagatgattttgatttctttgatttttctgacgtagatcctttctttgctaaaagaaatgccgtagctaatgaacttctagctttaatttcacatgaaaatatatcaagaaaacaactatctgaaaacctggaatgggctcccagtagattatcaaaagtattatctggcgagcaaaatctgactgtaaaaactattacagcaatttctttatctctaggttacgatttttctatttactttcataaaatacacaaaaaagaaatggttcaaccatgggaaaaaactactgaaatagctaacctttcgaaaataaacattgtaagtgggattaaaaatcacaatataaatttacaaatacaaagtaaagaagatgtaattaatgatctgttaaatggccgtggaaaagaaagttatctaagtctctctattaatgaaaatatcattaaaaacaaagagatagaaacaaatagcattaaaagaaatacattaactttcagtggcatatccagtttcaatacatttaacgtaaaacaaaaagtggtaaatagtcatggttaa

SEQ ID NO: 193844 - DNA, 429 bp, Klebsiella oxytoca
atggggaaacctgttctgttcgatttctcgaacgccactgcctcagagattgtcgctgcaatcgatgcaaaaattaccacagctcaaaatctgcacgccttccgcactcgtatgggtggtgccaagaaagccgataagctctatccagctactcgcgaagcactgaacatcattaaacgcctgcgtcagcaagcgaaagatgcaaaaatcatccgtgatattctgcaaccatactcagcagagttggcaaaaggccgtgatgttatggaaatcatcgaaccagtgctttctgcctggcgtgtctattacgcctctcatggcatcggtctgatgaatgagcagatcctcctgttgaaaatgattgaggcgggcggtgaactcgaaagcattaccggaaaagccattcccgaactgaccacaaccgaataa

SEQ ID NO: 193845 - DNA, 177 bp, Klebsiella oxytoca
atgaaactgacatttagcaattcaacgatggacgcaattatgcaggaatgccgccgtactgggacacctgttgccacgttcatcaacagactcgtggatgccgaggccgaacgtatccgaaccaatatgaagaatcccattgaaggagagaacaatgtccgagaaaacagaaactaa

SEQ ID NO: 193846 - DNA, 1008 bp, Klebsiella oxytoca
atgtccgagaaaacagaaactaagatcaacttcgaccaaaccgccagcccgttaaaaggtatcaaaaacattatgacacctgccggggtagtgatgcgtgtaactgataccgatctcaagtggttcactcacttttacaccttcgaggcacagggtaagaagtgctatcagagcattaaaacaatagcgaaggagtttgatcgtgcagtttcagttgcacaggagaggatcgacaaactgcaagcgctgggccttctggatgtgggtaaagagccgttcaaggatgggtggcgtaatacatacacctgtacgcctattgatgtcatcgtgtcccgcatgactgacgcgccagtgaccccgcaagataagccgttgaaaaaatcacagctcaattccttgctgaagaagtctggaaaagttgattcccatacagttaaccgtgggatcaaggtgatggcaaaaaccatcgcaaatcgtgatctctctgatgaagaagtgatgcagtttgcctttcagatcgcgactgagaaattagccgcgctcgggtggcctatcgaatcaatcattgaggagagtaatgatgaagaggacctgcaacccgctactgatggccctgagactgcctcgcctgctgctggagaaccagacggcgtacctgttgtggatattcctgtcgatgctgatttatccggtagtgatgatgcggtgaatggtggaaatgcaatccaattcccaacagtcaaaagcccagaccagccccagatggctgatatcgataccctcaacaactgggtagaaggctacgacgatgaaggatttatggcctatggtgcgacgtgggggatagaaaaacctggtgcgataacagatctgataaagagccatataagaaaaatccagagcgatggatacaaaggctcaaggtcagccgctaacgataccccatctggttcagatgcttattacaaacagcagcaggcacaaagaatagccgcagcaagagtatga

SEQ ID NO: 193847 - DNA, 177 bp, Klebsiella oxytoca
atgaacatttcattcccggatgacacctaccgcacattgctgggggaggccaaccgccgagacatgccaatggcgaaattatgtagtgaactgctgcaaacagcggcaaaaatcattgaaaagagcaaaacagataaccagcgaggatataatgacgaccgagaaaccagaaagtaa

SEQ ID NO: 193848 - DNA, 801 bp, Klebsiella oxytoca
atgacgaccgagaaaccagaaagtaaactttacgaatccctaccgcagccgaacgaagtcaaaccgatcacggttgatactttttccccttgggtgatcccggttgctcgcatcaagcgcttcaacggagtgaaaaacagcccagaaattatggctgtctacagtcacctacttggttggaagaaaacgacaggagagatccgtccttctcaacaatacattgctgattgctgttgtatgggcctctcaactgttcagaaaaaagtgaaggtgcttgtaaaaatgggatggattacagcaacgccagcccgtaagccaggtagtaaagagatctcccatactgactacacagttaaagatcctgaggaaattttagcagaacaaaacgctgggttgtcacagcaaggcgacgcagtagtaaccatcgcaaaaaatcatcagccaaaagccgaggagagcggtaagagtgagcagaaacgtgatgtggaatctttcgtggtggaacctgccgcgcctgttgctggaaaaccagacggcgtacctgttgtggatattcctgtcgatgctgatttatccggtagtgatgatccatcactgagtgattcaactgggagaaatgtcgttgagttaccgcgaaatggtagacccaagcttagctttaaatttgtatcaccagatgatgacgacctagagaattattctgaagcgccccaagttgattttgacaaagatgggcagccgccgaacaagtggaaatattttgatatggctacaacctgtgaccttttatacgacctgtga

SEQ ID NO: 193849 - DNA, 540 bp, Klebsiella oxytoca
ttgtgtaagcaagcaactggcgatagccagacgactaacagccaccaggctgacctagaagaacaactccccgatctaactcgcctgtttaaaaaccgcgcacgagatagcgacgtaatcaaaaaatgcaagcacatgctcattgcgggatattctccagcacgcgtggcattgctgctgaggctaccgctagaaaaagttcttgatttatataataattcgtacaatccccgctgccgtcgttttgccaaccgcaactcctaccaggattcaaaactagcactgactatgtttcaacagggcgagtccctcgcagatatctgtgctgcgctaggaggactacatccatataccgtggtgatgtccctccggcagaatggcgttgctgaatctgctattgagcagcggttaccacctgagggcgaccccttgctaatcgaataccaacgcgtctgcaaaagaaagtcatccagcaggtataaggcgatacaaatcaaccccctccaacgagtcaacgtggcgcaggcaactacagcctga

SEQ ID NO: 193850 - DNA, 1647 bp, Klebsiella oxytoca
atgaatcgcggtcatgcttctatcactaacgatattatccagacgaaaaaagctatcgcactcgaagagaagcgccagcgcgagaaggaagccagcctcaagcgtgaggtaacctactacaacagcttgagaaagtcggctctgactctggcaaacgtgaacggcgctgacgttgcaacccgttataaagcgatcagtgcagcaaaggaagtattagacctacagcgtcgtgaacactacaccgtagaggaaacccgctttgaaatggcgcgtattaccacagaattacgtaagcaggcccgcctgcaacagcgtatcacccgtgagcagaaggccgcaggtgttcgtgctggtcgtgtacgcacagaaagccgtggtgggagagcaggtcttgctgccgctggtgtaattgcaggtggttccctggttggctcaatgggtgttgctcgcgtaggtcagacgctccaagggagtcttgaacgctccagagaggcgcagcaattaaggcagtatgacattagccagcttgaatttaatgctattcatgacgttgtacagaagcgtacagggtacgacctgactgtagataagtatgcgtccatgaataaggattacttcgagaaagcgggtgagctaataaataccggttcctttaaaactaacaagcaaggggtaacaacattcagcggaggtggtgaacttgccgatctggtgaatgcagttcttagcaaaaccaaccagcgaacagcccagaaggtgatcggtgaactccagaaattagacatgggaacctttgttgcctacgtccggcagttgggaaaacaatttgcttggtctgaaaactccatgcgccattttttggaggcgatcgacgatggatcggttctcctcagcggtctcacagcggagggtgacgaggttattgctcgtatgcgtcaacttgcttctgaaggatggactctatccgatgcacagcaggccaacctcgataagttggcagcattaggagctgagtataatcgagtgcaaaccagtcttgcggatcacttctctgcatcatttgttcagggtcttggagaatacgccaccaatacggatacactccgtcagtcaatgacaggattaatcccgattgctgacaatctgggccaatcgctgggtgaactcacgactaacgttatcgcgtgggcctcgcaaattggtggagaactccagaagggtgcaactctaccgaccgctatctataacaccaccgttgatgagggcagcaatgccgcagcgcagtggattaaagacaagacaggttttgatcctcgccgcatcggccagacgcttaagcagatttacccgtggctggatagttctgcacagaacaatataggcagtggacaggcctggacaaatccggggttaacccgtggggttgctggatttagccaaccacaactaacctttaccccacctgagccgttcggttctactggatggagaccagacaactccaggtttaatctgactggtgaggcgacggttaaggttgaggtcgagcaaactctgaacgctggggttttagatggccttattgatacaaagatcaacgataacaacgtcagacagcagaatatgatactgggtatagctgattaa

SEQ ID NO: 193851 - DNA, 1413 bp, Klebsiella oxytoca
atgatactgagtaatgtcagaggagcgaaggccccctgttgcagtaccagtgtaccaagcaggaagagcccggggattggcatcagcctaacaactccgctcgaatcggttcagaacctacagaagacactacaggcgaaagcaaagagtaacgcaacggctaaattccacagtctgtgggataaggtttgccgcccggatgttctcgtggaggcttacaggcgatgccgtctgaaccggggagcccccggcacggacggtgcgtccttcgccaccatcgaacaacagggtttaggacagtggttgcgaagattaaagcaggagctaagcactaaacagtaccagtgctcgcccctgttgcgtgtatggatccccaaagccaacggcggacaacgcccgttgagtatcccgacaataaaggacagagtggttcagacggcggtgttgctcgttattaaccccgttttggacaccgatctgtccccacggcagtacggcttcagaagtcacatcgacgccaaaatggcgatacgcagagtctactttagcatctctgaacgcttcgccagagaagtcgttgatgcggatctatctgattacttcagtacgatccctcatgggcaactgatgaaatgcatcgcccgaaggataactgacggaagcgtacttgggataatccgccagtggctcagagccccggtagtggaacggaccagacagggggtcgaaattcggaccacagttgcccgtaacactcatcgtggaacagcacagggctcgccaataagtccgttactgggaaacctctatttcaggcgatttattctggcatggaatagcgggactcctttctgggagaagaacagcgaaatcgtcaattatgccgacgatctggtgatattgtgtaaaagggaaaccggagaacaggccatgacaaggatgaaacgcctgatggaacggctggggctgatcgttaacgaaagtaaaacccggctggtcgttttacctgaagggaattttgattttctcggatataccattggccgattttatggcaaaggcggacgcccctactggggaaccgcaatatcccgaaaagcgatcaaacggctcaaacaggaaatacacgcccagactacgtcacgctggaactgtacccccatagctgaaagagcggaaaggttaaacccgcttctcaggggctgggccagttatttcaatcaggggccagtgttacagatttaccgtgacattgatatctatacggcgagacgggtcaggatctggttacagagaagaaaaggtcagcggggaacgggatatcgccagtatcccgaccagtacctgtacgagcagttaggactgatacgcctgctggatctcccccgtaaccgcccgaacgcgaaggtctga

SEQ ID NO: 193852 - DNA, 1671 bp, Klebsiella oxytoca
atgaatcgcggtcatgcttctatcactaacgatattatccagacgaaaaaggctatcgcactcgaagagaagcgccagcgtgagaaagaagccagtctgaaacgtcagagcactgcatacgataccctgcgccgcgccagcttgacaattagtcatattgagggggctagtctggctgacaaaatgaaagctgttcaagccattaaggaagcaacaaaaggctactccgagcagcgttataccattgcagagatgagacacgagctagcgaaagcgactctggaaaccagacgccaggcacgattaaaccgccagattgttaaggataaagcgaaagctgagcgtgctggtcgcattaatgccgaacgtttgacccgtgagcgcaaagagcgcggttatggtggactgacgacagctggcgttattgcaggtggttccctagttggctcaatgggtgttgctcgcgtaggtcagaccctacaagggagcctcgaacgttcacgcgatgtgaaaaaactgcaacagtatggcatctcacaattggagtttactgcacttcaggatctggctatgaacaaggcagggatctctctaacagcggattccctggctgataaaactaaggataccagagaaaaggccggggaattgctgaacaccggctctttcaaacgtaacaagaaaacgggcgaggtaacgttctctgggggcggtgagtttgcggatatagtgaaccttacgttgcaatccaccaacggcaaccagagggtagcccaaaaggtgatcggtgaactccaaaaagggacctttgtagactttattatctatttgaaacagctacaaaaaaccttcaagtggacggacaaccaagtgaggcatctgtccgaagcggtgaacgacggatctcagtttttgagtgtattctccgaacggggagataatattgtagaccgtatgaaccagctctcgaaagaaggttggtcgctttcccaggcacagcaggccaaccttgataagcttgcagctttaggtgctgagtacagtcgcgtgcagatgtcgcttgctgaccacttcagcgccagcttcgtgcagggtctgggagaatatgcagctaatactgacactctacgtcagaagatgactggactgatcccaatttccgatgctctcggcgttgcccttggtgagctaaccaccaacattctctccttcgctggtcgagtcggtgaagaactcaagaaaggcgcgacactgccggatgcagtctacaacaccgttgtggatgactctgcaaacggtgctgccgattggataaaggaaaagaccggatttgatccacgcagcatcggtcagacgctcaaacagatttacccgtggctggatagttctgcacagaacaatatcggcagtggacaggcctggacaaatccggggttaacccgtggggttgcaggattcagtcaaccacaactcacctttactccgcctgagccattcggttctacgggatggagaccagacaactccaggtttaatctgactggtgaggcgacggttaaagtcgaggttgagcagactctgaatgctgacgttttagatggtcttattgatacaaagatcaacgataacaacgtcagacagcagaatatgatactgggtatagctgattaa

SEQ ID NO: 193853 - DNA, 132 bp, Klebsiella oxytoca
atgaagaacagcaacattatggcgttagcgctcgcgcttcgcaacgtcgaagccggtcaggcggttaaaatcccggcgatgaccgggtgtcagttgcgccagttgctggcgtggctggaagtgttgaggtag

SEQ ID NO: 193854 - DNA, 222 bp, Klebsiella oxytoca
atgatgaaaaaatgcacaacatcagtgttaacagttttggccctgctggcatgtcagccagcacacgccggacggatcacgatgcaactcactgaacaggaggatacagccaacggcaagacgctttgccgttatgaaaattctatctattcatttagttacgtgacgctgagcaagcattgcgcgtcagtcaaaaccttcgacaccgaggattcaaattaa

SEQ ID NO: 193855 - DNA, 294 bp, Klebsiella oxytoca
atggagatcgtcaatgcggcgaatcgtagatggcatgtaaccttatacataaaagtccatatggatgaccttccagatggtcaatgggctatgctcgtaatccattggaagaaaccaacttttaatctaactaaagatcaacggatggaggtactgaccgaacttgaaaggattggcttaactaagattttgacgcaagaaacattagctcacatgttaaataccaccaacagtactatccagaagtctctttccgacctcaaaaaggctgatctcgttggctccccttcttaa

SEQ ID NO: 193856 - DNA, 621 bp, Klebsiella oxytoca
atgggtaatgcaatggtggcgctcaagtccgccgatgaggtgaaggcggttagcgcggagctggcgaagaacaaaagaaccaacctctttcgctgcctctgggcgatgcagttcgagagcgcgttacgtttctctgacgtggttaaactgacctgggatcagttcgcggagggcaaaacgcatcttctcatcattcagcagaagaagacgcgcaagggggtagacggtacgccagtgaagccgaagccgttgaagatagccattaccccggctatgcgctccatagtccaggctcgacgggaagaggcagaagaccgcccttgctttggtgagtacatattcagcctgtccgacctgaggtcgaagggccagccagtttcacacaacgcagtactgacagagtacggcaagtgcggacgccgtgcaggtttcctggatgtggggagccacacaccacgcaagagcaaaggccgcatcctctttgaaagtggcctacctctggaacagatcagcaacctgctgggccactccagcccagcttctacactgttttacatcgggttcacgcaggagactgcggacacgatatcggaagaattttccctcggggaagagtggtga

SEQ ID NO: 193857 - DNA, 981 bp, Klebsiella oxytoca
atgagccatcaactcaccttcgccgatagtgaattcagcactaagcgccgtcagacccgaaaagagattttcctctcccgcatggagcagattctgccatggcagaatatgaccgctgtcatcgagccgttttatcccaaggcgggcaatggccgacggccctatccgctggagaccatgctgcgtattcactgcatgcagcattggtacaacctgagcgacggtgccatggaagatgccctgtacgaaatcgcctccatgcgcctgtttgcccgattatccctggatagcgccctgccggatcgcaccaccatcatgaatttccgccacctgctcgagcagcatcaactggcccgtcaattgttcaagaccatcaatcgctggctggccgaagcaggcgtcatgatgacccaaggcactttggtggatgccaccatcattgaggcacccagctctaccaagaacaaagagcagcaacgcgatccggagatgcatcagaccaagaaaggcaatcagtggcactttggcatgaaggcccacattggtgtcgatgccaagagtggcctgacccacagcctagtcaccaccgcggccaacgagcatgacctcaatcagctgggtaatctgcttcatggagaggagcaatttgtctcagccgatgccggctaccaaggagcgccacagcgcgaggagctggccgaggtggatgtggactggctgatcgccgagcgtcccggcaaggtaaaaaccttgaagcagcatccgcgcaagaacaaaacggccatcaacatcgaatacatgaaagccagcatccgggccaaggtggagcacccgtttcgcattatcaagcggcagttcggcttcgtgaaagccagatacaaggggttgctgaaaaacgataaccaactggcgatgttattcaccctggccaacctgtttcgggtggaccaaatgatacgtcagtgggagagatctcagtaa

SEQ ID NO: 193858 - DNA, 141 bp, Klebsiella oxytoca; identical to SEQ ID NO: 36145

SEQ ID NO: 193859 - DNA, 291 bp, Klebsiella oxytoca
atggaatataaagatcccgtgtttgaactgctgagcagcctggaacacatcgtttttaaggatgataatcagaaacttacctcaaacagtaagtccactgtattaagtgaatttgaacagctgcgtaaaggcactggacttaagattgacgactttgccaacgtcatgggcgtgagcgtcgccatggtaagagagtgggagtcgagacgggtcagaccgtctcccaccgagctgaaattgatgcgcctgattcaggccaatccacagctttcacgacaattactcgattaa

SEQ ID NO: 193860 - DNA, 267 bp, Klebsiella oxytoca
atgcttaaactttctgtatgcttattgacctgtaattcatcccgcttattacgggaggtgttaccaccgctgctcagggtggctgatgaatttatcgtcgtcgattcaggcagtacggatgctacgctgcagatttgccaacagttcggtctctccgttcaccatcatccttatacggctcacggtacgcagatgaattatgcgacctctctggcccgccacgactgggtgctgtgtgtggacagcgatgagatccttgacgactag

SEQ ID NO: 193861 - DNA, 1467 bp, Klebsiella oxytoca
atgatttctggcgccccctctcaggatccgctgttatcggacaacggcgaagcggccgattatcaacaattacgcgaactgttaatacaggaactgaatgtagcgccgcagcagttacaggaagagagcaatctgatccaggcgggcctggactccataagattaatgagatggttacactggtttcgtaaaaagggctaccgcctcacccttcgcgagctgtatgccgcccccacgttggcagcatggcgccagctgatgcgcagccgttcgggtgaaaaaccggatgatgcaagctccccggctgacgcggcgtggccagtcatgagcgagggtacccccttcccgctgacgccggtacagcatgcctatctgacgggccgaatgcccggacagacgctgggcggcgtcggttgccatctgtatcaggagtttgccggccattatctgacggcgccaaagctggagcaggccatcacgatcttactgcaacgccacccgatgctgcatatcgcctttcgcgccgacgggcagcaggtctggctaccgcagccatactggaacggcgtcaccgttcatgatttacgccagaccgacgaggcaagccgccaggcctatctggaaacattgcgccagcgcctgagccaccgtcttttacgcgtggaaatgggcgaaacctttgatttccagttgacgctcttgccggacaatcgccaccgcctccatgtcaatatcgacctgctgattatggatgcttccagctttacgctgtttttcgatgaacttaacgccctgctggccggagagtcgctgccgcccggcgacccccgctatgatttccgcgcttatctgctgcatcagcagaagatcaatcagccgctgctcgacaaagcgcgcgcgtactggctggcgaaagcatcgatgctgccacccgcgccggttttaccgctagcctgcgaacccgccacgctgcgtgaagtccgtaatacccgacgccgcatgattgtcccgacaacacgctggaacgcctttagccgacgggccggtgagaatggcgtgacgccgacaatggcgctggcgacctgttttgctgccgttctggggcgctggggcggcctgacgcggcttctgctcaatatcacgttatttgaccgccagccgctgcacccggcggttgacgaaatgcttgccgacttcaccaatattcttctgctggataccgcctgcgatggcgataccgtcagcaacctggcgcgtaaaaaccagctcacgtttactgaggactgggatcacgccactggtccggcgtcgagctccttcgtgaactcaaacgccagcaaagccatccccacggcgccccggtggtatttaccagcaatctggggcgctccctgtacagcagccgcgccgagtcgccgctgggcgaaccggaatggggcatctcgcagacgccgcaggtctggatag

SEQ ID NO: 193862 - DNA, 684 bp, Klebsiella oxytoca
atgagcctcttcactacagatgattaccgccaggctctccaggcgcttatccctacagggcgggcgtggccacgtgaccctgatacggttcagtatgctgttctcagatctctggctgcaagctatcagcgtagtgacagtgatgctctgagtattctgagcggcgcctttccaaaaaccgcaacaatcatgctaccggagtgggaagaggctctgagtctgcctgacgactgctcaataggcgaggtcgataccatcgcaaaaaggcaggcggcgattgtctcaaaattaatcagtacaggtggtcagtccaaagcttattttattggtattgccaaagcgctgggctacaacataacaattaaagaatatcgacaggcccgcgccggtctgtctgtctgtggggatgggctaaatggtgatgaatggccttttgtatggctggtagaggctgaagataccaccatctcttatgccagggcggggcttagttattgcggagacccactccgttcatggggaaatcgtcagttggagtgtcgtataaacgcactggcaccgtcttatacactggtcaaatttggctatatctatttcggtttcaatgatgaaggggtctatgaagtcacccctgaatttgcaacgatatttgatattgcatcaggaaacatttcttcaaattaa

SEQ ID NO: 193863 - DNA, 1149 bp, Klebsiella oxytoca
atgccatttaaacgaaaaacgctcagtgaactaagaactgaaaatcagcagttcatgcaggcggaacttgagagggttggcgcattacttcggtatggaaacctgaaagtgctggctgatatggacgctggtatggctcacctgcactacgcctatatggattacatcgccctacagacaaacccatttaccgctaccgatgagtggctggccggctggatggcacttaagcaaacttaccggaaagcggcgacagctgccaaatctcctgcagtaaaagctacggggactgcaggtgtcgatcttcccgcgggaaccgtcctgaatcgtgctgatggttatcagtatgttaccgactcaaaactgtccatctctgccgagaaaagcgggaccacttccattacggctgttttgcctgatatttcagatgatgtgactggcggcggtaataagggaaacgctgatgccggcacactgctgacgctggatgcaaacataccaggtatcgacaatacgctgatgttgatcgaaccggcaaccggcggtgctgatattgaaactcaggaggattttcgtcaacgcggactcctggcgtttcaaaacccgccacagggcggaagtgatacagattaccgggggtgggcattgtctgtttctggggtcactcgcgcatggatcaggcgccgtggcatggggccgggaacagtcgtgatttatattatgtgtgatggtgaagacaaaacgaaccatggttttcctgtcggtactgatggcatttcctcgctggatgactggggggcagtaaaggctaccggcgatcagggcagggtggccgattacatttacctgctctcacccgtcacctccctgaactacgtttgctctcccgttcctggcgttattgattttgagatcagtggcatttccagcgccagcagtgcaacgacaactgcgattgcggaagctatagacagcgtattttttgaaaatggaaacccgctggggactgggaagatctatctatccgatattaaccgggctattggtgatgttgccggaaccggaggattcattcttgtttcacccacgacaaatattgagccgggtgtgggccagttaccggtgagaggtgaggtgaattatacatga

SEQ ID NO: 193864 - DNA, 588 bp, Klebsiella oxytoca
atgagccatttccgacattttgcaaaccgtatcgccagcatgctgggggtggggcgaattactgcgatgaaggatgctggcagcacccagtccgtgcagtatcaaaccccgcttgaagtcgccaccgcccacaggctggcagagtttggattttcctccgggttacctgtcggaacggacgttgtgctggcattcctgggtggtgatcgctcaaatccggtggtcatagcaaccaaccatcagggataccgttattcagatctgagccccggtgaaacggtgatgtacaaccagtgggggatgaatgttcttctgacagaaaatggagttttcattgatgcaaaagggaaaaatgtagaagttaacaacgccaccactgtcaccatcaatgccactgaatccatcctagccaatacgccattactaaaatgcaccggcgatatcgtggacaactgcgaatcgaacagcaaaacgctgaaacagttgcgtgatgcctataaccttcacgatcacgacgtgaaagaggtgcagtcgggagaaggcactatcaccagtgaaaaaacaacggagcaggtggccgatgagtga

SEQ ID NO: 193865 - DNA, 1401 bp, Klebsiella oxytoca
atggcaatcattcaggacgctatcacctccctgatgggcggtgatgccagcgatgactggcaaagccagcttcgtccgtgctcattccggggtgttccctttgccatcatcagcgaggaagggagtcacggacgccggcaggctgtacatgaatatccttatcgggacacggcatggatagaggatatggggcgcggaacccgccgttttgttctcaagggatttctggttcaggatagcctaatttatggcggtggtgatgttatttcccagcgtctggcgctaattgccgcatgcgaaaccaaaggcagcgggacgctaattcaccccacgctgggtgagatgactgtttcagttcctgaaaatgggctgacgctctccggcgatatgaagagtgggcgtgtatttgaattcacgctgatggcgatcgagtccgggttaaaggtttttgctgtgactggcagtagtgcggcaggtaaaaccgttcgcacgaattatttgaaactggtcagcacaacagtcttcagcactatcgcgcggattaagggtgaaattcgcggtgtgacacaggcaataaaaaccataaagagcaccatcggcttctggacgaatatggttgaaagcaccaccaatgaggtaacgaatatcagtagcgtgctgaaatccacgttcggcaatcagcgatacggtcgttacagcaagggaacggtaggtggctcgtcatccggggcgaccggcagtgtggatacggctgatactgacggttttcagtcgttatcggatcaggttgctgcgcaatccattatggacaggcagaggattactgacaccgctaccggactgaacgactcaaccaccgttgatgattttgtccagcgaaccgctgatgttatcaatgccattctcaaatgtgcgggcggcattaacgagcggatttcggcactagaaaagctggccaatgcaaccagtacagagtatcagaagtcgaatgccagcgcagagattgctgaaacggtcaataccctcattatcgttttgtgcagcggagctatggcagccgcggcatcagaatccaacccgacgagccgcgacgaagccgaacagatcacccggcgcgtggccaaccagctcgatgccgccttgctggtggcgggtgaccggggagatgatgatctttacagcgggctgctgcaggtcagaacgtcatttctcgacaccatgaacacactttctgcgggcctgagtgagctgatgcagtttaattcggcacagcctctgcctgcactgacgctggcaaaccggttatatcagaacgccggaagggctgatgagcttattcaggagtcgaatgttcctcacccggcatttatgccgacctcaatgaaggtattacgacaatga

SEQ ID NO: 193866 - DNA, 363 bp, Klebsiella oxytoca
atggcaaaagaaactaaatctgagctggcggatgatctgaatgcgggaggttctggcctgggcgttgaagacctgaacatgagcgaaggcggtcagggcagccagcagcgtaatgatgaaggcggtgccagttcatccggtgatggtgacgctgaaaacgaagaggctgcgggccctgaatttgtggtcctgaagggaaacagcattcgccataacggtgaagtttaccgcgaaaatgtgcgtattcctgtttctggtaaggatgccgagcgtctgctggctgctggcgtgattgctgatgttcaggtgttgcgtcagcgcgtgctttctgcagcgcctaccgtgagcgtcacgacggagtaa

SEQ ID NO: 193867 - DNA, 405 bp, Klebsiella oxytoca
atggatcagtttggtcagaatcagtttgctcctggcatgaaaagctcgctgttcgttcccgatcagcttattgccggtaccctacagttggttaccgactccggtacgattaccggaggctccttcaagcgcggtaccgtactcggaatgattactgccagtggcaaatacacgaaaagtgtgaaaacggctgccgacggaagccaaaacccggtagcaatcctggttgataacgttgatgcgtcaaccgccgatcagaatggcggtctgtatctgatgggcgagttcaaccagaaccgcatcatttacgataactcatggacagtcccggggctgaaagctgccctgcgcccgctgtctattttcctgaaagacagcattcaggcgcctgtagccgcttcctga

SEQ ID NO: 193868 - DNA, 384 bp, Klebsiella oxytoca
atgtttacagttaagaccatcatcaacggtgtaacccatatctgcgaacagtcgagcgtgacgattgcccgcgccggaagtgatcaattcgacgggattcttaagcagaccaacgaccactcaaatcctgacttcgccatctggctgccggctgcttaccgggatattgattgcacggatgttctacaggaagaggagttaatcgtcagtgagcgcttaggtgttcttgatgaggatgctattgccattctggttgaggatttcgaaagcccgcactatcccgagagagaggcgttcgacggcttaagatatcaattcgtctatccgggtgaccaggtgtacgtgatgaactcccacggttcgactatcgaaaccgtgaaatag

SEQ ID NO: 193869 - DNA, 189 bp, Klebsiella oxytoca
atgaacgagaaaaaatatcaatccctgcgtaaaaagtcaataagtaagggggggaatatggcttgtattgttatgctggtacacgcgctctccttttcctcattgcagatggatttagatgtacgtgtgggggatgtgaattggaaacactcaattgtgcttaaaactactggaggaaagggagagtaa

SEQ ID NO: 193870 - DNA, 603 bp, Klebsiella oxytoca
atgcataaaattgttacattagagagtgttgctgagatccgcttagggatgccctttaaatcggcaatacaagatgctggtgagcaaggcttctgttatctcatccagacgaaagatattgggctggacggcagtttagatctaggtgctttaacctctgttatcccagagggtaatcctgagaagcattatcttttccctaatgatattttattacgtctgcggggacctgtgttttcagctgggattatcgaagggaatctaggcaaaccaatcattacgtctaatcagttagcagtaattagatgtaatgaaaatctaatactaccacattatttacattggtatataaactctacttctggaagtaaatatattcgcagtttgagtgaaggtactagtattagtaaaattaattcgaaaacggtttctaaaatgactgttaaactcccaaatttgggggttcaagaaaagattggttctattaatagaaactggaataaacaaaaaacagtctataattcactaatacaaaatggcgatgtgctctttgatggtatatgtgaaagtatcattaatagcgaggagttagaaaatgagtga

SEQ ID NO: 193871 - DNA, 1482 bp, Klebsiella oxytoca
atgagtgaaatgaaggtgcttcataaatcacttttacttgcttgtgatttgtttagagggaaagttgactcttcttcttataaagattatatattttcaatgttattgctgaaatatatttctgatgttaaggctgattatgaatgcgatttaatcaatgaagaatattctgagttgttagaaattgtttctcgagtaccagaggatgctagtttttataaaatatatcatgatgctaagaatcatggtgattatatcggagagaggattgatgattcgctgagattaattgatcaggctattgattcggtctgccaaagtagaggtggttatttattcgagtcgataaaatttgcgacggttaattttggtgcaaaatcagaaagagaccggatgcttaatgaattactcgatatttttgcaagtcctgaaatgaaatttgattatacccaggatggtaataaaaagataaaagtagcatgtagatatctttttgaaaaaattgcatctgactcggctatgaggggggcagaattttatactccagaaggtgtttcactactatttgcagagttattgcagcctagggatggagatagtatttgtgatcctacttgtgggtctggttctcttttaattaccctaggggaaaaaataaaaaaatcctttagaagcaataagtatactttatttggtcaagaagttaatagatccatttgggccttggctaaaatgaatatgattatgcataacgaaattaatagtcggatagaatggggggatgtaatatctaatcctcagcttctggatacagataatagattgatgcagtttgatgtagttgcttctaaccctccgttaaatattatcggttggaaccatgatgatttagtacgtaatgattatggtcgctttaatttaggtttcccacctcagtctaagggtgattatgcctttattttgcacatgatttcaacacttaaaagtgcaactggtagaatggccatactggtatctcacggggtattgttccgtggaggtcaagaggagagtataaggaaaaatttaatcagtgaagggttgttagatgcggtaataggtctaccagataggttgcttcctggaacagcgataccaaccgccattttgatattcaggagaaatagaaacaattctaatgtcgtgtttattgacgcatctgatatggctaaacccgtaaaagggcgcaatttgataacaaatgaaatcattgaaaaagtatcaaaatgctactttgaaaggagtagtgtcgataatttttcacatgtggcttcttatgatgaaatacaattaaatgattttaatttaaatttatctcggtatgttaagaagcatgaggagcaggtttttgttgatcttgagagattacgtcaacagcgtgaagaactactatcaacattgcatgaattagaaagagaaatgaaagattttattgataattga

SEQ ID NO: 193872 - DNA, 714 bp, Klebsiella oxytoca
atgccattggttacctttggtgagctcactctcgatttgcagcgtaagccaatcaaaaacctgcatatcagcgtactgcctccggatggccgagtgagagtatcggcccccgtctcactgtcagacacagctatcaggatggctgttgtcagaaggctggtatggatccgacagcagcaagcacaatttcaggctcagccgcgccagagtgaacgagaaatgtgtagtggcgaaacacactacctttggggaagaggatatcggctggatgtagttttagtcgataagcccgctgaagtgaaacttcagggtggttggatacgtatgaaagtacctccacattatgatacggcccagcgggaagcggttctcaaccagtggtatcgtggtattttaaaacaaagactgcctaagttaatggcaaaatggcagcaagaggtaaaggctgaagccagttttgttggcatcaagcgaatgaagaccaaatggggtagctgtaatccacagacagcacgtatctggatcaatctcgaactggtaaaaaaaccacctgaatgccttgaattcattgtggttcacgagctagttcatctacacgaacgcaagcacaatgagcgttttatcggcctgatgagtattcatttgccaaactggcgtgaacacagagctaagttgaataaaatgcccttggcttataatcattggggatattga

SEQ ID NO: 193873 - DNA, 3096 bp, Klebsiella oxytoca
atgaacagtgttggtcaacgtgaacgcataacacaaaaacgtgttatccagttattcaccgatcatctcggttatcactatcttggtaactggcacaaaagagaagacaaccgcaacatcgagccaggcttagtttcggcctggctaacaaaacgcggtgtttcagaagtcctaatcgcccgagcattacggcagctggatcgagccgcaagcctcggtgaaggtcgtatcctctatgatgcaaacaaagaggtgtatcgcctgctacgctacggcgtaaaggataaagaaggtgcaggtgagcaaaatcaaacagtgtggttggtcgactggaaaaatccagaagccaatgattttgctatagctgaagaagtgacctacaacggcgaaaataaaaaacgcccggatttggtactatatgttaacggtattgcgcttggtgtcattgagcttaaacgttctacagtgtcagtctcagagggcatccgccaaaacctcgataatcagcaaaaagccttcatccgcaacttcttcactaccatccaattggtgatggctggtaatgatttagaagggcttcgttatggtgtaatcgaaacgccggagaaatattaccttcaatggaaagaagccgctgaatcatctcacaccaacatgcttgatcgtcacctggctcagatatgcaataaacagcgcctgctggaattaatccacgactttatcgttttcgatgctggagtgaaaaaaacctgccgtcataaccaatattttggagtcactgcaacgaaaccgtttattcaacgcaatgaaggcgggattatctggcatacccagggcagcggtaaaagtctgactatggtttggctggcaaaatggatcagagaaaatattactgacagccgagttttgatcattaccgaccgaacagaacttgatgaacagatcgagaaagtgtttaacggtgtggaagaagagatccttcgcaccagaagcggcgcagatctggtgactcgcctgaatcaaaccaaaccctggcttatatgctcgctcgtgcataaatttggtcgccaagaggaggaagacaaagatgcagacactgacgatttcattgaacagataaaacgtaacatccctgccgattttagtccgaagggaaaattattcgtgtttgtggatgagtgccaccgaacccaatccggcaaattgcattcggcaatgacaagtattttgccagatgcacaatttatcggtttcaccggtaccccactgatgaagaaggataagaaaaagtcagtggaggtcttcggtccttatatccacacttataaatttgatgaagcagtcaatgatggggttgtactggacttgcgctacgaagctcgtgacatcgatcagcgggtcaaatctcagaaaaaagtcgaccagtggtttgatgctaagacatctaaactttctcgccttggccagcagcaactcaagcagaaatgggcatcaatgcagaagctattgtcgagccgctcgcgactagaacagattgtcgcggacatccttctcgatttcgaacaaaaaccacgactcgccgacggccgtggtaacgccatgctggtttgttccagcgtttatcaggcctgcaaatgctatgagatgtttagtgaagctggttttgccggtaaatgtgcgattgtgacgagctaccagccaaatgccagtgagattaaaggcgaggagagcggcgaaggactgaccgagaaactggccaagtacaacatctatcgcaaaatgcttgcggagtattttgaacaacctgaggctgaagcagccaaacgtgtgagtgatttcgaaaaagaggtcaaacaacgattcatcaaagaaccgggtcagatgcgccttctgatagtcgttgataagttattgactggctttgatgctccgtctgccacatacctctatatcgacaagaaaatggccgatcacaacctcttccaggcgatatgtcgcgttaaccggttggatggtgaagataaagaatacggctatattgtcgactataaagaccttttccgctcattggaaaaaacagttcaggactacactgcagaagccttcgacggctacgacaaagaagatgtagccggtttactgaaggatcgattgcaacaggcaaaaatcgatctggatggtgctctggatgccgttcgcaccctttgcgagccagttaaaatgccacgtaatcaacttgattatcagcattatttctgtggagaatcaggggcgtcaatagagcagatatctgagaaagaagctttacgtctgacattgtatcaatccgtggcgaagcttatccgtgcttttaccaatctggcaggtgagctaacagatgctggttatagcgagcagcaggcaaatcaaatccgcatcgatgttgagttttatacaaaagtccgcgacgaaataaaaatagccagtggcgatttcgtggacatgaagcagttcgagccaggtatgcggcagatgctggatctttgggtggatgccgatccaagtgaaacccttatggattttgaagaactaggactgcttgagttgattattgaacgcggagaagaagcactggatggacttccagccgacatgcgtggcaaccaagaggcgatggctgaagcgattgaaaataacgttcgcagaaccattgttgatgaaaacccagtaaacccgaaatactacgaaaaaatgtcggtgttgcttgatgaactgatcgcacttcgtcgtcaacaagcgatctcctatcaggagtatctggagcacgtacgtgaactggcgaagcaggttaaacatccgcagtcaggtagtaaaagtacttatccagcaagtattgataccctcgccaagaaagcgttgtttgacaacctcgggcaggatgaagtcttggtgacaaagatagatgctgcagtccgtcataccaaaaaggccgactggtatggggatcgttttaaagaacgcgagattagtttcgctatcgcggaagagatcaaaggttattctgtgacagtcgcagatgtaatggccctagtgaaggcacagaaggagtatcgctga

SEQ ID NO: 193874 - DNA, 2031 bp, Klebsiella oxytoca
atgagtgatgcaaaggtaacatcctttacggtcagatcattactgggcgatgcatctcgttatcttatccccatgtaccagcgtaactatgcctggggagagggtgaaatcactcaacttgtacaggacatactcgactaccagcaaaaaagcctgcatagcctataccctcaaacttactacatcggtacgttggtcgtgttcactcgtcctgatggggacgcagagataatcgacgggcagcaacgtttcactaccctatcccttcttgctaactggttaaaaaaacatgcgggatccacgctcgatatgagctggtaccaagggattaacttagggtttgagagcaggcccaagtctggcgaaacatttgatcgactctggcaaggtgtggaaccgcataaactgcggagcaaggaatttaacgaagggctgatcaatggctatgaacttattggcaaggtactacgcgacttgaaactagttggcgagtcattaaatcatttctgtacctacctgttcgaccatgtacaaattgcccgaatagaagtgcctgccgataccgacctcaatcatttttttgaggtgatgaacaaccgaggtgagcaactcgaaaagcacgaggttgtgaaagcacgactcatggctgcgctcaacaaaataacggaccagcaagatcgacagcgtagcttgagaaccctctcacgagtttgggatgcttgctctaacatggaacgttatgtccagtacggtttcacaccagccgagcgtcatcgtttgtttggtcaggaaaattgggggcagtttgtgcctgctgattttaattcgctagctggcatgcttatcccatcggcttcggcgcttggtacaagagagaaccaaacaaaccgcatactggctgacattatcaagtcatcttcaaccataagtggtgatagaggtgacgaagatgaaggtagctcagagcgttttaatagtgttatcaacttctccaacttcctactccatgtgttgcgtgtctgcatcaacacaggtaagaacagagtagatgttccgctggacgacaaacaattaatcgaacagttcgaactccggctgttaaagcagaatgacccggttagagcggtacaggatttcgtctttgcacttctcaaatgcaaatatctttttgatcagttcgtgataaaacgagagtacgccaaaggtagcgatggctggagtttgaagcgcctgcgttggtattcggagaagagtaccagttataccaatacgtttaatgaagatgagggtaacaataccagcatcaaccgacagattttgatgctgctttccgcattccacgtttcaacccctactctggtttataaacactggttgaatggagctttgtactatctgtttaatgcccattccgctgaaaaccagatagatgcaaggaagtacctcgggtatctggagcatctcgcctccgcgtttgtctttcaaaacttcctggcagaacaagaaccaaaatcatattttgagattatctacggtaaagagctacatctccaacctgcggtactgtcggacaagattaagaagaagatgcgctttgggatgatagcaaacaacctggtattcaattatctggactacttactctggtgtcgtgacagaaataaagctgaagtagtcaaacgttttgaatttaccttccggagttcagtagagcatttctatccccagcaccccatggatggctataggacattaccagatacatcgttgcataccttcggtaatctcagcctgattagccacagcaagaattcgcgactgagtaatttccagccaaaacaaaagcaagagcacttcgaagcgagtcttgaacggaatgaaattgatagtctgaaactgctcgccatgatcgagctgatgaagaagaacaatcagtggggggaagaagaaatcgccactcacgaagcggaaatgctggcagtgttaaccagtgcaggtggtagtgatagcgaatttagggagatgttatga

SEQ ID NO: 193875 - DNA, 1434 bp, Klebsiella oxytoca
atgaaacatgcccttgataagacggttctgtcggtcaagggtcttttgagcctgactgacgtagccattccggcctatcaacgtccttataaatggacggtaaaaaatatcagcgaactgtttgcggacataaacagtcatctcgataaatcggcctaccgcttgggctcagtagtgtttcatcagcctgagagtaatgaagaacatagactggatatcgtcgatggtcagcaacgaactttaacattaatgctggcagtatgggccattatcgaaacccgacttgctgaattggaacgtcaggatttgcaagaagcgctaacccagctaaagccctccattgaaggttttatgggacggcaacgctttgccagtcagatatcggaatacaatctgtaccagaattatcaggagctaaaacgtagggttagccatcgagaattcagcgagcaacatattgattttctcctcaaccgctgccagttggtggtctttgtgctgactgacctgtctgaagcctttcagttcttcgactcacaaaatgcccgagggcgggatctggatccacacgacctgcttaaagcattccatttacgtgaattcgccagccatgaggtagaactaaaagctgcatccgttgcccattgggaaggattacccagcgatgacctggctaatcttttcgcatcctatctctacagggtacgtcagtggtcacagggaaaatcagctcgtttctttggtaaggatgaagtcggcctattcaaaggaatcaaccttgatcagattagtcagttcccttatgtggaatctttgcgcatagctcaccattttgtagatgactataacaatcagtaccagcgcaagattgatggccagaaaatgcgttttcctttccatctcgatcagatgattatcaatggaagacgctttttcgaaatggcagaacactaccagcaacaggtatcggcaattatctcctgtgagcatgccagcactcatactcaaaagccgttaatgattcagggcatagtccttggtgaaatggcaactcagatactaagaacgttaaatagctatcaaaatcgctatcgaacaggggatcaatatatacgcactatgtttgattgtgctctgatcttttatatcgacaaatttggtgggcagtcgttatctgcagcgattgaaaaaagctttatctgggcctatagatgccgaatccgacagcaggtggtacagctagcgactatggataagtacgtgctggaaaataatctgttccgggtaatcaaagaagccagattacctggtgatgtgctatctataccattactcacaattcgggcttcagaaaataataataaccgccgtaccggtaaccatgagcaagacgagctggtgaggctgttcaaggagatgaactactatgagtga

SEQ ID NO: 193876 - DNA, 1329 bp, Klebsiella oxytoca
atgaaaacgaataaatcacagaatttgaaatcgatcccaactggttataaacagactgaggtggggattattcctgaggattggaaagttagtagtattggagacttatgcgttatttttggacgaataggttttagaggttatacaaaagctgatattgtatcacaagaccaaggagtactaagcattagtccgtctaatatatttgatggacgtacaaatttcacgcatggaacatatatcactcgtcagaagtatgaagagtcacctgagataaaaatatacgaagacgatattctgctagttaagactggttctacctatggaaaaatagcgttagtaaaaaatttaaaagaggatgcaaccctaaacccccaggtagtagtctttaaaagactaaaaattcctgctgcatttctggcatacataatgcaatctgatattgtgcaaaatcagattgaggaaacaattgttggtggagcgattcccacattatctcaaaaggtagtttcaaattataaaatccctctccctgctccaagtgaacagcttgctattgctaatgtgctctccgaaactgatgcgctgattatcgcgatcgagaaattaatcgccaaaaaacaggcaatcaaaactgccagcatgcagcaactgttgactggccgtactcgcctgccacaatttgctaaacatcctactggggctcataacggctataaaactagtgatgttggacagattcccgccgattgggaagttcggcccttcggagagatcacacggttaagctcttctagaattaacccaaaaataaaggggggaggtgatttatgtatagaattagaacatattcaacccaacactggttacttactaggtaagacatgcacaacgagagactcgtcattaaagaatacttttgaaccaggcgatatcctttttggaaaattgcgtgcttatcttaagaaatactggtttgctaatattagcggtgtttgttcaactgagttttgggttttcaaacccgaagatcagctagtcatttcaaaattcatctattacattatacaaaccgataactttatcgccaccgcagcagagtcttatggcactcatatgcctcgtgctgattggaaggtagtaaaagattatcaggtcatacttcctaaaattgaagaacaaaccgctatcaccaccttcctctcagatatggacgctgaacttgaggccctagaacaaaaactagccaaggtccgtgatatcaaacaaggaatgatgcaacaactcctgaccgggcgtatccgtttaccattggatcagcagccatga

SEQ ID NO: 193877 - DNA, 2454 bp, Klebsiella oxytoca
atggctatcaagaagaacgaactttactcctccctttgggcgagctgcgacgagttgcgtggcggaatggatgcttcacagtacaaagactatgtgttgaccctactgtttatgaagtacgtctctgacaaagctaagggcaacccttacgcgatgattgaagtgccggaaggtgcaagtttcgacgatatggttgctctcaagggcaacaaagaaattggcgaaaaaattaacaaaaccatcagattactggctgaagctaatgacctgaaaggtgttatcgacattgccgacttcaatgatgaagacaagctgggcaaaggcaaggagatgatcgaccgcctttccaagttggtggcaatcttcgaagggttggatctctcagccaaccgcgttgatggagacgatctgctgggtgatgcctacgaatatttaatgcgtcactttgctacagaatcaggtaaatccaaggggcagttttacaccccggcagaggtgtcacgcattttggcgaaagtgattggcatcagtaaacagacaccacaagatgctaccgtttatgaccctacctgtggttcaggctcactgctgttgaaagccagtgacgaagccggtccgaaagggctgaccatttatggccaagagatggattatgcgaccagcgcactggcgcgcatgaacatgatcctgcatgacaacgccactgctaaaatctggaaaggtaacaccttagccgatccacattggaaggatggcaacgataaccttaaaaccttcgactttgctgtcgctaacccccctttctccaacaaaaactggactagcgggctagatgctgcgaatgatacttttgaccggtttgtctgggggactccacctgaaaagaacggcgactacgctttcctgctgcacatcatcaagagtctcaagagcacaggtaagggcgcagtgatcctgcctcacggcgttctgttccgtggcaatgctgaagcgcgtattcgtgaaaatctactcaagcaaggttatatcaaaggtattattggcctaccaacaaacttgttctatggcacaggtatcccagcctgcatcatcgtcatcgataaagaagatgctcgactccgtgcgttaaatgctaatggcgagagtcagcaaggcatctttatgatcgatgccagtaagggctttattaaagacggtaataaaaatcgcctacgcgcccaggacatccataaaattgtcgatgcatttaatcgtgaacaggaaatctctcgcttcagtcgcatggtcccgctgtcagaaattgcggccaacgacttcaacctcaatatccctcgctatatcgacagcagtgatcctgaagatctgcacgacctttctggacatttggctggtggcattcccgatcgcgatattgatgctctaagtgcttactggaaaattttcccgactttacgtcaggatctgttcgaacctgcccgcccaggctacagcaatgctcgagtcgaagcaggtaaagttaagagtacaattctggcacatccggaatttgccgctttcaaagcaggagcactgataccatttgaagaatggtttacaagttgtcagcttgacgaaattgctctcggcgactcaccgaaacagcttattgaagaaattggcgggcgacttctcgctgcatatgcgtctgaagcgactgctgacactccgttgctcgagaactacgctatctatcagttactaatggactactggatggatgtgatgcaggacgatgtttatgtcctgagccaggatggctggcaggcgggtaaagtacttcgtgaacttattgtcgaaaaaggcgaaaaactcaaagaaacgccggatttggtaattggcaaaaagaaatataaggctgaactgttgccaccagcccttttagtggctcgctatttttctgcagagcagcaacagatagaccaactacaagtcgtttatgaggaagcagttcaagcattggaaagtttccttgaagaaaataacggtgaagatgggttactggctgatgcgatgaacgacaaagaaaaagtgactgctgccagcgttaaggcacgacttaaaattgccacagatatagaagaaaaggcaatactgaaagccgctcaggcattgttcgatgccgaaacccaatccaagaaagcgcataaacaagcacaggaaaatctggatcatactgtatttgctcattatccaaaactcactgataacgaaattagaaatctgctagtacaggacaaatggcacgctagtttaattagtgctttagaagcagagatcgagagtgttacgcagcggttggcgaatcgagtgaaagagctcgaagaacgttatagctcaactatgcatgaactcacacaattagtggctgaggtagaggccaaagttgcggttcatcttaagtcgataaagctgtga

SEQ ID NO: 193878 - DNA, 573 bp, Klebsiella oxytoca
atgcaaaacaaaccgcaatgggagccagactggtatctggaatctcttctgaatatccatattgacgaaatggttgatcgctatgcctgcctgcgggcactccgaatcgacttgttctatcagcatcacaccgctaagcactacctgcaaaaccacaatcatcttgaatgggatctccggttactcatggattacatgatgcaaatgggcgcagtcgtgggttatttctgggttatcgaatggacagaagaccatcactaccatgcgcacgtagtcttctgggtagatggcaaccgcagtcggaaggtttatccctgggctgagaaggcccgtgagttctggacgttaattaccgaaggtgacgggggcttccatcgtagtgaatacaaaaaatattacagagccaatattaatatcccggtgcgttacagcgaaccagacagtatcgacaacatccgacaggtgttggcgtatatgaccaaaattcagcagaaacatggcctgctgctgttcggctgcaacgatgtccctgaacgaccagcaaccgggcgaccacgcaagagtgacttctga

SEQ ID NO: 193879 - DNA, 873 bp, Klebsiella oxytoca
atgcaaaaaactgacggccttctggccattgagaagcctctagcttcactgcctcccactcttcgcagtcttattcttaaacgccttcgtagtctcacacagtacgagccggttattggcattatgggcaaaagtgggtcaggtaaatcgtctctctgcaatgccctgttccagggcgaagtcacgcctgtcagcgatgtggcggcctgcacgcgcgatgtgctgcgcttccggtttcgcaatggcaatcacagcctgatgattgttgatttacctggtgttggtgaaagcgagcaacgtgacgaaaaatacaccgcactgtatcgtcgcatcctacccgagctggatttggtgttatgggtcatcaaagctgatgatcgggcactgtcagtggatgaacacttttatcacaaagtgatgctggcgtatcagcgccgggtgctgtttgttgttaatcaggctgacaaggccgagccctgccatcagtggagtgttgccgataacctgccttccctggctcagatgtcgacgattaaggcgaagcgaaatgccgtacaacagcagtttctgccgcatcaccctgtttgtgtggtatcagcacgaaccgggtggggtatagaatctctggtagataccatgatgaatagcctgcctgaccgggccaccagtccactaacgacacagttgcatggcaggctctgcccagagccagtaaaaaagcaggcacgcgagcgctttggtaatgcagtggatgaaatgattggcactgtggagtcatcatcttttctgccagagcctgtaagggctgtgattcgaaccgtacgggaagcagtggtgactgttgcccgtgccgtctgggactggattttctga

SEQ ID NO: 193880 - DNA, 501 bp, Klebsiella oxytoca
gtgaccgcgccgctgtggcactatcttgatcggcttcaccctctgctgtggcgccagggccgcgacttcccggcttcgcccgcccgcatggatgccatgcttaaaaatgggaccctcaggctgtccatcacctttaacccgctgcacgcgcagcaaaaagcggtcagcggcgagctgccgaaagacagctacggtttcggcttccgcgaggggatgcttggcaacgtccactttgtggcgatcccggccaatgcccgggcgacggcgggggcgaaagtggtcgcgaatttcctgctctcgccgcaggcccagctgcgcaaggccgacccgactgtgtggggcgaccccagcgtgctggatccggcgaaattaaccgagactgagcggcaggcctttaacgccgttgtgccgcagaatatgccgccgatgctgggtgaaccgcacgcggcctgggttgacgcgctggagcaggaatggctgcgccgctacggcacgcactaa

SEQ ID NO: 193881 - DNA, 1536 bp, Klebsiella oxytoca
atggctgcgccgctacggcacgcactaaggctgctggcctgggccgccgtcgcgctgatctatctgccgctgctgccggccgctgcgctgatggcgcttccggcgctccgccgcgcgcgctggctgtcgctgtttgccgacccgcaattcagccaggcgctggcggcgactctcgtctcaaccctgctatcggttggcggcgcgctgatcatcacgctcaccgtcgtggccgcactctggccgtcgggcggctggcggcggctggccgcaaggctccctctgctgctggcggtacctcacgtggccttcgccaccgcagccctgctgctcttcgccgatggcggctggctcccgcgcctgttgcccttttttaccccgccggttgaccgctacggcattggactgggcctgacgatggcgctcaaagagagcgcgtttctgctgtgggtggtttatggcctgttaggcgagaaacgcctggccggacaggcgacggtattaaaaagcctcggctacggacgctggcagtgcctgaaatggttagtcttgcccacgctgcttccggcgctgtcgatagcgctgctggccaccgccgcctggagcctttcggcggtcgacgtcgcgctggtgattggcccgggtaacccgccgacgctggcggtgctggcctggcaatggttaagccagggcgatgagatccagcaggcgaaaggcgccctcgccagcctggtactgctgctgacgctcgccatcatggcgctggcggcgtggggagtctggcgtctctggcgacggcggatcccgcaggttcaggggatccgccgcccgcagccgcgggcgctcgccgggaaaagcttcgcccttcttctgccgctgtgcggcgtggcctgcgccctgctgcttgccgcggcggcgcagaatagccagccggtcagcgatagcgtcagcaacagcctgtggcttggactctgctcagcgtcgctcggcgcggttatctgcctgctgtggctggcgtctggcccttcccgtttcgacggatggatctggctgccgctgattttaccggcgctgccgctggtagacggccaatatcagctggcgctgtatacgtggctggacggcgagtgggtcgccgttttatgggggcacctgctgtgggtcgtgccgtggatgctgtttattctgcgtcccgcctggcgcgctcgcgacccgcgcatggagctgctcgcccgcaccctcggctggcaacgaggccgcatcttctggctggttaccttacccgccctgacgcgtcctctgctgaccgcgctggcggtgggcttttcggtaagcatcgcgcaatatctgccgacgttatggctggggggcggacggttcccgacgctcaccagcgaagccgtcgcgctgagcagcggcggcgagacgtccactctggccgcgcaggcgctatggcagctactgctgccggcgctgttttttgccgccaccgcgctgctggcctggctgaccggccgctatcgacaaggattacgctaa

SEQ ID NO: 193882 - DNA, 657 bp, Klebsiella oxytoca
atgactgattataattcccagacattgtatattaagtcttatgatgtcactacctttgcttcccccagcaatacttcgccttatgaagatattggaaaaataatgtctgagatccaggatgacattatattacagcaacagacaaatcaggatgataaaggtttgcgtcctggcgcaactatttttattccagcagggcgttatcggttacaaaccacttttgttatcaccattaactacctggtaatacaaggggcgggccatggatggatgagccaggcaagtcgggatgctccggatacagatagcagtggatggcttgaaacagcccctggagccagctttattgagctggataccagttcaactctgacggcaatcaaaattgaacgagatgattttgctaccactgggcgaatatcaggcgttgagctgcgtgatttttgtatcggtctggtggttgccacgaatccctacaatacaagcggtacaaaagggatcgatatcgcgagcgatagcgattcattacggattgaaggcatggggttcagccttcttgaggaggctatggtggtcagaaatgctgactctatttcaatcactaataattttatcggtgaatgtgctaaggaaggtgcgaacaagttcctgatatga

SEQ ID NO: 193883 - DNA, 804 bp, Klebsiella oxytoca
atgaatacatggttaaatttgaaagacaaaataattatcgtgaccggcggcgcatcaggaatcggcctggcgattgtcgatgagttattagcccagggcgcaaacgtgcagatgagcgatattcacggcggcgacaaacatcaggatcgcgataattataatttctggccaaccgatatttccagcgccagcgaagtgaataaaaccgtcgacagtattattcagcgctttggccgcattgatggtttagtcaataacgccggcgtcaacttcccgcgtttattagtcgatgagaaagcgccgtccggtcgctatgaattaaatgaagcggctttcgaaaaaatggtcaatatcaaccagaaaggcgtattcctgatgtcgcaggcggtggcgcgccagatggttaaacagcgcagcggcgtgattgttaacgtctcgtcagaaagcggtctcgaaggctctgaaggccagagctgctacgccgcgaccaaagccgcgctgaacagctttacccgctcctggtcgaaggagctgggcaagcacggtattcgcgtcgtaggcgttgcgccgggcattctggaaaaaaccgggctgcgtacgccggaatatgaagaagcgctggcctggacccgcaatatcaccgtcgaacagctgcgcgaaggctatagcaaaaatgcgattcctgttggtcgctccggccgtctcagcgaagttgctgattttgtttgctatctgctctcagagcgcgccagctacattaccggagtaaccactaacattgcgggcggcaaaacgcgcggctaa

SEQ ID NO: 193884 - DNA, 762 bp, Klebsiella oxytoca
atgaaaaagcggcgagtggtcattggcgtcctcggaacggtgctggacaaacgcggcaagcgggcgaatcgctttaaaaaatggcggcctaccgttgggctatgccagcaggccgattttcctgtcgacaggctggagcttctccaccagccgcgtgatgaaaatatggcgcaaaagctgattgacgatgtcgcccagctttcgccgcataccgaagtgcgcccgcatacgattgagataaacgatccgtgggattttgaagaggtctacgcggcgtttctcgacttcgccaaccgctatcgctttgataccgaaaacgaagagtatctggtgcatatcaccaccgggacccacgtggcgcagatctgctggttcctgctgaccgaagcgcgctatctccccgccagcctgctgcagaccagccctgcgccgaaaggcgcagcggatgacgccgtcgccgccggtatttactcggtgatcgatctggacttaagccgctacgccacgctcaccagccgctttcagcgcgagcagcagcagtccgtctccttcctgaaggcgggtatcgagacgcgtaatgcgacgttcaacgcgcttatcgatcgtattgagcgcgtggcgatccgatcgaccgatcctgctgaccggcccaacgggcgccgggaagtccgtcctcgccaaacgtatttttcagcttcgtcagtcgcgccatcgggtggcgggaaaattcatggcggtaaactgcgccacgctgcgcggtga

SEQ ID NO: 193885 - DNA, 1425 bp, Klebsiella oxytoca
gtggaaacattcaaatttacgaaagttaagctcgaaagcttgccgccggccgaacgaggccaggttgagtacggcgatactattgttaatggcctacgtatccgtattggcactagtggtgtgaaaagcttctgtatctctcgtaagagaaatggaaaattcatccgcgccacgctgggccgttttccggatcttactattgataatgctagggcaaaggcactcgaaatgctgggcggcgtagcgaccaccggaagaaatcctaatgtggaaaagcgtgttaatgagaaggcatctgtcacgcttgccgatgcgctggatgcctatattaagaaccgtggtcaccgccttaaatccacaaccgaaaagcaatatcgcgctatcttacaaaattactccggcgactggatgaaacagtccctcgctactatttcgcgtgaacgtgttgagcaccgtcacaaagcagtaactgatggttcagtctggtttggcgctgataaagaaacgcttcgggctggggtaggaagcggtagcaaagcccaagctgacctgtgggccagagctctacgcgccgtttatcgtttcgctcatgatcattatcgtgatgaagaagggagaacactgttacctgacccgccaacactggtgctgagtacaaagcgtcagtggcatggcacgatcagaaagacggagcgcatccgcacccatgactttgctcgttggttaaatgccgtcgctgtagttcgtgataaggccgaagaagaacgagactatgtagctgctgcaatatgtgacgctgtagaaatgtcgatgttcaccgggctgcgtaaatctgaaatattcgaactaacctggaatcgggtcaatattggcggtcgttatttctggatagataccaccaagaacggcgatccgctcgagctgcctatcactgaaactctgctgaatctgttccggcgcagactgaaaatgaaaaacggaaatgaggctttagtgttttctggagttaaaggaatcattaaagaatatcggcatgtaattgatcgaatcagtgccgccaccgtcccagctcccaatcctgatatgctccaaccaatcccattcaaatggcatgatgcccgccgtacattcggtaccgttgctgagctggtgggcgttggtagttacattctcaaaagactgatgaaccaccgaacgatgcggagcgcagatgttacgcaaggttaccttcatttcggtgctgacgaactgcttgagccagctacccgaattgaacgggccatcctagaatatgctgggcttgtcgaaagccagaaagccattgatgcacagttattgtctgcgttaggcaatttgactgatgaagataagcgcaagatgctttttgaaatactaagccaaaatcatatgcaggttaagaaatga

SEQ ID NO: 193886 - DNA, 615 bp, Klebsiella oxytoca
atgagttacttaaaacgagttgatgccgagcatgtggcaagaatgtatgcctttcagcaattggtaaaaagttactcttcggaaaaagctgatgagcatgtgaatcgtattgaaaaagaaataactgggaaaactattaaagaaaaaaaatggatagcgaatagcctcaccgaaatgcaacttgtagagaaaaacaggccgttatcggatgatgaaaatgtgttggttaaagctgtgaacgtactaacagttcttggatatacagatctagccaaggagttaggcgctttggcagaaagagtcgggcgatgtgtgacgttatcagatgtttatatgaatcaaattattgacggtgcggtgaaaaaaaatagaagtgacgcagcatcaggacaccgacatcatctgcatgatgaaattgtggcaattatcaaagccacttgggagaaaaaccctgctttatctaaaaagaaaatgatcgcaaagttgatgaatcgttatgagggtcgagttgatgaaggaacggtggatagctggataaaaaaagaaaagttattaccgcctaagccaaagaaatacataatgtctgaattggtcgttccgaccccctataagtag

SEQ ID NO: 193887 - DNA, 207 bp, Klebsiella oxytoca
atgcatttggttgaatcaaatttttctaaaagactcactcgtaatgaggctgcagctcatcttggtgtgaatccccagacgttggcgaattgggcgcatactggcaaggtaaaaattccctttcacaaggtcggtcggaaggtcatttacttcaagtctgatctggatgcttatctagattccacccgcagaacgcagacggtttaa

SEQ ID NO: 193888 - DNA, 261 bp, Klebsiella oxytoca
atgaaaaatcatatcacacatccgcaagggcgggattggcacaacctgaatagattcacttggcttttccttggaacgccgaagggacagacctgtacacctgtggttatccgcgttgcagccgacaccgaagaagaagcccgcgaatgctactcccgatgggatctaacctttgccgcgaagattcgctccgaatcctctctgttcctgcacgccgccggtgtttatgaattgaatgcaatgggggttcatcatggatag

SEQ ID NO: 193889 - DNA, 300 bp, Klebsiella oxytoca
atgaaaaagaaaattaacagcttgactgctggtggccaggctcggtctgaaatcttccctggagatattttccgagataacaggggcgagcgtgtaacggtgaaaattgtcgctgataaccggattacatatatcagggaggggtattccggagagtgcgttttcccggtcgaaagatttagaagggagttctggccggtgaaacgccagacgttcagcgaatggtgtgagtcgaataacacagcagaaaaaattcataacctgcgtgctttaattgctgctaagagagcgggcaaatga

SEQ ID NO: 193890 - DNA, 1800 bp, Klebsiella oxytoca
atgaaacgtgcaccgaacttaaaatttctgccaaaggaaaaatttacggaagcgattatttttgctgggactgatgcctacgctcatgcaaagggatgggaagaggggttgggtaaaaaaattgctgaagacactacgcctcctatctatcttggaccaaaacaactggcggaactggatcacctgcaaatcatcgataatggtcgccgtagtgcgcgtgtttatctggccggaaacattgagccaataatgattaatgctattggtgagaaactggcccgggcgggagtgcaggatgcaaaactgtataaggggatccccgaccgacaaccagaggactggcatgattatctggagagaatcagggcggataatgtggttgttgatctcccgatcataaaacgtgaaccagccaatagcggtgtggcaccggcattgaatcagatgggagcaagccaacgaggtgaagtgttgctggctcattatgatggcgatctggcaattcatgccgactctgacaccgtacaccactacaacggtgtggtgtggacccctttgccggataaagagctgcagcgcgaaatggcacagatttacattgatgctgaagtggcctattcacagaacgccgtcaaatcggcagtagaaactatgaaactaagcctgccagttatgggtgtgacagctcgaaatctgattggctttagtaacggggtatttgatacccggacggggcaattcagacagcatagcaaaacagactggttactgatcgccagtgaattaccattcagtccaccagccgaaggggaaacgttggccagccatgctcctaatttctggaagtggctccgtcgttccgtagccagtaatgaccgtaagacagatcgtgtgctggcggcgttgtttatggtgctggcaaacagatacgactggcaattatttctggaggtaacagggcccggaggtagcggtaaaagtgtgatggctgaaatctgcaccatgctggctggcaaggctaatacggtttcagccagtatgaaggcgttggaggatgcaagagatagggcgctggtggtgggttactcgctgatcatcatgccggatatgacccggtacgctggcgatggtgctggtattaaagccatcactggtggtgacaaggtgtctatcgatcctaagcataaagcgccatattcaacccgtattccggcggtggtgctggcggtcaacaataatgctatgacattcagcgatcgtagcgggggcatttcgcggcggcgcgtgatattcaacttctcggaggttgtaccggaaaacgaacgagactcgatgctcgcagagaaaatagagggggagctggctgtagttatccgccatctgcttacacgttttgcagatcaggacgaagcaagacggctattgtatgaacagcagaaatccgaagaggctctggcaattaaacgtgaaggtgattcgctggtggacttctgcggatacctgctggcgtcggtggcttgcgatgggatgtttatcggcaatgctgagatagtgccctttagcccacggaagtatctgtatcacgcctaccttgcatacatgcgtgccaatggtctcaacaagcccgtatcgctgatgcgattcggaaccgatatgccaggtgcaatggctgagtatggcaaggcgtatcagaagagaaagactaagcacggtattaggtcaaacgttacgctacacggcgactcagacgactggatgccatcctgttcaggcacttctgaaaatagcggggtagagtaa

SEQ ID NO: 193891 - DNA, 246 bp, Klebsiella oxytoca
atgcctataactgaaacggaatggaaggagcaccatcagaagttcggtacgcaaagtatcgaaactatgtcgatagaagactatcggcgtgctttggtggaagaggcatttttttgggatgaaccacacggttttatagttcataccctttccggagaacgtatcgtcacaaatactgagcaacttgatacgttactggagcacttagagggttatagagataatttaccattacttcacacataa

SEQ ID NO: 193892 - DNA, 522 bp, Klebsiella oxytoca
atgataaaatacatagtgtatgcaattattgcagccttattaaccctttcatttaaagggcgcgttgtattgctcagttacaatgactacaaagatacattgggcgccttattgaatatatcatcaataatatttgccattattggcgcctggattgcaattgtttacccaagagcaatggcacgtattataaataaaaagaactctcctcataataaccaatccgagagtaacgcatctcatagagatgcaaactatctgagcgaactcgtagagatagtaatggtgtcagcattagtattaatggctgttctattaatacaatttttcgctcccatactcaaaggtttaatagtcaacacctatataccatttgttaaatactttaattttggctgtattagcttccttacaattgcacagtttactgcgatattccgtgtaatactcgttaattattttttcttaaacgagctgagagggaaaaatgccaaagataaaattgacgagctacatcgataa

SEQ ID NO: 193893 - DNA, 1035 bp, Klebsiella oxytoca
atgctaactgcaaaagtgaagttttataacatcaatagatgtggttattacaagtatagttctaaggttcccgatctgagcaatacatcagacgtactgctcaaactgaacgattgggcttcagatggaagggagttcatcaacacaggcacctacaaggctgaaaaagacgaagatattctcaatacttatttctgcggcttagcaacagacaaacgttacggagatcaccttttaacactttgggctgaagttcccaacgactcaggtgtagtctatggtatgccgccactagcgaaaccgggaaaagtggatatgttaaccactggattcgacatcgataaagctattcctggtttcccgtgctacttttggttcattcctcaattaaacgtatttgcttctataaagtttgatcattcattaatgggcaaaggacacctcgataactatttgaatggttacctcgctaataaatcaccatatagagtttttgatgaggataacaaagttattggtttttccgtagatggaaaaaaatcaaatgactcatcaaaattaaaaccaaatttttatgcagtagggatgaagtacgatgaagttcaagctgagctcataagcaacctaagtaaaataacgaaaatacttaaaagggaaaaaataacctacagagctccagacgatagaaaaataattgaaagagtattctctggcttgttaaaaaatgccccagacagtacccaggaacgaacattgcttcatgagatggaatttaagccaactgagaccgaattaaagtccattataaaaagctataattcccttgaaaatacctcgtctatcaggaatgttggctttaaatatagtgacggaagggcaatatggcttagcggtgctaacgtttccttcgagattgaattgaatgttagaagaaaagacaatcacatcatccccccaggaaggttactttctgctataataaagcgcagggatgaattaataaccaaaatgaagactccaccaacaggggggtga

SEQ ID NO: 193894 - DNA, 339 bp, Klebsiella oxytoca
atgagagccggaaagatgaaacgccgcgtcacttttcagaagtcagaatctcaccgtgatcagatggggcaggttatctctgtgtggtctgaccttgccaccgtctgggctgaaatccgcgctataagtgggcgtgagcgtatgtcttccggggcgctctactccgaagccactgtacgaatctggacgcgctaccgcgacgatatcaccaccgcaaaccgcattttgtaccgctcgccaaatgttcgggggcaggtttacggcattgtggccgtcattcctgatgtggatcacacccggcttgagctgctgtgcaagggaggcattttcaatgaatga

SEQ ID NO: 193895 - DNA, 294 bp, Klebsiella oxytoca
atgaatgatttaattggtctggaagaagcaaagctgcattgccgtattgatgatgattatgaagacacgctgatacaggcgtacatcgatgcggcgctggaggtttgccagaagcatatcggcaagcggtttgataacgggctggagtttacgccagctatcaagattggctgtctgatgtacgtatctcagctgtacgagtaccgcacgatgattggtgatactgacgccaaagagataccgatggctgtctctgcgttgtggtctgtatatcgtgatgtgggggtgtactga

SEQ ID NO: 193896 - DNA, 183 bp, Klebsiella oxytoca
atgctttcgcaaccgctgacaggccgaatggacggggtgggggaggttttcaggacaaacccctctcagcgaggaaccacccgccccctcaaatttttacgctcggtgatttttttgaaaataaaacgtgatggaaacgagaaattttatggcaagaccaccaaaaccgccagcttaccttga

SEQ ID NO: 193897 - DNA, 288 bp, Klebsiella oxytoca
atggctgatgtaaaaataaaatgcattactttatcgggtaccaacaggattcatgaacacattacccacgtaggaagcgatcaattcactcctgcaggaactaaatggacagttgaagatgtcatctattcgattgaacaccgtttacatactttttatgtaactgatagcaatggaaaaagagccgatgtaggtgtggttgatccgaaggacggaagaaagaaatacattcgcacttatgcagatgggtattacaataataacttattgtcattaccaatttgctga

SEQ ID NO: 193898 - DNA, 540 bp, Klebsiella oxytoca
atggccaacctactttatgtcgacaattccaatgtttggatcgaaggcatgcatgttgcggctttcaaatcaggcatggttccagacgtttggactgctgtaaaaggcaacatttgtgatcatgattggaaaatggactttggacgtctttttgcatttgctgggggcgataaagttagcgtacgcaaagccactctttttggttccagaccacctaaaaatgattcattatgggtagcagccgagaagcaaggcttcgaggtagtcacttatgatcgtaatgttgcaaactctgagaaaaaaattgataccgacattgttgcaacaatgattgaggattcttttacaattttgcaagagggtgacgagattactcttgtctcaggcgattccgactatgttccggcgatagaaaaactaaccaagcgtggcataaatgtacatgttgtgttttggcagcatgccgctcgtgagctaaagcaagcagcaacaacattcaccccactggatgattatctcgatcatttggcaaaaaaataa

SEQ ID NO: 193899 - DNA, 420 bp, Klebsiella oxytoca
gtgaccgggcgctttcttaatccctggattcgccatcagctgctctctatcgccctgaacggcatgaccaaatttcgcacccggatcctgccgcagctgctgacgcatatccgccagcacggcgcaatcccgccgcggctaacgttcgccctggcggcgctcatcgccttctatcgcgggcagcgcgacgggcaggcgtatccgctgcaggatgatgacgtctggctaagccgttttgccgcaggatgggcgcaggtggcgcaaggccgcccgctgcatgaactggtcaccgaagtcctgcaggataccgggcactggggtgaagatctgacggcaataccggggcttgccgaacaggtcacgcggtatctggaagtcattttgagcgcggggatgcgggaggccctgtcgcggctgtaa

SEQ ID NO: 193900 - DNA, 285 bp, Klebsiella oxytoca
gtggccgtgaaatgcaaccgggataccatgatcaagataatcaggattgccttctatgatagttgtagggccatgtcccggaaccgggcaggacactttgtcgcctttgcgggcaacaccaataccaccgaatttcatcgtttcagaagcggtcagtacagaaccgccgtgagtggttttatcgcctttacgtattatctgaagcatactatgccttttatttataggggggatttacaggatgctctcttccaaaatgatatttttaattacatcattatctag

SEQ ID NO: 193901 - DNA, 1704 bp, Klebsiella oxytoca
atgaaaagtttctcaataccctctgctgatgaaggcatcacgattgaattttggctgcgccaaaagaaaaataatgaaccgctacctctattagttattaaaagtgataatcaactgctatataaaatccaggaaggggctggtttttttaattattatcattatacccaccatcaaaagggggagttaaccttaagctatgatgaagacagggcagagatatcccttttttattactatgataaaactaacgtctatcatcaaggcgttatttaccttattgataatggcaccggtctgcaatgctacccaaaatcaaagctgaaagagtggtatacgcaagaaacattcagacctcaactgcatttttcaccttttcaggcatggatgaatgatccaaatggtttgtgtaagatagatgacacttatcatatgttctaccagttcaatccaaacagtaccgagtggggcccgatgcactgggggcatgccatcagtaacgatttgatttcctggacgcatttgccggtatttaaccatcccgaacatcccctggcttctctgggggcgaccggtggggctttctccggtacgacctttatcaataacgaaggcgaggcggaaattttctatacggaacgtctcccggcctacgatctctataaggattatattgaagtacagaagaaggccgcaattgatcgctatggtattaaagcaacgcatatccagactattctggagaaaaaaatagaattagtcggctgtgatattcgcgatcctaaagtttggtttgatagcgaaacgcagtgctatcgaatgatcctcggctccgtttatgacgggaacccgtccgtgcttcaatttgtctcacgggacagtgaggaatgggcgtttgaaaatgtcctgtatacggcgccgggatattttgctgaaaataaaggccgttgcgttgaatgtccggattttttccagctgggcgctaaatgggtactgactatcggtattgtcggttaccaggagccagagacaaagcgtcacaatcttctgtacgccattattggcacatttgacaacggcgttttcactgcggaaagcgagatgcaagtgctggacttcgcgacggagtattatgcattacaaacgttcaaggacggccagcgccaggttggtattgcatggctatttaattgggcaatgaaaaagccaattaaatcatcatataacggtgaaatgtctattccaaaagaaatcttcattaacgccaacaataaagtcgctatgcgccccgttaacgaacttgaaaaatacgttgacgaatattgtgacgtcaaattgaaagccggtgaggaccatcgtatcaacaagggaaaatcattaaggatccgcttagagcagggtttacagccgaacgaagacctcatattggccggagataagggggaatggctggcgatttcataccgcgatggctatgtgagcatagaagaaaccgccgtgagtgaagcgcaataccgggctcgcgcagcagagataaaaaatctcgagattatttttgatgcgggaattgtcgagctgtttatcaatgatggtgaaatctgcgcaacgaaacgcagttataaactatcacactgtaagcaattaaaagtgaatactcttcgcgaaaaaaacatacgaatcgaaaccttacatacaagctggtaa

SEQ ID NO: 193902 - DNA, 282 bp, Klebsiella oxytoca
atgtggacaacaactgcgctacagcagcagctttgtgctggtgaaatcgcagtgtcaacccgaaccacaaaagaaaaaaactggctgaagttttatagtctgtatatgcatctggatccggtcgctgactatccgaagtctccttgttataaagtcagggatggacacggtggtatactgttacgccagtataaaaacggacaatacggcttaccggagggggaaccggacaacgatgaagccgggacatattctgctccggaaaaacgagaaagagcctga

SEQ ID NO: 193903 - DNA, 621 bp, Klebsiella oxytoca
atggcgcaaaacatttcgtggtatggcatgatagcacccgaagagagtcaattcagggtggtaaatgtgaaaccagtaacgctatacgatgtcgcagagtatgccggtgtctcttatcagaccgtttcccgcgtggtgaaccaggccagccacgtctctgcgaaaatgcgggaaaaggtggaagcggcgatggcgcagctgaactacattcccaaccgcgtggcacaacaactggcgggcaaacagtcgttgctgattggcgttgctacctccagtctggccctgcacgcgccgtcgcaaattgtcgcggcgattaaatctcgcgccgatcaactgggtgccagcgtggtggtgtcgatggtagaacgaagcagcgtcgaagcctgtaaagcggcggtacataaccttctcgcgcaacgcgtcagtggtctgatcattaactatccgctggatgaccaggatgccattgctgtggaagctgcctgcgctaatgttccggccctatttcttgatgtctctgaccagactcccatcaacagtattatttttcccatgaagacggtacgcgactgggcgtggagcatctggtcgcattgggtcaccagcaaatcgcgctgttag

SEQ ID NO: 193904 - DNA, 1545 bp, Klebsiella oxytoca
gtgatcctcacgctggtgaccttccgtggcgcccgggattcccgtctgcatgtgtcagtctggggccagccttacaccgaacggtactgtttccgcccggcggaaatcccgcgtccggaaattcacggcacgcttccggcccgggttgagagccgggagaagaatgatatctacgcgcacctggacgagcaggggcgctaccgggtgaagccggacttcgaccgggaggggacggaacccgcttacggttacctgtggctgcggatggcgaaaccttatgccggtgaaacgctgggctggcatacgccgctcatcgatggcaccgaagtggcgattgcgtacagcaacggcgatatcgacctgccgtacattgcgtatgcgctgcacgactctgagcacccggaccacgtcacccgtgacaatcacacccgcaacgtgctgcgcaccccggcgaacaacaagctgcggatggaggataagcgcggcgaggagcatatcaaactcgccacggaatacggcaggacgcagctcaacagcgggcacctggtggatgcacaggggcaacgtcgcggcaagggcaccgagctgcgcaccgatgagtggggaaccctgagagcggggaagggactgtttgtcagcgcggatgcgcaggcgaaagcgcagggtgacgcactggatatgagcgctgcgctgaaggaaatcgacaggcttaatcagcaactgaaacagctggaaatggccgcagaacaggcgcaggcgctgaagggggatgtcgacagccagatacagatgtttgagctgcggctgaaaccgctcaatgaagcggtgcttttctcggcgccggaagggatggccctgaccagtggtgaagatatgcagctggccgctgaacggaaccttgcgctaaacaccggagaagacttcagtgttggagtgatgggcaatgcgaccgctttgatcggggagaagctggggctctttgcccgcaccggtcaactgagcctgaaatccggggaagggccaatagatgtccaggcacaaaacgccagtatgcggttgtttgctgagaagacgctgacgctgagttcagcgggtgacatttccctggccggaaaaaaacgtatcacgctgatcggcggcggaagctatctgcgacttgaggcgggaaaggtcgagtacggcacgacagcgacgtatataaggaaggtgaagcggacgatgtcggcgggcgcggcgagtatgccattaaatctgcctgtgatgccactaactgaaggctttagggaatacttcattattcacgaccagaaaaccgggaaaccacttgaaaacttcccttacacgctgaatgtcaatggtaatgaactcagtggaaaaacgaatacccaaggatgcacacaatgtggctggacccgacagagcgaaaatattgaactgataccacatactgaacaatttaaccgtgtacttattaatgccagatactgggatgaaaaatcatctgtagatcttgatttttccagaactaatatggaaggtgaataa

SEQ ID NO: 193905 - DNA, 2712 bp, Klebsiella oxytoca
atgcttatacaagatcctactacgacagtcagattctactcccgtaccccttttggtgaactggcagctttacaagagtttagtactaattttccagatgaaagtgtctatcatgctgctttaaaagagataaaggtacatgaagcgacaaatagaaagctcagtgaattaattgcaaaaatatcttctaattttaatagttatgagcttttatccagaacaaaatttgttactagcgatattcatgagcgaatgcgagaaacagtagaagagcgcttacaatatttggtgagtaattctgttgcagcttttaattcactttggacttgccttgattaccaagggatgcgagttgctgatacgcaagataataaactgtcatcttgctcgcgtttaaccaaaaccgaccttataaatcttctttctcagtcaggttgtgtcatttctcctccaacagacattcaatctatttttaattcattcagaaaaacatcatcgattggtcgttcgtggcaaagagatattggtggtcatcgcattgacactcttttagttagtgaattaattgaggctatcaaaagcaagagccattccatattagtgactggagggccgggttcagggaaaacgtgtattctacttgaattgcaggagaaattagagcaattggcgcaatctgatagtgttatgttaccgttatttattcaatcgcgagagtttgctgatttagaaactgcacaggaacggcaatctctaggattagatgagcaatggattgaaaagattgcgcgtgtagctgacagctatcatgtaatagtcataattgattcacttgatgtgcttgctatagctcgagaacatacggtgctaacgtattttttagctcaaatagatcagctgttattaattccaaatgttaccgttattacggcttgcagagagtttgatagacattacgatagacgtatatctcagcgctcatgggataaagagtttaagtgccagccgttagattgggaaggtgaaatcatgccgttgcttgaaaaactctcaatcgactcatcagctattgataacataacgcgacatttaattagcaatccacgtgagttagatctatttataaatcttgctcaaagagatggtagttttaatatagtgactagccaagcgctagctcaacgctatattgattcaattatgttgacgaatccatcgctaggtgatgaagggaaaatagcacttgaaaatatggccacggaaatgttaaagcttcgtaccctgtcgataccaactcaacgatttactgcttcagatgacattcgtagaatgctacttagtcataatgttttgcatgaaactgaggataataaattaacatttgggcatcaaacgttacttgatgtattagttattagtagagcgattcgtcatggattgaccttaaataattttataaaggatctccctccagtaccttttgtccgcccatctattcgtagctttattgcacagcttgtcaatgaaggaagacaagagtttagaaaacagttacgaacggtgcttaccggaacttatgcttttcatatacgtcgcctagttgccgagtgttttgctgagcaattacctcaagatgatgattggccaatgttacgtgatttacgtaatacgcatcgagatgttttccaagttatttatagtaaagcttcacaagttgaatggcatcatttttggctaaggaatcttgttccggttttaaaaaacacgcgtgatgttgatggtataggaattcatacttaccgtatagcgcattggttaaatctagatccatcaggtgtcgtttatttttggatggaaatattaagatctgattggatagataagtcacaattgatcagtaagattgctgtttccatatcaaacataaaggaagatcatgcatatttgatgtctcctttattgctggagttatttaaattcccacaagaaaaatatagctttttaggtagagcccttgctcgctgtgttgctgtaggggggggcgatgatgcggtgctttgggattacatcattgctgatgttaaagatgaagacatactgtcatatcgttttggaaataaacttaagtgccgaccacacgaatttggtgataaggataataaattcctttcaaatagaatgattaattctattattttgttagaacgggctatatcgacacttgaacagtggagccaagtgcggagttctagatatgaagaaaaaaataattatcgaagtggttttctaagtggaacttctcattctgatgatcgcagaatgagagactttgagcataaagatagtcaacgtgtcctgatggatgctttagaagttgctattattcatcatgctaatatcaattctgagtggtggcaaaacaatcgtgaacgtttatgctttaatctggaaggttcacttcgttactttgcattgttagcatgcattaattctccgctaactaatcttgacatatcctctcgtttgctgttgaaagcggatttattaaagtctgagctttcacatgaattgggtactttagttcagaaagtttttatccatttgagttcagaatcccaagacgcaatacagattataatactttctctttctcagagatatactgctgtctcttatacacatctgacgctgccgacgagcgatctagtgtag

SEQ ID NO: 193906 - DNA, 1638 bp, Klebsiella oxytoca
atgcttaaagagcaggtcaagtttattatttgtataccgtgccatttacgctcatcgtcatgtgtaagtattttagatgaatatattcgttcaaactggccacttgaacataaaccagatgttaatggatggtgcggaatagtaagagctccgttctcatttgaaatttttaatgagcttagcaatgaagacgttctcagtcttcttgagcactataatgggtataggcgagactcatttagcgacatgttaattggtggagaggaggaagttgctcaacaactgagtgaggcatcctcaagggatccattacgatttttgttttttttatcttcttactggcaggatataaatgaagagttccgaaatcatattatggatggtgttgcacattatttgaattatcgttatggaaaccttcgccaaaataatgactggaaaccgattaatgaacctaatattgattttttagttagcaacactttagatgaattggaacgacattctgtctattggaggcaaaaccgctctgcttccgaagtgctacaaggatgttcgcatgtagtaaaagatatcaataatgcggaaagaataacttttttatctattccctatttagcagtggaagaaaaagatcctatctcaggagatggtgtcacttttattggcgtaggtattaatatgattcgagggcatatcgctgatgcccttatggttatggcaataaagttacatgaagaacatatatcttggcctgagttattgttaccaacactacatcaattttctactaacgatcatcctgcggtgagagctgtagtattacgccgtttaccttatttacagaatattttacctgaagttggttggggagtatttgaattaataatgcggaaaggtagcgaagggctttgggatatggcagaatgttgtctctattatacctattatcatgagttcgacagagtttccccatggttaaataagattgtatctgaagatattaaagatggattgcaagcatggggaagaatatctgcattagctgtattgtcagaaaaaatagaaaattgtgattttatcaaacaattaaaagaattaagcgatagtgatgcatgggaaggtgctatcgatgtttggacacatcatgagaattttcagcggcatcgggatttatgtcttgctggattagccgctgcgttaagtgatgataatcaatattcctcagtattaatagcgtcaatgggtagtatttttagagagaaagagccggttattattttacctgtaccagtgttagagcgttatttttcattagtatctatgagttcagagccatcgaaaattggtttattcgattttggcgcatggttaaatattgtttcatgcatagaaccattgtatgcattgaaggctacggagatttatcttgaatatgttcgtacaacaaaaacctatttgcatgactataataatagtttaatgcagctattgactcgtttatttgcacaagcagaagagcaggaagaatcggatgacggagaaatgctatatcgagtagttgttttgcaagacactatgttggccttaggtgttgatggggtgaatacatggttagaggcagctgagagagcataa

SEQ ID NO: 193907 - DNA, 213 bp, Klebsiella oxytoca
atgctcgtccgtacgcagttcaaaaccggccccgcgtttttcacgctggccattgaccaggtgtcccatgttcagttgcgttttgccgtattccgttgcgagcttgatatgctcttcctggcgcttatcctccatccgcaacttattgttcgccggggtacgccacacgttccgcgtatgattgtcactggtgacatggtccggatgttctga

SEQ ID NO: 193908 - DNA, 228 bp, Klebsiella oxytoca; identical to SEQ ID NO: 179324

SEQ ID NO: 193909 - DNA, 606 bp, Klebsiella oxytoca
atgcattttgctaactcgaatgattgtatttgggggactggtattaacgggaaaattagtgattctcatctaaaatttgttgatttagatgtaagggctgttcgagggccactaactcaagattttttgaaaaaaaggaatatttcagttccttctgtttttggtgaccctggattattactgcctactttcttttcaaaagatttgttattatcagatgttaaagaaagtgctagggattttattgttatacctcatatgaatgaggattttactatttacgaaagatttaaaaataacatctgttctccgaagcaaggtgctctatcctttacaaaagatattgttaatagtaaatttgttgtatcctgctcacttcatgggcttataattgctgaagcttatggaatccccgctatttttcttgaaaatgaaagtggtgagtctcgctttaaatatgatgattattactttggtactggtagagataactaccctgtggcaaatactgtagagcaggctcttgatttagctccagcgagaccaattgagctcccttcaataactaaatctttgatgcaaagctttccctatgacttatggtaa

SEQ ID NO: 193910 - DNA, 141 bp, Klebsiella oxytoca
atgaaaacgttctttaaggttaaaaaccttttaaaatcaatgagatacttaaagcgcttcctgtcactgaatgcgacagtgaaacgcgagtgcgcggtggtgtgtaacaccttcgctgtcgcattcagtgacaggcactag

SEQ ID NO: 193911 - DNA, 915 bp, Klebsiella oxytoca
atgcctaacaccgttaattatccgcaaataatcccgttcatatcgaaagggaaaatggatgctataaaaaacactttcggtaataccttaacagacagggaatgctacgggatatatatatggtcgcaaaaagcgtctgctgcaatataccctctcctacagcagttagaggtaacgcttaggaactcaatagataaagaagcaacaaaggttatgggtctgaactggtgggatggagtctatacagataaaaccaaagctaaatgggatgattttattttcaacataaacaaaggccgagatagatataagaagaattataaaaaaaacaacccatctgcactcaactctttgattgtcgttccgcatgatgacgctatagctcatactgacttttacacatggcaagcggtcctaagtgacgcatttcacacgcaaaatagaaaacacgtaaataaatctctctggccaaggcttacttacaaggtgctaaaaggtctagacagaaaaaaaacagagaaagcagcaaggcttgattttatcaacgaactaaatgagataagaaattacagaaacagattatcgcacaatgactgtatatggataaaaatgaactccaataacttacagtccgcagtagaaacagttagagaaaaaataaataaaattgaagacttaataaaaacaattaaccctcaaatacattcaaccctagttaaatggggagttttctaccatgcgagaagaatttgctctcaaagagaggttgagcatcatatggggaaaaacatagtaaactgcaccaacccaactatgagctctattttagcaaccatttactcatggacggacgatggaaagctaaccagcgtcgtgaatgacggtaaaaacgaccttgcgatacataagttctag

SEQ ID NO: 193912 - DNA, 357 bp, Klebsiella oxytoca
atggcaggtaacattctggatgtttttgaaagttgtgatttaactaatgaaaagattgatgagcttattagtaataaaaaaaccttcgtcataaaaaacatcccttcatctttttttgaccagttattactgcgaatagaaaaatcaattgaagataagtcaatgaaatgtcgcgtatacacagagtatagaagtgctatttttgcggccatgacaattcccacaggtgtaacacaggtgattggaatagcatctgcgataggagttggaatacataatttagttacttataatccagattatgaattggcgaaaaatctaacatcaacaaaacttggagttatttataaaaaataa

SEQ ID NO: 193913 - DNA, 579 bp, Klebsiella oxytoca
atgacaacatcatttacccccgcattttctcacgcgctcgctttcgttctcgcccgcgaaggtggttatgttaatgacccgaccgacaaaggcggcgaaaccaaatacggcatatccgacaagcgcgatggacttgccgatggcaaaaccgacgtcgatggcgacggcaaacccgatacccgaattaaggacctgaccgaagaacaggccgggcagatttatttccgcgattactggtatccctcctactgctctcagtggcctgatggcatctccctttttgtgttcgattctgcggtacagcacggcgttaaaaaatctatccagctcctgcaggatgccgtcggtgtttcagctgacggtattatcggccccaaaacccgcgccgctgtagcctcagctgatgccgaatggcttcttctgcgctgttttctgcgccgttcccgctattacgccgagatcatcaaagccaattcttcgcagggtaaatacctcaatggctggtttaaccgtcttgatgagctagcgaacgcctgtcaggaggtcgtcggtggtcaggtctcggttccccggagctga

SEQ ID NO: 193914 - DNA, 219 bp, Klebsiella oxytoca
atgggtaagggctgggattcatcgttacgcgcggggcggcgggaccgcctccgtcaggaggtacttcacagggtagccggtggccctccgcccgttccacaggactacacaggctgtgacggtactcatgccagctactaccgcaaaggctgggactccgtcgatacaagagacatcgtctggcagtgccagcgatacaaggaaaaacatcatgtttaa

SEQ ID NO: 193915 - DNA, 408 bp, Klebsiella oxytoca
atgtttaaatcgttgaataccgactggctgaagctggcattgctccgggtatttcagtccggctggacggtggtgatcctggtgggattgtcgctgctgttctgcagcttcactggccgtcaggcgtttattgtctggtggctcactttcgccggtgtgctgttaattggggcgagcgtatggctcggcaatctcccgtatcgtctgctgcaacctggtaattccgctcgccgatggtcaggtgctctgtcctggattatctggggcgcaggtttcctgtcgctggccgtcgctcccgcgaatgcaaaagacccgtggaccctgctgtttaatccgctggctggactgactgccttccttctctggttatgggcttcacataaggagccccttaaatggatccgataa

SEQ ID NO: 193916 - DNA, 654 bp, Klebsiella oxytoca
atggaaaaaactaaagatgccattgttattcctttagatgctgggtggaatgatgtaggctcatggtcagctctttgggatattgataaaaaggatatcgctaataacgttatttcaggtgatgtttatattcacaacaccactaattgttatatcaacactgaagataccatagtggcagcaattggggttgagaatcttataattgtaaatacgaaggatgcattactagtcattgataaaaataatgtacaagatgttaaaaaggtagttcagtatctgaaagcggaagaacgtagggagtatcgactgcaccgagaatcataccgaccttggggacgtcatgatgaagtagttaatactcctcgatatcatataaataaattgacagtgaagcctggtggaaaattttcattgcaaaaacatttgcaccgtgcagaacattgggtagttctctcaggcacagcagaagtaactctcgatgataaagtttttttacttacagagaatcaatcaacatttattccagtaggtgtaaatcacatgttggaaaatcctggcaagatacctttagagcttctagaaatcgaatcaggctcctatttgggtgatgatgatataattcgtattaaagatcactatggccatttttaa

SEQ ID NO: 193917 - DNA, 267 bp, Klebsiella oxytoca
atgcacaccgctttttcttccccgtcttctgcccctgccgcgccgctgatgccggtttctgatgccgttcaggagcgttttattcgcctgcccgaagtgatgcatctgtgcgggctgtcccgctccacgatttacgatctcatcagccgggaggctttcccgaaacaaatctccctcggtgggaaaaacgtggcgtgggcacaatcggaaatcaccgggtggatggctgaccgtatcgccgaacgcaaccggggttacgacgcatga

SEQ ID NO: 193918 - DNA, 195 bp, Klebsiella oxytoca
atggctacgaccctcaccccgtcacacccgcagtttgtctttgtgtttgccgccgttcgccgcgcagaccgtaaaccccgtatctgtatgctccgcgccgtcgccggggatgaacacgccgcacgcctttccctcgttcgcgactacgtcctctcgtttgccggtcgtctgccggtggcggaggtgcgcgcatga

SEQ ID NO: 193919 - DNA, 228 bp, Klebsiella oxytoca
atgaaacagcccgccatcaccgtcaaagacctcgaatgcctggagcacctgcgtaacgtcggccagttcgtcggcgagctgatgcaggtgcaggactgcacctccctgcgtcgtgacccggcgcagcagttacagctcacctccgtaatttacctcatgaccgcccagctcgacggcgtggtcgaacgctgcaaccaccgctggttcaccggggagggcaacgtatga

SEQ ID NO: 193920 - DNA, 1086 bp, Klebsiella oxytoca; identical to SEQ ID NO: 193682

SEQ ID NO: 193921 - DNA, 513 bp, Klebsiella oxytoca; identical to SEQ ID NO: 193687

SEQ ID NO: 193922 - DNA, 1038 bp, Klebsiella oxytoca; identical to SEQ ID NO: 187351

SEQ ID NO: 193923 - DNA, 933 bp, Klebsiella oxytoca
atggatgatgcggcggtgattcatctcagctcgggttatatggaggtggtggataagtggtatgcgataaaaggatttttaaccgtaccgtcactggcattacttgtgctttttgcctcaggtgtaatttatataccctgtaatatgtttgttcatttttttttgcagcaggattatgacggatggttttatgccatcggttttattgctctttttgtgtcaattctggcctctttgttctgttatttaatgctaagagttgaatgttttcgctggacgcattatcccgtcagatttgacaggaaaaacagactggtgcatgtattcagcgtggacggtgaggtttacagtgccccctgggacgacatctttttcaccaccggcgattgcgtgacccataaattaacgaagcggaagaattacgatattcgcggacatgtgctggcggaggatcgcaaaacggtgctgaaaacgttcacgctgtcggtttctgccccgcggcgtgaagacttataccgcaactgggaatttgtgcgccgctatatggaagaagggccggaggcggttgccggcgtgctgaaactgatgccgccggtggagggacgccgggaagggatattttttggctactggtatctgttgttcagcgccacctacggggcgccgttttttgtggtgccctttctgatggcgctgtatctgacggcctggccgttccgggtctttgcgatgtacacctgccggatcccgcgctggagtgaggaggtgcaggccagctgcgtgattgcgccggacgatccctgggatatcagtgccgcgcagaatccccgttcgctctggcgctggatgcttggaatggacaagtcgcacagcatggtggataaaaaacgcgccatgatggctgtgacaaaagtctcagacgcttcagagtga

SEQ ID NO: 193924 - DNA, 417 bp, Klebsiella oxytoca
atggagaccaacatcgttgacttccgccgtctggtcattatctcaacgctggtcgctcaggctgaagcggtggccaccgcgacctttgaaactggtcaggatgcgcagaacaccggcgaccagctggcggagcgtctcggcgagactgcagcggaagccgtcgaaagcggcctgcgtgaactgtggcgatcccttcgcgagctgcggttcgccgtggtcaatgatgttcgcatccgcagtatccagctgccggagctgcgccgcgtcacgcctgccaggacagtgccggtgatgctgctggcctaccgcgagaccggcgacgctgagaaccgggatgagctggtgacccgcaaccggctgcgctatccctcctttattacgccttcacagacgattgagatcatcagcaatgactga

SEQ ID NO: 193925 - DNA, 543 bp, Klebsiella oxytoca; identical to SEQ ID NO: 193680

SEQ ID NO: 193926 - DNA, 306 bp, Klebsiella oxytoca; identical to SEQ ID NO: 193695

SEQ ID NO: 193927 - DNA, 204 bp, Klebsiella oxytoca
atgcgcgacatcatgtatccgatttattcccacaaataccgctacctgctgcaggtgacggtcacggatatgccgatgatccgctttcgcagtatcagcaacgtccttacgccgttaatcagtttacaggcgcagatactggaatgttttttaagtcgttaccggctcgctggccacgattatgattttctttacgaggtttaa

SEQ ID NO: 193928 - DNA, 381 bp, Klebsiella oxytoca
atggccatcgacaaggcaacgaaccagctcgacgagacgaagatagccacggccatcgaggacgcggacgcggagatcaactcgtttctgtcaaagcgctatcagttgccgctgaacatcaccaccgttccgcgcccgctgcaccgggtagctgtgtccatcgccatttactggctgtccgagcgcgacaatcagatcaccgacctgattcagaagcgctacgacagcgccatccagaccctcaaggagatggcgaacggcacgcgcgacctcggcctgccgaccgacacgccggccccggagaccgataacggcaggatgattgttgtctccgataacaaacgtctgttcacccgcaacaacctcaaaggggtgctgtga

SEQ ID NO: 193929 - DNA, 1629 bp, Klebsiella oxytoca
atgaatcgagttgaagatattattagggataaattagcagaaaaattaaatttatttgaaaatgatttatctcttattagtacggaaacgtatttgaagaaccgtaaagggactaagggttttgttgacttattggctaaagataatttaaatcgttttgtattaattgaattaaaaagaagcaatgctgcatcgcgagaggcattacatgaagttataaagtatttcgaaggtataaaagaggtaaaaagtttaaaagatgatgaggttattgtttatattgtatcaacagaatggaaagaattgcgagttccattttctagatttgtcaacgatgtgagttttaatgttgaaggttatcttctagagatagatgcagaaaataatccgatatgcttaagaaaaatcgaaccgatcaagataaataataatagaagactaagtaatcgatgcaaagtgtgttattacacttcctccaagaatagagagactggtataaaatcattcgagaatgcatttgttgaaaaagagatagatgattatgttattgtgctgctttcaaataaaaatcaaagtgtaacaaatggttttgattatatgatttatgtatcagtccaagagatggaagttgaggaatatatccatatactaagaaaagataaagaactgtataatgaacataaagatctgataaacgttcaggatactctatctgatgatgaacatcgtaatatattacatggttttgcagtcgatgattgtaagccttatgtttattttgattatttggctattggttatccatctaagtttaaccatactatattaggtgatgaaggttggaatatagaaaaggttataaagtatggaaaattaaaaaataatgagttgttaactgatgatatgataattaatgagttgaaaggagatagtggagaaaataaaactagatatgtaagaaatgtggttagtaaaaataaatcttcatttgaggttgttagaaatgaaataaaaggatgtttgattgataataaaatatggcaaaaaggcattttacatgctctagatgagatatatcatgattctgtattgcagacgtgtcagattggaatatataacccaatgaatatattgagaagcttgcatcacgtctatgctgagttctgggcattgccttctgatcaaggattgaaaaatgctcaccagtggattccagaatataagttatattcaaaaggagtaactaaagagcatatgtatgttgggatgttgaaggataataaaaaaagattaaaccttaaagattattttttgaatttttataatggcatggaacatatgtatttttatacttttttaagtaccggatataatcatggcgatgtaaatgagtcaaaggaagttgggcttgaatatgccaattttaaaataactcatgataatttaaaaaatataactgagtattttttcttcaccggctttgaatatgaaaagattgattctcttaaattgaatgatgatataattaaatttgtattatctgagggtgattttatggatgagttaaatgatctctttgagcgaagacttttttctaatgggatggtcgatttgtcagaccatgaatag

SEQ ID NO: 193930 - DNA, 1101 bp, Klebsiella oxytoca
atggctatagcattcacatcagcactgtactacccatacatcgacgttaagaatgagcagtggttgcgtaatgccgtattattctgggattcaattcgaactattgtgccaatctctcatcgtgatccctattcgaatgatttcgctcggacgcttagtgatgaaggtgttcttcaacctatacgtgtgtcatcagatatggaagagattgaagcactaacagagaaagtatttacctttcttactgatccagcttccgcaggtcttatttacaatgttgatgcagaccccgatacccgtatccataatgaaaaaattccgaatggaatttttcggttagcacaaattcatccagaaaaatttccatacagtgttattgagatgcttcagagaggtcttgatgatgatggatggcttcacgtcgaacctacttttgcaaaattttatatgacattacttgccactcaattatcagatcgcttaggtctagggttagtaactgaatcatcagcagcagatcaattagcaatcgcagtgcgtaaaggaaacccacttgagggaaattcagctagacgagttggtcgccattttgaggcatctggcccaagacgtgcattaccacctgaactcactcaaagtttgctaattgacctcatactgcagggtatatcgttgcctgataatttaaccgttcatgagatattgatgttcaagaatgatcacaaggaagaactatctattttccgtcgtgaaatttcacgacttacatcagacattccgaaagacgtacctatagaagcattacggcaagctgtagccaatcaatatcaggtaaatgtcttgcctgcattgaacagtttaaaagcatcattaaaagcacaaaggtgggattccggaattaatggattattgaaggtatccttctttgctgcaccatcaacttccgtcgcaatctatgcgggaatgccaagtgccgttgcattattagttggagctggaatatccctaacagcatctgtagttctgtcatcccagcagcgaaacaaggtaaaaatagacaatccatatacatatttattatcacttaataatcagtggtaa

SEQ ID NO: 193931 - DNA, 846 bp, Klebsiella oxytoca
atgggaccattcaaagcgcatgaagtaatcgaagaaagaatgagagatcaagctttatgtagttacttggtaggttttgatattaatgatacaggtgtatcttactataggatggatcctttgattatgaagattttatcggccctgcatgagttcgcttatgggttccacgaaggggagcagacagataacacacaaacattatctaaaataatagatgcggctcgttcaatttataaaattgatgaatatcagaaggttaaagatatttatctgaattcaggtgaattgactgacgatgttgctaataaatatcttaagcgaggtgaatttggtgaacttattctgcatctgattttgagagattttcataatacgatcccacttctttccaaaatttatttcaaagattctatcgggcatacggttcacgggtttgatgccgtgcatatcgatcctgtcaataaaaccctctggctaggtgaatctaagttatatattgatcccaagaaaggtattggtgatttaattaatgatgttgaagagcattttaaagctgattatttaaattctgaatttaatttgatagcgaaaaaaatacgccatgtacaaaactctccagaattagaatattggttggacattttatcgacaggtggaaaactatcagataagcttacgaaaattaacatcccgctgctatgtacctatagctgtgattcatttttaaaatatgataacgaaaaatcaccggatttttctgcttattataaaaataaaatacgtaaagaaacttcatcaaaaactatcattgattcagcagattggtggttgatatatgaatga

SEQ ID NO: 193932 - DNA, 2181 bp, Klebsiella oxytoca
atgaatgagcatattgggagtggaaatgacgccctattcgaatatacttttagtgagtatcaaaaatgtgctaggttactaatatcagatgagaatcaggggagagatgaattaataaaaattttagaaaagaagaatgattattcgcgaatattagatggtgttttagctgatctaatcgagtctgcaggtttttatccttatataataaaaaatgatttaacactatcctcatcatcgcaaaaaataaggtttgaaaataacagatcaataaatatcaaagataaagtatttcatgatgaacaaaaatatttactggatctaatcaattcagaaaaaaacgttattgcaagtgctcctacaagttttgggaagagtctcttaatagaggaaatagtagcatccaagaaatacaaaaacatcattattattcagccaactctagctttactcgatgagacgaggaaaaagatttcaaaatattccaatgactataaattaattgtaagaacaagtcaggcgttttgttcagaaggaaagggtaatatttttctgctgacatctgagcgagttaatgagtataaagaccttcctaaagtagattatctaattattgacgagttttataaacttagctctaagagggatgatgaaaggcatcagtctttaaataatgcatttataaaaatttttaaaaacagcacgccaaaattttactttttggggccaaatattgatggcataactccggggtttgctgataaatataatgctgtcttttaccaaagccaatatagtttagttaggtgtaatgattttaatatatataaggattatgctgatttattcggttctcgtggaaataaggcaaggtttaaagaaagtattttatttaaattgatttctggacgttgtgatgaacaaacaattgtttattgtgcctctccgagtaaagcaagaagactctcaagagagtttgctaatcttattcaaaaaaataaatctggagagctaactcataaccctccgctgatagaatggatcgagaaaaatatctctaagaggtggtcgttaattgactcaataaaacatggtgtggcatttcatgatggagcactccctagacatattacttcatctataatagattattttaacgaaggcttgataaaggtgcttttttgtacttcaacaatcattgagggagtaaatactagtgctaaaaatatagtctattttgatgaaaaaaaagggaaggacttgagtattgactactttgattattcaaatatcaaaggtagagctggaagattgatggagcactattcaggaaatatatttaattttaatcctcctccagaaaaagaggtgatatacattgatataccatttttcgaacaaaacccgattaatgaggaaattttaatcaaccttgatgatgctgatataaaaaataaaaattcaatcgaatataatttcatatcatcattacccttcgatgaaagtgttttatttaaaaataattctataaacatccgtggacaaaaaaaacttcttgattatttaaaatccaacatacgtgataattatgtactggttgcatggtcctctacaccaaaatatgaacagttaaaattttgtgtacatttgtgttgggagtatttattaaaagataatgagaaaagtaatcaaatgtccgccgaaagattaactaaagttacttttgattatggcttttctcaaaatatactagagttagtgaaaaacacatataactataatttaagcaagtcaggaaagatgaatgatgaaaaaacaataaaaataatagatgaatcgataaaagattctttttatatattgcgtcattggtttcaatataaacttccaaagttgttatctgtattaaatgaattgcaaacgtatgtctgtaaactttttggtttagtacccggaaattatctgtattattcatccataatagaaaatgattttataccagaacatttaaatattcttatagaatatggggttcctaagtcggcaatacaaaaaattgcgaaatttatacccgatcacttagttgatgatgaggttgttcggttgatatcaaataaaaaattgtatgattataatgaattaatagattatgaaaaaaatatcattaagaaaatgttttaa

SEQ ID NO: 193933 - DNA, 318 bp, Klebsiella oxytoca
atggctttgaaattctatgacagtccgttccatgtgacacatgatgctgaaactgctagcaaaatggcaatgaaaatggatttatcgatcatgattatcaatctaatcaaagagaaaggttggacgcaaaaagaagcggcagaaaaactcggcatcaaccagtcccgtgtatcagaactgaaaaatgcaaaaattgagcttttcactgttgatgctatgttcgatatgctagatgccctcggtttccgagctaaaatgtcaatgacaagtctgcatcaggcatcaattgcaattacagaaaccgaggcagcagcttaa

SEQ ID NO: 193934 - DNA, 1494 bp, Klebsiella oxytoca
atggcgatatacagttttaaaatggagaacatcagcagaggcgaaggcaagtcttcggttgcctccgctgcttatcgccatcgtaaagtattcactgataatcgtactggtgatattcatggtcgtaaaacagtgcataaaaaggatctttattttgcacagatttttgcccctgaaaatacaccaccatatctgattgtagatagtgaaacactctggaattctgttgaagcctcagagaagagaaaagatgcccgtctcgccaaagagtttaaaattgcccttcccgctgagctaacaccagaacaaagcattgaactcactgcagcttttgttcttgagcactttaccaagcaaggcatcattgccgatgttgttattcacgatattaatggtcataacccgcatatccatatcatgggaacaacccgtgaagttctttctgccggatttggtaaaaaggtccgtgagtgggataaacctgaaaccctcgatagctggcgtaaaggctggcaggacttctgtaacgaattccttgagaaatatgagcatgaggttcgtgttgaccaccgtgccatcagggttcagcatcaagaagcacttgaactggcggcaatggctgttaacaatgaagacaaagctatctggcttgccaaagctgaagaaacaaaccgtgatccaatgaggcacatcccccgtagtcgctggaacactcaggccgctcaacaacagcgtactgcagaacaggctgttcgtgatgacaggaaggaagaagcccaaaagacgtattccctgtttaaagatctgccactggaaattgtggttgatgtcaggagctttactgtatctgttctcccagagccggaggagatcgtattggctgatgttctctccagtacagcagataacagaaaaaccatacctgctccgacgattccagttttacaaaaaagaccagcaacaaaatcatatcgtaaccctgataagatcagtcaggttaaccaagaaccaaaaccatcactggtgatccctgcctcacctcgctctaaactgaaaaccccttctccttcaacagcgggcgcagttaaacgcgcgccttttaaaagcaagaggaagcaggttaaacctcgtcagagtggaatatttaagcgtttcacgctactcatagtggacttcttcaaagaaaagttcgtttggaccaagagaaaacctgctcccgtttctaccgacgctgaacacgataagcgtattgccgaaagctacgtgttcgatgaagtgctgggcatctatgtatcacgcgctgagtatgaaaggcgcgccagatttaacaaggatgactacaagcctaccaaggaagagatcaggcgttttccaagtcgtccggttaagccagtgcagcctgatagcaatctcgactacataccaacacttgctgcagacaggaaaaagccgctgcctaaattgagaccacccggttatcgaggtaaagaatga

SEQ ID NO: 193935 - DNA, 672 bp, Klebsiella oxytoca
atgaatatatttgacgataatgattacgaaaaagcctgtaaatggtatgagcacatcagatctaatgttaatagttttaatattgaaatagaaaagctaagtgaacagatagcattagatttattgaataataaaaatattgactattttcacactgattaccagtctttaataaatcgctttgaaacagacttttatcaatttattgatacattctttatagaaaagcaatatctgccattcttatgtatgatcgttgaagaacatgccgatcagatatatgactcaaccagttttttatcacaggtattaagcgataagggatttagcgatccgcaagatactctgacctttggttatgaagtgtatgaggcaattggtctcctgaatgtcgatattgaagatgtaaaagaacagacaatatataaataccataaaatggattttgcttatcatgactggcgcttgaagtatggtgaacaagagttgatgaacgcatgtgccggttttaatcgacgtgtagcagggctgtttaaaaactatgggtttgataaaacctgtattcctgtattgatggcaattattattaatgaaacagatcacatttatggattttcagattatggttttatcgagtccttaataacagctattgagaacgagatggggtaa

SEQ ID NO: 193936 - DNA, 738 bp, Klebsiella oxytoca
atgaaaaaaatgatgattttatgtgcggttatttctttgcctgcattttcagcggaaacaatgccattcagtgatgctgaagttttggcgtacctaaagccatctagcgaagatgttttttctaatgctgttactgtcatggtaaaaaatgatgcagaggcatcattgcaaaaaaatatcacaaaacatggtactaagcttacaccatttactgtaaaggaagttgcaaaagaatttgataaaaatgaaatcacagccactgaaaagtataaagacagaccaatcagaataaaaggcgttgtaaataaaattggtttggatgcattggatagaggggtaataacgatttcaggtggagggtcgtttgctggtaatctggtagcatctgttgataaaacatcagagtgggtgagagagtcttcaaaagggaatacagtagatttgatgtgcaaaatttcaggctatgtaatgctaaacgtggctgcgatgtgtgaaagctcattaatctatactcaagctcttgtaaaaaaagagtacggacttcaagatgtttttagccttcctagaaataaattctccgctatctttgcatatacaattaaggtgaatgaaaaagaaatagcggaaagttgttcaaagccagacgataattgttttaagaaaataatgaatgtcatggatgagactaaaaaaccagactctcgatttgtgtcatggatgagcaaactacctgaataa

SEQ ID NO: 193937 - DNA, 1938 bp, Klebsiella oxytoca
atgacagaccagtcagccgatctcgtaacgaaaattgacgttattcctgaccttgacgggctcaatagctttgatgccgcgattgataaggctatcgcaaaggttaaccagcttgacgccgctataaaacgcgtcaacaacctgaagcctgcaagcccatacgcgcctagcagcgcatcaacagcgccgacagccgccgctacagcagcaatagccacagtagccgctacaggctctaatttgattgtccatacgccgctggctaatacggttaaaagggaatcacaaaaaattgcacgtgcggcagtagaaggcatggggagtggtgttggtttaccattgatgggaggctcaggagggggaaggcttttcattccataccacgggggtagctctccttcagggaatggtggtggattgtttgatccttcaacgataaatccgctttctaggtatgacttttcagcagggagtttttcaggaaacccactcaacccaaaaggaaatgatgaatctgctggtggagggggcgacgggaaaggcttaggtgctgaaaatctcttggcgggagccggtctaacggcaggcattattgctattgggaaatcactggctgatgacctagattctattcagcagcaacaagcgcaaattgcaagacttgcacaaacaacaggtgatgcgaaagatgcattctttgctttaaatgaggcagcaagcgcagtaagaagcgatagcggagcgtttatctcaacctataccaatatggcgaccgccacgcagaaacttgggaagtctcaggaggaaacaatccgagcgactcaggggctggtgggcgcattacagttaggtggtggcagtgctgaagcagtaaacgcagcgctttaccagatgggccaggcattttcttctgaccggttcggcggggatgaatttagatccttcatggaggccattggcacaatggccccggaagtcgcgaaggctttcggcacagatgtaaaagggctgcgggcaatgtcagaggccgggaagctgacagcggaaacgatgctaaaggcctttgaaaaaatggccgcaaataatgctgaccttcttaaaaagcaaggatggacgtggggacaaacattaacggtgatgcgaaatgactggcaaaactttcttgccaaagcaacgataggtggagattggcaaaaattcacagattgggcatccaatactttgattcctgttcttagaagtgcggaaaaagaggttgccgcgttctggtcaacgctcgcagacgaaagtaaatcggcgattctgataggtattcttggcgctgttggggcggcttttaccgcgttggctattccagttattgcagctgtatggcctttccttgcgattggtgccgctgtatgggtagtttatgaagcgtttgtagaatggaaagcatggatggcgggtgaaagcggaacaatatttgatggtttattcggtagttttgatgaatttgaaaagcgatatccatcgattgtgaaaggtctaaaattattgtctgaatggatagggaaatcaggtggtattgcgccggaaagctcggttccgtcacaggcgcaaatagatgaatttctgaagaataaaaacggcactgacggaaaaccagaaaaaggtttaatcgagagatttcttgagtacaacggtaactttaacccattgccgggggttgagagatttttagggctatttggtggtgatgatggtgccgggcaagacgcatcattgatgacaccaccatcaaaaggaggggtgattattaacaatgatgtaaaaaatgaaaataacattaatgtccctgatgctaaggatgtgggaactgtcgtcgaaggcctgagcaaaactagtacgacacaaagtcttagtggggtaaactgggctgaggcgaacggtgcttaa

SEQ ID NO: 193938 - DNA, 396 bp, Klebsiella oxytoca
atgagttacagtgatgtagtggcaacgatagcgctttttgtttcgtttatcggcacttttgccagcggttacatcagctatcactatgctatcaagggcgaaaagcggaaagaattcaatgcggttgcagaccgaataaccctgtcattagtccaccagcaagaatctgctgataacgggcattacccgaacaaaaccctgactgaatcagacctccacgcgctgttactggttagtgatgagcgcgacgcagccaaaataagaaatgccttcgcaaactaccagctttcgcttgagagggctggcgaacggaatgccgggatgtatgaattccactcaccacaggaaatcatcaaagccgcagagcaattgaagaagtggacaaaacacaagtag

SEQ ID NO: 193939 - DNA, 2070 bp, Klebsiella oxytoca
atgtccgaaaataattatggtgcgctgatgatgaaatcggcactcagcgccgatgtaaatattgatagtgtattgacacctggtatttatccagtttatccagaaaatccaacctcacctgacattcttgggggcgttcttactgtgcatactggtcaggttaaacgccggagttttatctcacaacaaataatccatgcgatatctacttataaaaccgaaagttctgaatggtcgccttgggacatatccgtatcaagaaataatttatcatcaagcgatggtgctaaactcgtcgggggtctgggttatgttaatgctgaaatgtttggctacttgcacggcgtgacacccgacgccgttccatttttacaggcagcaattgattacgggcatgcgaacaaaatccccgtacagtggaatggatattattacacgagaactgctccagtggatgtaccattacccggtgatgacggtaccgcgtacccgggatgggtggctgctgggaacgatgtaaatattactgcggaaacaacgcacaaactaaaggcggcgctgaggttttattctgataccagagtaattggctctggttcgtcgcaatgtaggctaattggcacatgggatgctgaaaatcctgtcgtagataaccagcagcatgtggggatttatatacaagctgataatcctatagagggctatgtacgttatcagttaagtggcattaccctacagaattattttatcgggcgatattgtccaaatattctaaatcattcttttgaagatgatttgattatacgtgactgtgggtttcccggtgtttttcttggtgcagatgctgttaaaaatggctttgtgactgccagaggatgttgggcggctgaaatttacggtggttggtggacacagcgaaatgctgcaataacaactccgtatctccctccatacccggcaggcgaaatatttcgcattggttgggttgattcattacgttacgaaaaattcgcgtattacggtcgccagcgtgttttcggcgacactgataaagcctttgatacatggttcgatacgtatatctataaatctgccaactcagtggcaacatcttcaggggggcgaagaactaataacactgcatcaggttttggcgcaagagcgatgaaaggggtttctaaccgggcgtttatggtacttagtcgctatgggcgtcaggttaactctgtcatcattgatgactttaagagtctctgcacagcaagagttcccgtctatactgacgtgggtaataaaaacaccgtaattcatgcatatgtagaacgggctggtttggttgacactactgtcacaactatatccgcgaacgaattttattccagctacacagatccatgggattcatcttacacaatcccccctgcgatggtgtgtcagggaagtattgtcgttgatcgcgttgtcgtatcggctggggttgcaacaaatccgtttagtgaatctgtgaatgaactttctggcccccgccgtctgcgtacttttcggcgagacagtgaagactacaacatgtttgaactgagtgaatggaattccccactcggtagagttatgtatcgctactcttttaaccgcgaatcaagcgtacagcgaccaatcagttttttcagcgaggggcaggaactatttcaatatctgtttaacggatggacgccagttataagctgcggtaatgaggtcattacaggcggcgtatcagtaggtacctacagacgcgttggaaatctggttcaccttacatttcgcttccagacaaacacactgtcactcacagctggtgggcctgtagttatatctggcctgcctttcacatgcgctacactgaatgatggaggactatctgtatctccgataatttgcagccgcgccgggtcagcagtcatcctcgcacaaactaatccgacaacaaaagatatcttactgctgaccaacagttcgccagcagctttttctataactggcggtagagatttaacactctacggctctattcagtatgttcttacagagtaa

SEQ ID NO: 193940 - DNA, 270 bp, Klebsiella oxytoca
atggcattcacaattgaaaaagaattaccagtaaatcaaataactgaagatggcattagcataggaacaaaaatccttaaagccaagcttatatatagcattgaaaaaatagaactcaaggggactaacggaattgctttctatgttattacgtctgattctgacagcaaaggatcccgtaactacatcccttttatctactccggtactggagaccccataacagaggctgagaaagcattacaaaacgcaattcagcaagacatataa

SEQ ID NO: 193941 - DNA, 180 bp, Klebsiella oxytoca
atggcagattttagcgcaacaaaaagaactgtgtcgcttgaagattggggcgaagcactggaatgcatggtcgagttaaacggtaaaccattcgatatcacagaaatggagattgaagccgcttacgaggcatataagcgggttgatgattttttctatgatgaatggggcgacgaataa

SEQ ID NO: 193942 - DNA, 1503 bp, Klebsiella oxytoca
atgaccggcaatcgccttgagatgcaaaatattagcctggccttttccggctttctggcgctcagcaacgtggctttcaccctgacggggggatcggtgcatgcgctgaccggcgccaacggcgcgggtaagtccacgctcatggcggtgctgtgcggcacgcacgcccattacgaaggcgaggtggtgattaacaaccagtcggtaagcattcgctcgccgcgcgatgccaaactgctggggatccatctggtgcagcaggaggttgacgtggcgctggtcccgggcctgagcatcgcggaaaacatcatgctcgacaggctggcggagccggggatcgccttccgctgggggcggctgcgccagctggcgcgcgaggcgctggctcagcttgacgtcagcctcgacgtacgccgctccatcgacagctgtacgctggcggaaaaacagcaaatcctgctggcccgcgcgctgtcgcatcactgccgctttcttatcctcgatgaaccgaccgcgccgctggaccaaaacgaaagcgaacgcctgtttgcggtggttcgccgcctgcagcggcagggcattggtatcgtgtttatctcgcaccgcattcatgaattaaaagcggtctgcgacaccctgacggtgctgcgcgacggccggctgattgagagcgggccgatggccgacctgagcggcgagcagatcgtcgagaagatgctcgggcatgagctgagcgatatctttccgccgaagcggccgccgcatagcgatgaggtgctgctacaggttgaagggctgcacgacgaagggctgctgcaggaaatctcgttgcgtctgcgcaagggggagattctggggatcgccgggctggcgggcgccgggaaaaccgagctgtgtaaggcgctgtttggcgccagcaaaagccgtttgacccgcggcgaactgaacagccagccgtggcgaccgcgcgacccggcggactcggtggcgcgcggtctggcgctggtgccggaagagcggcgcaaagagggcatttttatcgaagaaccggtggcgatgaacctggcggtcagcgccgatagcagcttctcccgctggagcctgtttggccatcgtcaggcctggcgctgggcggaagaggtgatcgcccgggtgggcattcggacatcgggtccggcgcaaaccctgcgccgtctctccggcggcaatcagcaaaaagtggcgataggcaaatggctgcgcggcaacgccaacgtcctgattttcgatgagccgaccaaaggggtcgacgtcaaagccaaaacggacctcttcaacgcgatcgacggcctggcgcgggaaggcaaaggggtgatttacgcctcgggcgagttcgccgaactggtcggcctgtgcgatcgcatctgcgtgctgtgggacgggcgcatcgtggcggaaattccgggcgcagaggcccgggaagagaacattctttattactccaccggaggagcagcagcgtga

SEQ ID NO: 193943 - DNA, 1797 bp, Klebsiella oxytoca
atggcaaaccgcctcaccactgaaatactcatcaatctggcaggtaacctgaccgccaaagcccgccagtacggtgccaacatgtccgagttcgcccgcacaaatcagagggcaatgtcggttgtcaaagccacgacggcggcggctggtcgtggtctggatgcgctgggcaatcgatataccaccatgattgccggttttgccggtggtgccatgttgagagactttgccgcgacagatcgccgcatcacacgtatgggactggcagcagagaagaccaaaaaagaaatgtccgagatgtttggcggtatgcaggatgctgcgatcaagtttcgtgtcgatgacagtgaagtggtcagcgcgattgagaaagtcgggacggtgactggtgatattgattacggctataagaaccgaaacatcatagcaccgtctatcgctgcgtcaggtgctgatggtgaaagtatcgggggactcttctctcagttcacaaagtttaacctgagcaacgagaaagacaccctgcaggcaatggataccctgaatcagctcggtaaagaaggtgcgtttgaactgaaggatatcgccgaacgcggcgtaaaagcgttctcaatgtatgccgccgcagggggaacaggtgtacggggcgtgaaggacgtcggcgtggcgctggagagcgcggtcgatgctaccggtgatacgaccactgcctctactgcagtcgagaacctgattcgggatctgcagcttccgaaggttgtgaaggagttgcgccggaatggcataaatgttttcggtaaagacggaaaaatgcgatcactgccaacactgatgggagagattgcaaaaaaatcagggaataaaggcgcagaaactcagagcgcacgcttactgggggccggatttaatcaggatagcatcctgttgcttagcagcgtgacgtccggtaaaggtgcggagaacctcaaacgctataacggcgtagtggccgatggtcagggcattatgaaagatgccgagtatgcatctaaagatttcacatcagccgtcactgcactaaccaccacctggaaaaaatttgcaaacagcaatctcgcaaaaccagtccaggagctggctgatgcaattaattccgttgaccaggaaaccgtccagcactggctggagattggtaaaaatatcgccatcgcagtcgggggggttattgcagcccgcaaagcgtttcagtttggtaaaggtgtctgggacgtacttaatccaaataaaggtaagggtatacctaatggtatcgctgatgtgtttggttcaggtgtaatgccagtttatgtgaccaactggccagcaggtgggctgggtggaacaggagaagataaggttaacgatcttcttgatactaccgccgaccttccaggttggcctggaatgcttgcccggggtgggttaattgccagtaagttgatggggttaactgatatggaccctttttcggacgaaggacgcgaagaactccttaaaagggttcagcagaacaatgagcgttcaacgatgtgggaggacatcaaaaactttttcacgtcttcctcgccgtcacctgcgggttaccaagacccgtcgccgtgggcgtctatgcagccacaaaaccagcctggctatccgttcctgcagcaacctgagctgaagggcagcatcgaggtttctgttaaagatgatcgggttcaggttaccagcgttaaagtcaatgcccccggtgtcactatgagtgcgtccagcggtgttcgtaatatggagcagcagtaa

SEQ ID NO: 193944 - DNA, 576 bp, Klebsiella oxytoca
atggatattctttctactctctttcagcagcagagcaggcggatcgggctgatagtccccagtgttgttatttcagaaaagcacgatgactctcttgaaataaccgagcatcccgtagaggtcggctcagcaatttccgaccatgcatttcgacgtccttcggaagtggtaatgcaggtcggttttgctggtggcggttccttacttgacttcgtagatacatcttctcttgggctgagcgttggtattggcccgaaggagacgtatcaggagctgttaaatctgcagagcagcagggtgcctttagatgtggtgaccggtaagcggatttacaccaatatgctgatccgtgcgcttgaggtcactaccgacaggacgtcggaaaatattctctctgctgtgctgacgctccgggaagtgattatcacaagcacaaccaccacgcaggtggctccaaagtccaatatgaagttaggggcgaacacctcagccgtacaaaactccggggtgaaaacgccagtgcaaaaaaatgaatcaatattgagccggttaagtggctttgtagcgggagggtaa

SEQ ID NO: 193945 - DNA, 1146 bp, Klebsiella oxytoca
gtgacggacatcactttaaataatgttattgttcatgagctccttaaagaagctaagaagcctatggttcctggtaaaaggatgaagtttagagatacgacccttgattcatctaacgagatagttctcaaactcatcaatgaaatcaatggactgtatggaaaaaaaggaaattctgcatactatggtgtttttaaagaagagttaacggaacgcgggccagtccctgatgctattgaaagctacacctgtctggttcccccttcctctcaagactttatagaccttagtgtgggtataatgaataaactggctgatgaggctgaaaagcagccgtggtcatctggaggggtgatcgtttttgcagattatgtgcgagatggtatcaatttctttttggttactatgatcaaacagaaggaagggatacgattaagttcgaaacttgaaccagaactactcgagcaacttgatttaaccaaaatcaatcaggcggctcgtattaactttgataaatttcttaaatatcaaaattcatcagcaatcgataagcaagatttaagttatttaagtttcattagtacaactacacaacaaacagcttccggctattttattctcgcactagggtgcgacaaaggcattacgtctaataacgcaacaaaaagtcttccaactgaggttatgagatttttcgggaaacacaatgaaattaagaatcactcccgagattttaaaaatgatgtcattaactacattaatcatcaattcgaatctaaaaaaccagccaagctatcggacatttcagcaatggcttacaaacacatgacttacgttgacgagcaaacccgcgaaaaactatctaatgatctggttacctatttgaatagcgaagaggttcgcattcctgttgaatttaatgtcagccgctctggtcttaaccaactgttgaatattaaatataaaggcgatggttatagttttaattttgagaaagcacttctgggcacgacgggagatgcggatatctgttataatgctgagaatgaaagcttaacatttactaagcttccgaaagacgcagttcagagtattgagcgtgcattaaaggaaaaatcacaaacaggtgacggagatgacgaataa

SEQ ID NO: 193946 - DNA, 1233 bp, Klebsiella oxytoca
atgacgaataacacaccattaagaactcttgtcgagttatatagaatagctggaaaaccagccatttctggcgtgtatttgtctttgctgctagattattctcctaaggctgacgtatcccttagggagctaacaacatcgcatagagcatctcaatacattgttgaagatgaattcatcgttgatggtgtttttttacaaaactataatcttcctatgggctggaagaacgtatctataacattgaaactacccagagacagtgtccaacgtttccacaatactatagctgatttaataacattctcgtcggttagaaacggtgaattcccgactgacttctatgttgttgatctagattatcactcagaggataccaccataccacctgcagtccaaaaagttaaaaatgtttgtaggctgattaaagcattatctaaactcgcacattaccatgatagaaaagctacagacggtgaacctcgcttagtattcattcaaggttctgacggtcgatctaagtccgcaatactccagccaacaataacatatgaaatgttagactatagcgatattgattgtaacgtagttgagcaattgcaagacgaccactctattaatgacgtgaatcaccacatcgaaaaaagaggtatattccgtaataccttggttgaatacattaatgaaaataatttcaattttcagcaattaattgaacattggacggatttccgcttagcctatgataacaatctttctgtataccttagtggctttaatttccacaaagcaagaaaagatgtcgctgctgccgagctggatttttcagaaaaaacgtctaaaaccattagcgattcaacagccaaaattttagcaaccccattatcattattagctgccataggcatatggaaattaagtgatttaacagagcaaatcgtagcacttactggggttatttttacttcattaataatcaatttaattatctctagccaatggaaacaattaaaaaggattgtccattcaaaagaaatggtgttcaacccatttattctaaagctaaaaaattacccgcaagaacttcagagcgacattgcaaaagcaatggaagaactcaataaaaatgaaatattcgcatttagaatactgatatctttttatatcctgtgctggataccgaccatggtcggtatcgcatttataatttataagaatttctttattgaataa

SEQ ID NO: 193947 - DNA, 123 bp, Klebsiella oxytoca
atgaaaaacgaagttttaaaagaagcaatcgagaactatcagtgcctgaaagcacaggtcagccagcagggcatgcatatcagcgacgacgtgaataagacaggagcagagaacaatgcgtga

SEQ ID NO: 193948 - DNA, 579 bp, Klebsiella oxytoca
atggatcacacagtatttaacccggaaccaacgtcaaccggcatccggtttgggcgtcgattaattgggtattcgacagccattcgctcgcttgatagcggccgctatgacaggaatctgacaaaaggcctggaagtgctggcttgcatcatggaagcggtcgaaagcaactggatcacgctcaacatcgagaagcaaatcatcgtctggcgctggttgctcgccgcggtattcattaccgaagagcgggagaagaatgggactgtcgatgttccgaacgatgatggcggtgttgatacagccgttatctattccggcgaacacggtgcaataagtgtctaccccggaccagagcgctttgcactcgctaaccatattgaggctggcgctattgagaaatacgggtccgaccttggccagcagctggcgctgcggatgtatcaggacatggttgttgctgacgacgaaagcgggttcaggttgtccgctatgggccgggagggattcaacatgctgcacgacggctttatcgagcaaatccaaaccgaaggcatgccagacatgccggttatgcactga

SEQ ID NO: 193949 - DNA, 447 bp, Klebsiella oxytoca
atgatcatcccgtcaaaacttatccgcgccgctctggtgtgtgctgccaagaacgatgttcgctattacctttgcgggcttcacgttaccccgaaacacatcgaggcaactaacgggcatgtggcgttgcgcatggaacacggcatccggactaagaaaaacatcattgttcagtttgaaggcaacgtcccggccaaagccgaaacaacagagctgattttcaacaaagagccgatcgctattcatcgcgaccagttccagcgccgtctgtctattaccggcataaagctactggatggtcgattccctgatttggatcgtgtcatcccgaaagttctggaccttactgttagcccggtgattcaggccgactacctgagttacccggaaaagatgttcggtcgcgagcgaaagttttttgccagttcaactgcgcccatctactga

SEQ ID NO: 193950 - DNA, 414 bp, Klebsiella oxytoca
atgagcatcagcgaaaaacgtcttaaagcaattgcaggtggtgaccctttcttcttcccgggcgaggtggtagcgatggcttgtgcactgcttgaacgtccagccatataccagattgcaggagaatcggataactgcaggagtagcgaaaatgtgcaggtagtgcaggagcaaagcggcattgcccacgttccggacactctacaaaacggcgttgaggtggcagcgattccggttaacgatgtcaccaccggtaagccgttgaccatcaccctacccgatatcagttcaaaagctttctggagcggtacaggcaagagtgaagttttccatccggagacgtacaggcgctgggtcaaagaggcgattgagcggcattgcgctatcgcccgtatcgatgtggaggtgaagtga

SEQ ID NO: 193951 - DNA, 261 bp, Klebsiella oxytoca
atgaatacgatgtttttattaatggccgagtacgggtctgctacagttcctcttggtcaagtgtgtgaaaaatactttggaatgaaagcagctaccgcagaaaagcacgccgcgttaggccggctgcccattccgacattccgcgcatcagagagccagaagtcgccgcgcatgatccatattcaggaccttgcgaatcacatcgatgcacagctgaagaaaggccgcgaccttctcgaacagatgaaaagcggtgattag

SEQ ID NO: 193952 - DNA, 1455 bp, Klebsiella oxytoca
atggataactggtcagcgcttttcgacggacagacccgatactttctggatatcaatgacagcacagtgaagccggatgtcctgcgcttttacggcagggaagccctgagcgagccgttcagatgggacattgagttcaccacgctgcaggcgaacattcccccggagcaggtgctgatgaaatatgcctctttccggatgcgtggcggcaaaagcgttcatggcatggtgacccgcctggaatggctttccacctcaaaggatcagtctcactaccggcttacgctcagttcgcgcctggcgctcctgggatacacccgacagtgcgcggtatatcagaatcagtccgttcctgaggtggttgagcgggtgctgcgtaaacacggtctggaaggtccagattttgaattcagactggagcgcacctatccggcgcgtgaaattatcactcagtggcaggagacggatctgcaattcatccagcgcattctgtctgaggtgggaatttactggcgcacggagatggacgatgtgcgcggtctggatacgtacatttttgccgacagccagcttaacgaccagtttgatgtgcgcctgccgtacagcgagccatcggggttgttcgacggcgcggcagaatcggtctgggatgtgcggacctggcgcaacgtggccaccagcactgtcgtcacgcgggattacaactaccggaccgccaccacgccgatggatgcggcggtgagtgtgcgcagtgatgcggtcaccaccggggagcattaccgctacgcggcaccttatcgtgaagcgggcgatgacgcgagcccggagccggaaaccgaatctggcgcgttctacgcccgacttcaccacgagcgggagctgaacaggtcggcccgcattcacctgttcagcaatgctgcacacctcactcccgggcaggtgctggagccgcagggcgacgtcattacggccctgcaagaaggcgtgatcctcacgctggtgaccttccgtggcgcccgtgattcccgtctgcatgtgtcagtctggggccagccttacaccgaacgttactgtttccgcccggcggaaatcccgcgtccggaaattcacggcacgcttccggcccgggttgagagccgggagaagaatgatatctacgctcacctggatgagcaggggcgctaccgggtgaagccggacttcgaccgggagagcacggagccgggctacggctatctttggctgcggatggcgaagccgtactctggtgatacatacggctggcacaccccgctcaccgacggtaccgaagtggccatcgcgtacagcagaggcgacatcgacctgccgtatatttcccacactttacatgactctgaacatccggaccccgttacccgtgacaaccacacccgcaacgggccacagccccggcaaacaacacgctgtggatga

SEQ ID NO: 193953 - DNA, 258 bp, Klebsiella oxytoca
atgtttacgatagagaaagaagttgcggttaatcaggtgacggctgatggtattgcggttggcactgcgatgctcaaagttaccctgacatacaccatcgagaggatcgagcttgaaggggcgaacggtatcgctttttacactgttacgtctggcgcggatgctgagggagtaagaaattacatcccatttacctattcagggagcggcgatccgctgcctgaggccgaggcagcgctaaagttaacagttgaatga

SEQ ID NO: 193954 - DNA, 2223 bp, Klebsiella oxytoca
atgaccagacttccagagtcctcatcgtgggaagaagagattgagctgatctcccggagcgagcgcgtcgccgggggactggatggcccagcaaaccgcccactgaaaagcctggcaaaccgtacgcggtatcttaaagaccaggccgacacagcagatgaatcgatcgccgaaaaagtcagtgcggtaaagacgttcgccgagggcgcgaccctggaatcgccgcgtgaagaaatcctgttcgacagttatcgcctggtgtggacaggggagtttccgaaaacggttctggctggcagcacgccgcaagggacgggcggaattggtgccggatgctgggcgtatacgtcggatgctgtaattcgccaaaacctgggttcaggcgaaatcccgggtacgtctcttgtacgcggttctgacggagcaagccttgatcaagctattaagtttgtcacaccactcctgaagcccggcgttgaaaatgctgaatttaattattcaattcttcaggccgctgcggataaaaataaacagcttagtttgcctgccggggacttttatatttcccgggcatttgaagccggtaaagggcaggtaatcaggggacaggggagtccaaacttttccccgaattgctatacgcgtctcatatgcatgactgaaggaggtggttgcatctggtatacgcgtgattcatccacgggtcaggtgcggatgccgcagatttacgacatgggcctgaccggtgattatcctgtcaggtttaataacgagcaaacagcgataattaaagacgatatatcgctgtcaaatgttccgtttggtatggtaccggtcgtcaggcgctgcgctataaacccgagagttaatggcaccggaattggtatctcatggtcaaagatgttcgatggcagtatcagcctttgtgagatagcaaactttgatatcgatgtactgctgaacgggtgcgacctgaacagggtgtccatgaatcgcatccggaatgcctggcgctatatgattcttgaattaagcgccagtaccttcgggtctcagaatgaaatacatcttaacgatatcctgcacgttggctcgccaaactgcatcatgattaagaccacggcccgacatgcccgtatttatgacaactatcttgaacaggcgacggggaccgacgggcaggcgctcatagggtttattgatgcgacagccgttgatgcgcctgcttacgcgggaaacgtatcagccggtcgttactcgactattatcagggataaccggatagatggtttctcaaagtctaaaaactttgtttacaaatatcagccaaagggccagacgtacggggaaattgaagacgtatcaacagtaggttctaatgtcggtctggggtcaaatgccctgacgctggttgatgagactggcgcgacggtggacagtgttccgcttctgtataatcagcagcagccgtgctcgtttgtctttaaagggccacgtttcggcaaatggaacgggtatacctcagagggacagttttctgatgttatcaatgggctgaatgtcggcgcgttcggcacctctctctacggaaacctgctgtctgattatctgcgtgcccgcggtaatgaaatagtgctgatggcgggtttcgccagcaccggcatttttagctatgctgcctcatcgggactgtttgaaccggagaaatcatacatcatcgaggtggaggcatactgcgccagcggtactgaagacttcactttcggcggtattgtttccggaacaggtaaagtctcgacaactttcacgctgtcaacgacacccagaaaaatgcgggtggagttcgtgacaggaattgctggctcctcaaacggtatttacttctcacgctcaaataacggcgcggatattgtgattaagcgcgtccgcttcctgaagaaataccttcatgaaaatgccatgactctcagtgcatcgaaaacactacagataaccagccagtccggtgagattcagatagccgccaacggtggttatcagttccctgcatacaaaatactgagattcatcaatggctatctggtggagacattttcacaaatcaataatgccgcccagatagatatcgcctggacatattcatcagggttcctgacggtaaacgtcacaggcacaggcggctctaaacaactggcagtcagtcagaccagccagccgggataa

SEQ ID NO: 193955 - DNA, 585 bp, Klebsiella oxytoca
atggagctggccgagctgatccgcctgctggagaacgtcgtgcgcaccggcacagtgacggagatcgacgaagaaaaatggcgcgtgcgggtgcagagcggcggactaagccccaactggatgcgctggactgcgcagcgcgccggggcgtttaaagtctgggtaccgccatccatcggcgagcaggtctggttcctgtgcctgggcgggaataccgatattgcgtttatcggcgggagcctttacagcgaggacaacccggcccctggcgcatcgcgcaatgagatggtggtgaccgctcccgatggcgccagattccgctatgacgcggaggccggcgcattgcaggtgacgggcatcaaaaccgcagcgatcgaggcatcggtaaaagtcacgctggatacgccggaggtggaatgtaccaatctgctgaccacaaagagcctgaatgtcagagaaggcggggagatgcacggcaacattacccacaccgacggggcgtttacgtctaacggcgtgcaggtggatgaccacgatcacggcaacgttgagcgcggcgggagctggacggagggcacccgatga

SEQ ID NO: 193956 - DNA, 642 bp, Klebsiella oxytoca
atgagcaatgatgccgcgctgtttcagcagctcgatcaggtattcgccgagatcctctccgccatgacgcccgcgcgccgcctgcggacggctcgcggcattgccaccacgctgcgccggtcccagagccagcggatcggcaagcagacgtcgccggagggcgtgccttatccgaagcgccgccgccgggtgctgcggtcacaggccgggatcgggtttatctggcagggtgaagagcgacgtctgcgtaactggcgggcgacacgtggcagtcgtggccgcatgctgaccggatttgatgaggggcggggggcggtgcgttcgttctatcgcgccgatatcgagcgctatctcgatatcagttttaacgagacacggcgcgacaccacaaaagccgatccgatgtttcgccgcctgcgcaccacgcgttttctgaaggctcgcgcgacgtccgaaggggcaagcgtgggattctccggcgtggccgcacgcatcgcccgcgttcaccagtacgggttacgtgatcgggtgaacgtcagcggcgcgatggcgacgtatccccgccgcgaattgctgggcctgagtaaggccgaccgcatggcgatagcccgccaggtgatcgactcgttgggggtgcgctga

SEQ ID NO: 193957 - DNA, 396 bp, Klebsiella oxytoca
atgaaagcgaccgccattcttgccatcgtgatgtttgccctgctgatcgccgctgtcagcgcccttgcatggcaaagccataagcgcgaacaggccgaaaaatcgctgaccggcatccgggaagaactgaagcagaccggcgatgtgctgaccgaggttagggcgctgcgccaggacgtcagccaggttgaggccaggctgaaaacactaaaccagcagcgcgccgtaacgggagagcaccgacgtgaaaacatcaaaaccacactggccggtaacgaatgcgccattgctcctctgcctgctgctggcgctgacagcctgtaccagcgagccgaagaagtcgccgccgcagattattcaggagccactaccagaaagcctgacggcaaaaactga

SEQ ID NO: 193958 - DNA, 498 bp, Klebsiella oxytoca
atgagccttgtagcccctcgcacagtaaccccctctgcggaggatgtgccggacgttgacgacggcggggaaaaagtcaccgctggcgcgttctggcccgaaatcgcgctgagcgacgtccgcaaaaagatgcgcatcaccggcacggtgaccacttcacgactgaaagaagccgttatcgaaggcgtggcgcacgtcatcgaacagctaaccgactggcaggcggagcaggtggccgctggttacagcagcctcgccgatgttccggccattgagatcgacggcgaaagcgtgaaggtgcatcgcttccgccgcgcggcgtccagcattgcccgcgcgcatatcctcggaacgtttcgtgacgtggacaccaccggcgacgccggggaaaagcgcgcggccgcgctgctctcacagtcggatgacatgtggcgcgatgcccgctgggcgatatccgatattcgcggcactgtgcgcaattctgcggaggcgttctga

SEQ ID NO: 193959 - DNA, 963 bp, Klebsiella oxytoca
ttgcatttatcgacggcattacgtttgccgaagcgccggaaggcggcgagtaaccgcacgctggcgggcctcggcccgccattaatcggggaagaaatgatgctgacaccggcacaaaaacattttcaacgcgtcatggctgaacgtcatggcaaggcggccgatttgtccgatacggcgcgaacggcgcatgagcagatcctgcaccgcatgcgcatggatatggccgcgctgaaaaagattcagggcgagcaggcgaaagccgcgctcaagcgccagctgctacccaattacgaagggtggatcgagggcacgctcgaaggcaacagcggccgccaggatgaggtgatcacccgcctgatgatttgggcgattgatattcgtgattacccgctggcagcgcgcatcgggcggtatgtcatcgcccataacatggcgatgcctgaccgtttcaaccgcaccgccgcaaccgcgctggtcgatgagctttgcgacccgattctgatccaggtcaaagcggatgaaagcaccgacgtgacgccatatctggcggtgctcgatgacgtggcggagtttaccgccggcagcgatatgccggacatggtacgcgccaaactccacaaggcccgcgcctttgcgctgcgcaacgggacgcccgccgagcaggaaaccgcgttagagctgctgcgcaccgcgctgatcatggaccctggcgccggggtgaaaaagctgatcgacaagctcgccagccagctgaagaaggccgccgcagcgaatgccagcactgaaaagaatgatgccggcggcacaggagatggcgggcagggcgaggccgctgcagcaccgccggaagtggcggtgccagctgagaaaacagcagcaaaaaccgcccgcaaaagtacaacccggaagccggcagtgcgcaaaacaaccacgaaaaaagcgcctgccgccaaaaaataa

SEQ ID NO: 193960 - DNA, 1050 bp, Klebsiella oxytoca
atggaaaataatacccgccagctgtttgatcagtacatcgcgcaccaggcgaaattaaacggcgtctcgcccgcggcgattgctgcgaaatttgcagtagatccctcccggcaacagcgcatggaacaggccgcgcaggaaagtgattccttcctgagcaaaattaacgtgtttggcgtgactcagcagatcggccagaaaatactgattggcagcaaagggcccctggccggtgtgaacaacagcaccaccacacgccgcaacccaggccagaatcatgcgatggaaccgtttgattacatgtgccgcaaagtcaactacgactacgggatcggttatgagcagcttgatgcctgggcgcacatgccgaacttccagccgctgattagcgccgcaatggcccgtcagatgtcgcttgaccgcatcatgatcggctttaacggtaccagctataacgacccgtcagaccgtgcagccaacccgctattgcaggattgcggcatcggctggctgcaaaaaattcgcaccgaagcgccacaccgtgtgatctccggcgtcaccgtcacctcgcgcgatgaggacaacaagatcattacaaaaggcacctacggcaatctgggcgccgccgtgtacgacgccaaaaacagcctcatggatgagtggcacaagcgtaacccggataacgtcgtaatcctggcgggtgacctgctgacaaccggcaacttcccggccatcaacgcgatgagtcaaaccaacccgaacaccgaaatgctggccggtcaactgattgtcgcgcaggagcgcgtaggcaatatgccgaccttcatcgcgccgtatttcccggtgaacggcatcctgatcacgccgtttaaaaacctgtcggtgtactaccagcgcggcggcctgcgccggaccatcaaggaagagccggagtacaaccgcgttgcgacgtatcagtcctctaacgatgactttgtgatcgaggactacggcaacgttgcatttatcgacggcattacgtttgccgaagcgccggaaggcggcgagtaa

SEQ ID NO: 193961 - DNA, 834 bp, Klebsiella oxytoca
atggcaggcacagctaaaccccgtaagaagtttcgcgttgccgtctccgggaataccgtcgatggccgcgaaatccagccgcaacacctccgcgacgcggcggcgaactacaaccttgaggtgtacgccgcgcgggtaaatatcgagcactacctctccccgtatccgggtagtgatttcggcgcgatgggggatgtagtggcgctgagcgtcgaggacattaccgatgggccactggccggccgcaccgcgctttacgcggagatcgaaccctccgagcgcatgaagcagatgaccgataaaggtcagaaggtctactccagtattgagctgcacccgcagtttgccctcaacggcaaggcttacatgatgggcctggcgatgactgacaccccggcaagccttggcaccgagcgcctgaagtttgccgcgcagcagcgcgcgcaggtgatggctttcaataatcagcaggcggaagcgccgatgatcaccgaggcgattgaggccgaaatgatcgaactggccacccagcgcagcgacgagggtgccaaatggtacacccgcgtgatggatattctcggaaaggggcagaaaaccgacgatcagcgtttcagccaggtgcatcaggccgtcgaggccgtggcgcaagcgcagtccgaccagctcgaccgcttcagcaccatcgagcaggagtgccagcaggatagagccgccatccagaagctgaccagcgacctcgacgcactgcgtcagcagctcggcaacactgacgccaactttagccagcgacacgcggctaacggcggcgcgaacgcgcagctggctgactactga

SEQ ID NO: 193962 - DNA, 453 bp, Klebsiella oxytoca
atgagaaagacatgcataaatataaatggaaatagaattcaagatgttacaccagactcattttccttctctgatgaggatttcggtgcttgcgccgcctataacactgttaaagcatctgattattacaacgttgtaacattagtccacaatggagctgctatcgggtactgctcttacaagtttgggggctccaatgaggattcagagaatatatttattacgatgaatattgattccgtttttatcacccaggcttaccgtggcaatggatactctaattttttagcgtcctatgtagcatttgactttgttaactacgtcaaagatatgactagcggcaataaaccttatgattatcgcggtcttaaccatttcatcagcgatgacggaacaaacttttatgagcgcgtgctacagatagcttatgggaaaagaccgctccacttttaa

SEQ ID NO: 193963 - DNA, 279 bp, Klebsiella oxytoca
atgaatgagcctgtctggttagctgtagatcccgccgatgagtcaggggattgcaccatagtgacagcgctggtttaccgcataaccggtagccagcagtaccacaccttcaccctgattgatttcagggcattcatccttgatgcgagtgtaccggtctccaggtcatgcgtatccggtacaggctacgcggaacagggcatcagaaaaggtggactcgtgcggctacagcttccttccgacctgatgaggagtcgccattccgatgaacaccattga

SEQ ID NO: 193964 - DNA, 300 bp, Klebsiella oxytoca
atgcgttcgacctctatttttctgcttattaccagcgtactgaccttttccttcagcgcatttaccgccagcgcggaagatgccgcgatgcaccatcacaccatgtcctccatggcggatatgccggagatgaagaaggcggatgattccgccaaaaacatatgccagtatttcaataagttactgaaatactggcttttcgataacctcaaactacccgccaaaacccgccctaactcggcgggtgtggacactttgtggatcacataccagcgccaatctttgctgcagccagtgtga

SEQ ID NO: 193965 - DNA, 258 bp, Klebsiella oxytoca
atgtttacgatagagaaagaagttgcggttaatcaggtgacagcggatggaattgcagtcggaaccactacactaaaagttagcctgacatacaccatcgagaggatcgagcttgaaggggagaacggtatcgctttttacacggttacatctgacgctgatgctgagggtgtaaggaattacatcccatttacctattcaggtgccggcgatccgttatctgaggcggagtcagcgttaaagctagtcattgaataa

SEQ ID NO: 193966 - DNA, 159 bp, Klebsiella oxytoca
atgcagacactgcggctatttagcgggaagtcctcgtccattaaacactccaagcccgaagacctgccggaatacgtcgcatttggtttctatcatcgcgtgctactgatagagccggcggcatcctttgtttattacggatgctttaaaaatgattaa

SEQ ID NO: 193967 - DNA, 228 bp, Klebsiella oxytoca
atgctcaaacaggatgcaataaatttttttggttctaagacccggttagccagagcagcaggggttgaaagatccgcagtctcccagtggggtctcttggttccagaggggcgcgcacaaagattagtcgacgcctcatccggcaagctgacatacgacaaagatatttacgaccaatatcgtaacgaaaaacgttctggtgaggtgaatcatgaaaatcaggcatga

SEQ ID NO: 193968 - DNA, 2448 bp, Klebsiella oxytoca
atgcccgcgactcctcaagaccgtctttatggactgaccacgagtgttgctgtaaagccaccggtctatatttcagctgattatgatatcacccgttttggcgagcagaccattacgtccaaaacgccaacggatgagcggacgatcactaccacagaagggatgcgtgttctgcttttagggcaggataaccccgtcgaaaacggtatctgggttgcgcgccgttcgttctgggtcagggcgactgattttaacggcccccgggatgcggttaacggtacgttggttttttcgattaatggcgactgctggcaggtagaggctgatgatcccgtcgtcataggtaagtcggttattcacttccggccaacttacccgtttgaagcaaatctggacatattccagcgtacgttacgagtccctgaagcctcggtaaatgttttgccttcagcagaggagcgggcatggaaggggttgggctttgatggtgccgggcagccaaaactgcaggatcctgcgggaactggcttatgggggtatgttccggcaattggctcgtttgaaaaaggttcgctactcactcaacgctttgaggttcttctgtgggaatccacggatgaatactggcgctgggatggggcaatgccgaagatcgttttaccaggtagcacaccggatacggctggcggacggggtaaaggaaagtggctggatgtcaccgatgcgactcttcgctcaaacctgggttcaagcgacggctcgaaactcatcggcggtctgccttttgtaactcctgagatgttcggctcaagccggggtgatataacccacgatgaagcttttcggctgatgcttgctgcggccgccgtgcacccaacgagaacggcgtgggtccctggtgattatgaactgtttgatacccatcttccgccgcagggggtaacgctcatcattgatggcgttattaagcataatcctgtcggtgatttcacgtggtctgaaagcaaccgtcgctctccttattcattatttctggttacagtaagtgatgtagccattaaaggttccgggagaattgaaaataaatatgaggctgtttccgtagatgcagggggagacaacttcaaatttgaaggggtaacgatttctaatcctgaccgttcgaaatcggttgggttatcaatttacaacgtatttaacgtcagtgtgttgaattgcctcattgcaaataacggcagcaaagggacttatgtaaatagctctagcacggggattaccgggcgctacggtaatggcattgatagcggaggcatccgggggctgaccgttcgcgggctttcactgattgataacggcggaaacgggttctggtgttacggtgtcggggatttaaccttcacgactaactggtgcctcaggaatggcacatccggtatgcagtatgggccacacccggattatgatggcgtgaacatttccgataacacctgccgggaaaacgctgcggacggtattgatattaactacacagggtcttcgccagtcccgattacgggggttattaaggggaatatttgtcgacgtaacggattttttaattctgatacgactaaaccaacagctgatggttccggcgtcaccctgcgtaatgttaccgattatgtctgcgcagacaatatgatacgggataataatggcgtaggaatatattgtacatttgcggcagactgcaaaatacatgataacgtcattatcaacagaataacgttgtctgccggtatgtatcagggcttcgtgtcaacggatgtaaacatccacgataaccggattattaccaaagggactgcctatcaggaaggcggctctatgccagtttcacgaatgtcattccacagtaacaagttatttagttctcaggcccagtcggtatccattccgagcaatacacagacggacagaacctggaaagacaaccatcacgttacgcctaacgtcatcaacttctggttttcagttaaagatgacactgtgcgctatacgggaagcacaggcagggcagtttacattaacgccaactacggcaaatttcgcgacgttaccgttaacggcgcaacgtcagacgacctggtttatgttgatggcggtcttaaaaacattttctccggatttacggcaaataacaccggaaacgggagggccgtatacaccaataacagcgctcgtctcaagttcgcggattcgtttatccagtgcgctgcaggtacggcattattctgctatgccggtactaccgttgatctggatagctgtgatgtcatcggcgctacagccataagtgcgccgctgccagcatccggaagtgccgcagagataaagaaagctggtacgaactttataagcggtacgataagtacagctaccccggttaaacaagtcccgtattcataa

SEQ ID NO: 193969 - DNA, 690 bp, Klebsiella oxytoca
atgaacatcaaaccatcagttttttctttcgagtcaaacagtaatattcgcgccgtaaatattgacggcaacccttggttcgtttcttctgatgtttgcaaggctataggaatcaaacacaccgccagtgctatgcgcgctttagacgatgatgaaaagggtgtgcattcaatgcatacccctggtgggcagcaggattttacaatcatctccgaatctggcctatacaccttaatcctccgctgccgagacgcagtaactccaggcaccatcccctaccgtttccgcaaatgggtaaccagcgaagtgctgccgcagatccgtaagaccggccgctacgttcgggaagaactctcccagactgataaagcccgcatgctggcgcaggagatgaccagcaatatgatgccggccatcatggatgcgctgcagattgagcagaagcactataactacccgttgaagtccagctatcgcgagcacatccactcgcctgaaggcgtgcttgctctgacgcagaactcaatgctgatgaagctactacggcaactgggcactgatggccatgatgtatctggcgcggcggcagaggttaccaccatgtttagctatatcgtcggtgttagcacttgcctgcgagatatcgaaacgcacgctcagtatgtgatgactaaagcaaagggattctga

SEQ ID NO: 193970 - DNA, 2622 bp, Klebsiella oxytoca
atgccaacagttccaacagtcaccggtcgccaggttgaaagtcgtggattccagtctcctggcattcaggcgtttgatcagcctaatattggcgatgcactcgttgacggcggaagcaaagccatcagcgtatttggtgaggccaaacagcgggcgaatgtggctcttactcaagaggcatcactgaaactgaatgccgttggcaacgatctgctgaataaccctgattccggttttatgaatctacagggtaaaaatgcgatcggaaaaggccatgagtatgtgcagcagttcgattcgcaggtacaaagtattgctgcaagcctgcctgatgagcaggcgagaaatgcattcctacagcaggcacagcagcagaggatccagtttgcaacaacagctggacgccatgaagttggtcaggtacgtcagtacgaggcaggtatgcaggaaggtacacttcatgcactgtctcagcaggctctttctcctggcatgttcgcaccagcattgattaatgcccgtgattccatcattgcctacggtaaagcccacgggcagagcgatgaagaaatcgagtcgaatttcgtgcagtggagggagcaggccgctaaccgcgccagcgaagcatggtacacgcctacctatcaacagatgatgggtccggaaggaaagatcgaagttacggacacgccgagtgaatcgcagctcttttccgccatgatctggcatgagtcaggcggaaaccagtatggcaaagacggagcgccgctgatgtcgcctaagggtgccgctggcgtggcgcaggtgatggaagataccggtccggaagccgctaggctggcgggtgttccgtgggaccgcgataagtggcttaatgacccgcgctataacgcgaagcttggccaagcatatttcggcgcacagatgaagaagtacgacaataaccctgtgctggcggtggcggcatataacgccgggccgggcgcggtcgatggatggatcaagaaactgggggacccgcgcacaggtgccgtcagcaatgagcagtttgcagcagcgatcccctacgatgaaacccgaaactatgtggcgaaagtaaccggcagcgcgccagggatccccggtacggccacaatggaaaacctcatcaaccagcctttctggaatgctatgagtccgcagaacaaatcagcgatgatgagcaaagtagctggaatgtacgacatgcaggccgccgccgggcgcgtgtcattgcagagtcgcatgcaggatgacatggcgaaactggaggccgggcagtctgtcaatccgatctctgaacgggaatggctggcggtgatgccgttgcaggccagcccagcggaacgcattcagatgcgtgagtccttccagcagtaccagcaggcgatgacgctgcaacctgtttatcaaactatcgtacagggttccgcgcagcagggtatcgcagcggtccaagcgatggcaccaaaggaagatgacccggacttcaaattcaagcagagcctttatgcaactgctcaggccaagctgaatcaggtgatgaaggcgcgcgagtctgaccctggtacgtggctgcaaaccaactcggcggtggtcaaaaacgcctttgagcagtaccagaataatcaggcgtcaggtgaatatcttgtttcccgcctcgaggccgagaaagacaggcttggcatcaacagtaagaaggtacttccggactccatgatcaacagtctgatttctaagatagacaacaataaggaatccagcgttaccgccattcagtcagtggcgcagtcgttcggaaaatactctgatcaggttatgcagcaggtgcagaaaagtgcgttcccggcgcttcaggtcatcatggctaccaataacccacgcgcagcaaatgcgctttggcaaaaccgcagtgttaaaacttctgatctgcgaggcagttttgagaagaccgacgccgacagtgccgactcatcgtggaatgaccaggcaaaagactttgcagggacgatggtcgtgcagcccggcggcgccgtggtctggaacaacttcaacgagcagggtaagcgcctgacctacacctatatgcagcgtggcatgtcaccctctgacgctgcaaaacaggcttatcaggacgtactgggcgagcagtaccagactaacggaacatggcgtatgcctaataccgcaagtcaggatattcgcgatgtgaatgacggagctaacgagtacctgaaaaacctcaaagcagaccaggtgatgccacttattggcgatccgcgtttgccggaaagcgttaaccgcgagcaaacactgtcacgcctgaaagataacgcgcagtgggtaacaaacagcgatgaaaccgggcttacactgatgctgaatggcctgctggtgaacgatgcaaacgggcgtccaatcaccatgagttacggcgatctggcaaaactcggcgccgggaaccggtcaacgtggaacagcatcacgaaattcacgcagacgcctgtgacgtatacgccggggcagtcgaaaaactattccatggaaagtcagcgagacaacattatcaacacgctgagtaacggccagcagacggggagataa

SEQ ID NO: 193971 - DNA, 546 bp, Klebsiella oxytoca
atgtgcggaccagttgccgtaggtgtcgccatggttgcgatgtcagcaatgcaggcatacaaccagcaccagcaaggtaaatatgctcagtcggttgcgaaccagaatgctgatatcgccgaaactcaggcgcaggatgctgttaaccgaggcaatattcaggccgaagaggtgcgccgccgcaaccggcaggcagccgggacgcaggcagctaccatgggagcgaccggcgcggatctttcctctggcaacgctctggacattttcggagatacggcccagttcggcacgctggatgctctgacaacggttaataacgcccagcgtgaggcatatggttatcaggttcaggggatgaatgctaccgctcagggtaatgcagcacagagtcaggcaagagctgccgtcacccagactctaatgacagcaccgttaaaagcatatggagcttatcaaatgttcggtggaacatggaatccgtttactcaaagcgacccagccccgattagtgctgcatccggtaccagattaccaagggggttataa

SEQ ID NO: 193972 - DNA, 330 bp, Klebsiella oxytoca
atgggttttccctctccagcaaccgactacatcgagcagcggctcagcgtaaccattctctgccagtttgacgccaactgccgcgctatcgaaaccagtgcaggctatgcagtcatcaacgtatccatcaggccaaagcagggctctcacgtgctcatctcgttttgcggcagtactcagttcgccattgtgcgcgggcgggcgctgattaccagtgacggagaagcgatcgagggtgaggcgcttaatgatgtcgaggttaaaggggtggtgacatacctgataaaccgggagggctggcataacgaagatgatattccgatcatgtaa

SEQ ID NO: 193973 - DNA, 339 bp, Klebsiella oxytoca
atgcctaaatcccccgcagaacgcaaagccgcgcagcgcgcgcggcagtccgccgtcggtgagcgcaagcttgaactggtgctcgatgagcaggaacagaaaatgctggcgcggaactgcgccgcccggcgccctggtcgtgcgccgtacgaaatggcagagtacatcgcgctgctgatccgccaggatgatgccagggttcgcggcaggattaactccatcagcaaacggcgctgcgggaagtgcggcgatcagctgccggtggcatcatgcccgtgcgctggtgactctcaatgctggtccactcttggctggcatgaaacaaaactaccgctgtga

SEQ ID NO: 193974 - DNA, 636 bp, Klebsiella oxytoca
atgaccagcaaattaaccagagaagaacgcgtgcaggcgctctacgacctgaaggtggggcaagttctcagccaggctgatattgaaaacgtcaaaatgttggcccgcatggcgctggccgcaatggacagcgaggctaaggagtccattagttttgacgaatggtcacgcaaatgcgctttgcaaattacgctttgctaccctgattttcgtgaaaaggctcagtacatatgggattcagcgcgcgaaacacagcagccagcgccggtagtgcctgatgatgtgctgaaggcgttgcagaaggttgcgcgaatacgcctcgatatgaacgacttcgacggcgatcgccgtggcatcgctgattgcctgggtgatgccgaagaggcactcatcgaggtggtaaaccgccgcgccgccatgctccaggctggcaactctccggtaattccggattgttggtgccgcacatgccgtcctgtggtcttgaatgatatgcgcttcgtggtgtgccctgattgcgggaacaagcgatgcccgcgagcgaatgaccacagaaacgcttgcacgggcagcaatgagcccggccaggaaggaagcgcatatccggccgacccgcaggaggtgaagggtgagtaa

SEQ ID NO: 193975 - DNA, 651 bp, Klebsiella oxytoca
atgactgatatcaccgaactggcgcagagagagaaattcgaagcgtggttgtctgagaaaccactgcacgcgagatacgtgcattggtgtggagcgctgaaggcttacgactacaccagcattcaacttgcatgggaagcctatcaggccggtagcgctgagctggtagaggcgctggagaagtcagaatcacggcttcatgaagtcgccgtggcgtgcgcaacagcagagcaggcgctggagaaggcgcagcaggttccggttatgccattaggacttcacccggatacgcagaagttggtgaccgacttctgcactgccctggcagagaagctgtacaaggcccaactaaaatacggctacgacgcggactggaaacaggatgggtggccaagtcaatgccaggcgcactttcaacagcatatcgccaaaggtgacccgcgcgacgttgccgcttattgcgccttcatgtggtggcacggctggagcactaagcctgctgaaggcgtggaaccccgcaccgtcactgtgaagttgccggactataggaatacttacaaatccccattcgctgatgaagttgagcatcaagtgcgattggcgcttgagttgttctcgtctgccgctggcatcaaggtggaggctgagtga

SEQ ID NO: 193976 - DNA, 213 bp, Klebsiella oxytoca
atgagcgacaaaacaagagtgctgaactacgaccctgctgactcggacaagatgaagctcccggcaggcaacacctgcggtaactgccaccacattcggcgctgcaaggccatttttggacacaccgaaactgacacttattgcgattggtcgccatcccgctttgtcgtggcatcggcttcaatttcgctgcgcgagggggccgacaaatga

SEQ ID NO: 193977 - DNA, 900 bp, Klebsiella oxytoca
atgatgcagaacgccggaatcatggacagaaccaaatacctcggcggcagcgatgtcgccggtattctcgggattagcccgtggcgcactccgcttgaggtttatctggataaggttcagccacgcgtcaacccagtagatccttcaaagcaaaaagttttcacgcgtggccaacgcatggagccatacgtaattgaccttctttctgaagagacaggcctcgaaatcattcatcgtggcaaccgttatatccaccgcgattacggttttatcgcagcagagatagatgcagaagcggttaccggcgagaacatcgagataaaaacggttagcccattcaaggctaaagagtggggggaagttcagacagatgcgatccctgttcattacacggctcaggccatgcatgggctgatggttaccaataaacaggtatgcgtcttcggtgtgctgattggcggtgatgatttccgtatctatcgggttgagcgggacgaagaaactatccaggccattctggagagagaggtcgctttctgggaccgggtgaaaaacctgaaccctcctgaggccaccaccgtaagcgatatttctttgatgtttgagaaggatgccggatccagcattgaggcagacggaaaagccctggcgcttttcaacgacctacgcgacatgaaatcacgtttcaagtcactggaagaagagatcgctgtatcggaagaaaagctgaagctctacatgcaggagaactcaatcctgacgctggacggtaagcctatctgcacatggaaatctcaggttagcaaccgattcgaccagcagttatttcaggctgcgcacccagacttattcgaaaaattcaaaacagcaacgacatcacgcgttttcagaatgaagtaa

SEQ ID NO: 193978 - DNA, 1023 bp, Klebsiella oxytoca
atgtctaccaatgcacttaaggcagcagcaacaggaaaccatgttgcgcaacataacgagaaaccgaccacgttggctggacttctcgcagatccaaaaattaaggctcagatggcgctggctcttccaaagcacatgaccgctgatcgcctggcgcgcatcgccaccactgagatccgaaagattccaaaactggcagcatgtgaccaggcaagtttcctcggggccattatgcaatgtgctcagcttggactggaaccgggcggcgctcttggccacgcgtatctgataccgttcgacaagcgccagaaagttaatggccgctgggaaacagtatcgacagaagcgcagctgattatcggataccgcgggatgattgaccttgcccgccgctccgggcagatcctgagcatctcagcgcgtaccgtccatgcaaacgacaaattcagctactcgtatggcctggatgaaactctcgtgcactcaccctgcgaaactggtgaccgcggagaactgactcatgtttacgcagtcgcgcgactgaaagatggcggtgtccagtttgaggttatgagccgggcagacgttgaaaaagtacgtgcgctgagcaaagccggcagcagcggtccgtgggttgatcacttcgacgaaatggcgaaaaagacagtgatccgccgcctgttcaaatacctgcctgtatctatcgaactacaaaaagctgttgtgatggatgaacgcgctgaagctggcctgagccaggataacgcagcagttatcaccggcgagtattccgttgttgatgatgatcagccgagcctgacagtcgtttctgactctgatcgcgaagaagcacgggaatacgttagcgcaattcttaacagcctggattcatccgcagcagacgccaaggcgatgtttaagcgtgccgaagatgagatcaaagccatgtctgagaagctgggtgacgaataccaccagggctttatgacaacgcttaatgatatgcgtcccgaattcgaataa

SEQ ID NO: 193979 - DNA, 255 bp, Klebsiella oxytoca
atgcgtagcggtactgttctcaaaggtctctcgcagaaactgaaccatcgcgtttgcagaatcacgctgttcgcggtagcgctccgcctctctctgcagacgcaatatttccccattgcgctggttgataacagcgcgagcctcttcgagctggcggataagcgatgcctcttccgaaatattcatgcggcctccgtttttactaccggcacggcgcagcctggcagcagttcaaccgccggcgctatgcactga

SEQ ID NO: 193980 - DNA, 630 bp, Klebsiella oxytoca
atggacattaacgagtttcagaaagctgccggcgttagcctggcgttggccacacgctggcatccgcacattgtggcggccatgaaagagtttggcatcatcaagccgttggatcaggcgatgtttattgcccaggccgggcatgaaagcactggctttacccagctcgttgagagcttcaattacagcgtggcggggctggctggtttcgtccgtgccgggcgactgacgcagggccaggctaattccctcgggcgccggcagggtgaaccatcgttgccactggagaggcagcgggccattgccaatctggtgtacagcaaacgcatggggaataacgggccgaccgacggctggttttaccgcgggcgcgggcttatccagatcaccgggctgaacacctatcgcgactgcggcaacggcttgaaggtggatctggttaagcagccggagctgctggcgcaggacgagtatgcagcgcggagcgcggcgtggtacttcgtgaaatatggatgcctgaagtacaccgacgacctgatgcgcgtcacgcagatcatcaacggcgggcagaatggcatcgacgatcgccgtgtgcgttacctgtcggccaagaaggtgctggcatcatga

SEQ ID NO: 193981 - DNA, 261 bp, Klebsiella oxytoca
atgtttacaatagagaaagaagttgcggttaaacaggtgactgccgatggcatcgccgtcggaaccactacattaaaagttagcctgacatataccatcgagaggatcgagcttgaaggggagggcggtatcgctttttacacggttacatctgacactgatgctgagggtgtaaggaattacattccattcacttattcaggaactggcgatccgataattgaagctgaggcggcgctacatctggttattaataattag

SEQ ID NO: 193982 - DNA, 1824 bp, Klebsiella oxytoca
atgagtaacaggctgaatacagaaattctgattaaccttactggtaacctgaccgccaaagcccgccagtatggtgccaacatgtccgagttcgcccgtaccagtcagcgggctatgtcgattgttaaagccacttcggctgctgcgggacgggggctggatgtattgggtaaccgctacacggcagcgattgcggggtttggtggcagcgcgatacttaacaatattgcagcaaccgaccgtcggatgaccagactaggtataaccgcaggaaaaacaaaagatgaaattaatgccgtattcagtgacgtacaggatatgtctatcaaagccaaaatcgatgataaggaattagtcggttttctggaaacagtcacgacgatgactggtgatattgagtttggaatcaaaaataaaggaactgctgcgctcgccatcgcaggtacaggcagcagcggggaatccatcggcgcactttattcgcagtttcagaaatacggtgtaaacgatgaaaaagattccacgttagcgctggatttgcttaacagattaggtaaagaaggcgcatatgaactgaaggatctggcagagaaagcggggccagcactttctttatatgctgccgctggcggtcgtggcatcaaagggattaaggatgtaggcgtattgatggaatcagccagggataccacaggcaaccgtgatactgcggcgacactggttgagaacttcattcgagaaattcaggaccctaaaatagctaaagccttgagggaaaaaggtgtaaacacaaaagatacaaatggccaactaaaatcactccctgaccttgtgctcgctttggctttaggttcagcaaaaggtgcagcaaagaacagagccgcaggggataaagatgcttcagcgctgggtgaattaaaatcagtcgggttcacgcaaacgagccttgatttaatctccggggcctccagtaaaaaaggtcaggaaaatctgctgcgttacaatgcagtcgtagcggatggtaagagtattcaggaggatgcggcttatgcggcacaggatttcacctctgctatgcaaagccttgcaacgacgctggagaaattcgctaataaaaatctggctaagcctatccaggaatttgcagatgtcattaataacttagatccaaatgttgttcaggagtggctggagtttggcaaggatgtagccgtctcgataggcgggattatcgctgcaaggaaagcatttaaattcggtaaaaatatctgggatatggttacccccggtaaaggaaaggggctaccaggagatgttgctgatgctttcggttccggggtgatgccggtttatgtgaccaactggccagctggcgggctgggcggagataaagaagatagcccatttaaaaaaatccttaatcttgctacaaatttaccaggtaatattggctccgccgccacggcagcacttatgcttaatgagtccttagatttgttagattacgatcctttctccgataaaggtcgggaagaactcataaagcgggtccatcaaaataactcacgttccactatgtggggggatttaaagaactggctcgaatcttctgctcagtcacctgctggctatcaggacccgtctccgtgggcttcaatgcagccccagaaccagtatggctacccattcctaccccagcagttgaaaggcagcatcgaggtttctgttaaagatgaccgggtgcaggtcaccagtgttaaagtcaatgcacctggtataaccatgagcgccggtagtggcgttagaaatatggagcagcagtga

SEQ ID NO: 193983 - DNA, 726 bp, Klebsiella oxytoca
atgaaaacaagttttaatgcattgctggctctggctcctcataaagatataacagcaataaataaattcattacatcatcctgctttacccgcacaggacaagacacgctttcttttatccgtaaaatgggatacagatttaacctcagcgatacaagtgtttatatagggctggtaaagaaacagtttgaagaggcttgtacaaaatttggtgacactgtagagattgattttttctgtgatgttgctggcacgaagtatttcgaagacttcatggctgtttatgataaagattcattttatcaggaaatgattaacttcaaccctgacttcaattatacaggaaatctgaagagcatccgtagtcgtgcattcacagctgtaagagaaaaagacctccagaatccgggggaaggcatttcttatcttattggcgcactggaaaatgcactgaagaaaattggtgtaaatcctgaagatgatatgaacggaatgaccaaatcattaagaatggccatgagcattatgaatgatattggtggcatgcaattttacctgcctaaaggtgacttactcaaacgggtggttaataagatagatatatacaccgacagctacacgatgggtactcagcaactggcaataaaatacggcgtttcatttaaggcaatcatacttgttattaagtcagtgaaacaggcaatgaaagaatacgagggtaaataa

SEQ ID NO: 193984 - DNA, 228 bp, Klebsiella oxytoca
atgaactctgccccggatgttaaagaaagggagggcatcctgaaaaagttaatgtttctaaccatccgtgacaagaacgcgctggatgaatacataaaggccaaccgattcagaaacgtcaaagataacatgaggttcgcggagctgctgggttacggtacttcgaaatcagcgatgtgcaggtacataaaaaagattaaggcggaatatgatgaaaacaagttttaa

SEQ ID NO: 193985 - DNA, 1383 bp, Klebsiella oxytoca
atgcaacaacaaaacaagccacatctgctgcgcgggctgaatgcccggcacattcgttttatcgccctcggctccgccatcggtaccgggctgttctacggctcggcatcggcgatcaaggccgcgggcccggcggtactgctggcctatctgatcggcggcgcggcggtgtttatcgtgatgcgggcgctgggggaaatggcggtacgcaaccccgtttccggctccttcagcagctacgcgcgccagtatcttggcccgctggcgggttttattaccgggtggacctacacctttgagatggtgatcgtcgccctcgcggacgttaccgcgttcggcatctatatggggctgtggtatcccgatgttccccgctggatctgggtgttgagcattatcttttttatcggcgccatgaacctgtgcagcgtgcgcgttttcggcgagatggagttctggctgtcgctgatcaaagtggtggcgattattgccatgattgtggcgggcggcagcatcattttctttggattcggtaacgcctttccggcaaccgggctggagaatttgtggagccacggcggctttgcccctaacggctgggaggggattatagcctcgctcggtatcgtgatgtttgcctttggcggcgtcgagattatcggcgtgaccgcggcggaagcgaagaatccgcagaaggtgatcccgcaggcgatcaatactatcccgctgcgaatcgtgctgttctatgtctgcaccctggcgattctgatggcgattttcccgtggaacagcttcggcgagcggggcagtccgttcgtgctgatttttgatggtctggggattccggcggcggccactatcctgaatatcatcgtgatcagcgccagtatttcggcgattaacagcgatatttttggcgcggggcgcatgatgtacggcatggcgaaagaggggctggcgccgaagagcttccagcgcatcgccagcaacggggtgccgtggatgacggtggtggtgatgggcgtggcgctgctggcggcggtggtgctgaactacctgatgccggagcaggtgtttgtgctgattgcctcgctggcggccttcgcgacggtgtgggtctggctgatgatcctgctggcccactttgcgatgcgtcgcggcctgtccgctgaagagcgcggcaatatcgcgttcccggtaccgttctggccggtggcgccgctgctgacgctgctgtttatgggactggtcatcgcggtgctggggatggtggaggagacgcggattgcgcttatcgccggtctggtatggctcgggctgctgacggcggtgtggtttgcgcgggtgcgcaaaaacgccgtgcaggcggtgacggagtcgtga

SEQ ID NO: 193986 - DNA, 621 bp, Klebsiella oxytoca
atgctgattggctacgcgcgggtgtctaccggcgatcaaaacctcgatttacagaaaaatgcgctgattcgcgcagaatgtgagcagattttcgaagatacagcgagcgggaagaacgcccggcgcccggggttaaagcgagcgatccgccgcctgcgcccgggtgattctctggttgtctggaagttagacaggctgggccgcagcgtgcgtgatctcattacgctggtctctgagttgcaggagagggggatccatttcagaagcctgaccgactcgatcgacacttcaacgcccgccggccgctttttctttcacgtcatgagtgcgctcgcagagatggaacgcgagctgattgtggagcgcacccgcgcaggtctggcagcagcaaaagagcaggggcgcataggcggccgtcgccgggtgatgacgccggaggtcgtcgagcgggcacgtcgcatgctggagaacggcgccacccgacagcaggttgcgggcgtgataggggtagggccgaagacgatctataaatacctgcctgcggcgccctcaaaaccagatagcgagcgcggctacgtagagtatcgatcgtgtgaatccgttataatcgacgtgagatga

SEQ ID NO: 193987 - DNA, 1158 bp, Klebsiella oxytoca
atgagcaaaatttttaaatcgctaattacgaccgccggcagggagaaaatagctgctgcaatcgttaacggggacaaggtcgttttctctcaaatgtctgtcggtgatggtggcggtagcgcaacaatccccgatgaagagcaagcctcattagtgaatgagctttttcgcacccaactgaacagcctgaaattgtccgatagcgacagtattattatcgccgagatgattattcccccggaggtgggcggatttactatccgggaggcggcattatttgatgatgccggcgagtgcatggcggttgccaatgtcccggaaacctataaacccgcactggcggaaggctcggggcgctttaccatcctccgcatctggctggcagtaagcagtaccgaggcggttgaactcattgtggatccggggatcgtgctggcaaccgtagaggatgtgattaatgccggtaacaacgccaaagactatgccgacgagcaactgagcgagcatgcagcgtcacgaaaccaccccgatgcaacgctggatgaaaagggatttacccagctgagcaataagattgatagcgacgatcaggagaaggcggcgacgcctctggccgttaagctggctattgccgcagccatccgctccgcatgggagctggataaccccgttggtacagtgaaattctacgcgcagaacgttgatcccaatgagcgttatccgtggactgagtgggcgtatacgggggagaaaaagaccatccgtgtcggcagcgccaatggttcagatattggtacaactggcggcagtgataccgtcaacattcagaaagcgaaccttccggaagtacaaattaatgtcagcgcggatatcagcaaccacccggaacaaaccctgagaacggaacctgccggcagacacaagcatggtggagtaccgagccgggaaaacccgtgggagattggcggagatatcagccagcagtttaaccccgccaacctgggcgaaaccgacgaagtggacgatcatgaccacgagatgatcatcccggagcaagagcacaccttcagcggtaaaacagacaatctgggtagcggtgccgctctcagcgttgttgaatctcacatcctgttgatgtgctgggcgcgggtggcgtga

SEQ ID NO: 193988 - DNA, 792 bp, Klebsiella oxytoca
atgaaatatctacccggatcacttgaaataaaactttatgaaagattatcgaaaaccgatatacttgacatcttagcggaacaaatgactatgcttgaggaaacatttggtatcgaagagtttagtctaaattactatcttggatgttatattgatagtaagaaacaatccttctatcatgaagaacataacgctattgtagagtcatttaatttaaaaaatgttacgaagcttgagaacacgtctaaactcatctcaaaaaatggtaatgcccgaattgtttcctttgataaaaatattaatgtagataaaattcgctcaaccgtagaaagcattcagatgcataatccatatcgatattggtctaataatatcaaagttattccatcatccgtagttaaaaacatcattcaagataaagagagaaaattacaactagaaagagataaaattaacttactcaaccaactaagacgtaaacaacaagaggagcaaaagagtaaggagcgtgaagaatttgatcgtccgttaaaatcactcattgcaagaaagatcatggaaagcggtctaactgatgtagagttcaaaagaacaatatgttccagcttcgactatataaaaagcggcgctgtaatagcaaaatacctagccaataaacctgatttattagaaaaatatcatgattcccgattaataagaatgtccatcaaaaatgatgaaggtaaagtcggcaaggttgaactctatgatctttctggagcactaatttttgaaagctataaaaacaaataa

SEQ ID NO: 193989 - DNA, 294 bp, Klebsiella oxytoca
atgacagaccatataaaaaaagaaccggaagatgaaacaattattgatagtgctaaaatttacgatgcgcttagaaaaaattattttgatagatgcttcctttcttcttacttagatgaaaaaatagatgataacttacatcctttcagtgacgaagcatataataaaatgaagtccttgcatgatgaaagagataatcttaattttaaaaacaaaatgaaagagattaaaaggaatttatctacatcacaaaaaaaagaagtcgataaaataatgaaaaacaaaataaaataa

SEQ ID NO: 193990 - DNA, 468 bp, Klebsiella oxytoca
atgaggaaagtaaaattagacaatgatgatttaattcagtatctgaacaccattaaagcattaaaaaaatatccaacgatgtctgaatacagagaggaatatcgcaggctaagaaccgatggctcacccttgattgaagcaaaaaaatttaaatcggcgcataccgaacttttgagattagacaggaagaaaaaatcactgctcgaaaaatttattgaagaactcaaccctgtcagtcacgcatcagcccttgcgtcaagaaagcttgaaaaagtacaggagtccattatctaccgaaagtcattacttgagaaaagccctgatgaactcgtcgctctggtcataaaacagcgcacagaagcggctcttgagttccagcgttctgttgagcaaagtcttgagcaactctctaacatttcgtcagagttcgaaccatcaagtcaactacgacgaaaaatggccctataa

SEQ ID NO: 193991 - DNA, 405 bp, Klebsiella oxytoca
atgagtgaagcattaaaggtactgaacaatattcgtacacttcgcgcacaggctcgtgaaactgatctggaaacgctggaagagatgctgaaaaaactctctgttatcgtggatgagcgccgtgaggaagaacaagcaatactcaaggaacaagaacaacgtcaggctaagcttgaagccttccgccggaaactgttagaagatggtatcgatccagcagaactcctcgcagcagttggctcatcccagcctaaagccaaatcgactcgcgctccacgccctgctaaatacaaatatacagatgaaaacggcaacgagcagacttggacgggtcagggccgtactcctcgtgctatcgctgctgccatcgaatctggtaaaacgctggaagactttgcgatttaa

SEQ ID NO: 193992 - DNA, 483 bp, Klebsiella oxytoca
atgagagatgaaaaagaacagttgactaaaaattcattgactactttcggttttttgggacttgttatttctgggcttatcattggcattcttgttcttgcattatacggagcgcttatttattttgtgaccgaaatgatatctgcagaagtgtatatgataattctagtgccgttactttcctcattaattttgttatatgtttatttaagatgcggtgagaggatcaaaaaaataaatgatgcctttctattctttgttgcagctgtaaaagctatgcagttagcaggggaaagtattggatacacagtaggcatagaaaattacttccctgtgccaaatagtttaggtctgttgataataatctctagttcagctgtcctgaaagcaatgataagttttttggagatctttaaaaaagaagaccgtattgtttcttggttaaaccgtaaaataaaattatctgacagtaaagcagactga

SEQ ID NO: 193993 - DNA, 288 bp, Klebsiella oxytoca
atgaattattggcttaaagaaattgatggtaaatattctcaattattaactatatgtttctattttataggttttattagtaacactgtagtattcttcatcatagataatgacagaatacatgctggctcgtcatttgtcatgacattgtttttgttaacctcccctgttttttctgctttgctatacgaaagcttatgttcttatttgaaatttaaatttaatgcattaatagtgacaagcatatttattactaatctaattgtcattacattgatttttatttaa

SEQ ID NO: 193994 - DNA, 795 bp, Klebsiella oxytoca
atgggaaaaataaaatattggctaatagcaggatctattatacttcttgcgatcgtttacgctgctatcagtgacagggattctacgctttctaggttgaaatcagcaggtgaaaacggagatgtagaagctcagtatgccttgggtctcatgtatttatatggagaagtactggatgttgattatcagcaggcaaagatttggtatgaaaaagccgctgcccaaaatgatccgcgtgcgcaggttaaactcggtgtgatgtatgcaaatggtctcggggtaaatcaggattatcaacaggccaaatcttggtatgaaaaagcatcggttcaaaatgatgtagatgcgcaatttttgcttggaaagatgtatgacgatggtctcggggtaggccaagactaccaacaggcaaagatgtggtatgaaaaagctgctgctcaaaatgatgagcgtgctcaggtcaatcttgctgttctatacgcaaagggtaatggggtagaacaggattatcgtcaggccaaaagctggtatgaaaaggctgcagctcaaaatagccctgaagcgcagttcgctcttagaattctgtatgccaatactaatggtgtagagcaggactatcagcaggcaaaagactggtatgagaaagctgctgttcaaaacgatgcgcaggcacagttcgatcttggtgtgatgaatgaacggggtgaagggggtggtatcaacgtagagcaatcgagagcttggtttgggctggcatgcaagaatgggcacaaggaaggatgtaaacgacagtag

SEQ ID NO: 193995 - DNA, 351 bp, Klebsiella oxytoca
atgagctttgaagctaaaaaggaacacgccattgccattatggaaagcaagaagatgtggcgtagtaattatgcccctcctttgctacgcctcgcatggaaagctggattcaagataccaccgctaccttttgcctcattctggcaaatcactttgttgatgggcggatggtttggtccggcatgggggatctgtatgtggttttttacttggaaggacaccgggatgctaccgggcatagcatttgtctcaagtacagtcgcaggtatttgctttggtgttcttatggctgcgtatcattggtggcgaaaggtagttaacaatctgccagactgggacagtctggagtaa

SEQ ID NO: 193996 - DNA, 624 bp, Klebsiella oxytoca
atgaaaaaaataataattatcgtagggatccttttcccacttttgactggttgtactggacatacagaatacagcaaagaagcttttaaaagaacagaccttcattttataggcgttcccactattttaggagttggtatgacgggaagcagtgttcctgttactcctgaatatagcttaactgctgcacatgtagctaagtttatgttgtatagagtcaaatcctaccatccgacatgtgatcttgcactgatatatcacaagaataatgaaaaaaattatcctgcattcagaaacagtcagataggggaaaatattacaatgtatggtcatagtttcgtcacagcgcttcctgtagagtcaaatggtaaggtattgagtaattccacaaccgatacaatatggaataaagctgattgtattctttcagctacttctgctggcgtagtggcaggtatgtcaggtggagcggtttataatacaagtgataatactctggctggtattgttcagggttatgcaaaaaagatagtttcaggtaataaagttttgtataaaaatacatctctttatgttccatatatacgctttgatggttggctaaaaaaagaactatccagataa

SEQ ID NO: 193997 - DNA, 309 bp, Klebsiella oxytoca
atgtctaaaaatattgaaattaaaaatacatctactgagttgttctatgatctggcaaagcgttctttcgaagcaagctggaaatccctgcaagagatatgtagttatgatatctcacattatattgatgatgccgatgtgatgagtctgtttattcaaaatgtgatagcgcatatcagcaatcacttcgacaggtttacttcactggaaggtaatagtggaagtattactgaggttaactttgaagaggtagcagaacgacttgtacgccattcttgggagttttgtgataaatcatatactcagtaa

SEQ ID NO: 193998 - DNA, 426 bp, Klebsiella oxytoca; identical to SEQ ID NO: 188205

SEQ ID NO: 193999 - DNA, 303 bp, Klebsiella oxytoca; identical to SEQ ID NO: 96991

SEQ ID NO: 194000 - DNA, 216 bp, Klebsiella oxytoca; identical to SEQ ID NO: 142298

SEQ ID NO: 194001 - DNA, 492 bp, Klebsiella oxytoca; identical to SEQ ID NO: 142297

SEQ ID NO: 194002 - DNA, 324 bp, Klebsiella oxytoca; identical to SEQ ID NO: 142299

SEQ ID NO: 194003 - DNA, 174 bp, Klebsiella oxytoca; identical to SEQ ID NO: 125650

SEQ ID NO: 194004 - DNA, 192 bp, Klebsiella oxytoca
atgctcagtcatgaaaaggagaatccgatggagcaacatacccctgaatacttacgacgtaccttagctcataaccgtgccctaatggacgatatcattagcagtggcatgtccaggtactacaacacggagattgtggatgccgcatgtgaggcgatagaagctgaattgcgacgacgaggaattttgtaa

SEQ ID NO: 194005 - DNA, 249 bp, Klebsiella oxytoca; identical to SEQ ID NO: 125654

SEQ ID NO: 194006 - DNA, 132 bp, Klebsiella oxytoca
atgcacattatcaatgctgaagagcagcacattcccgccatacgccgtatttacgcccatcatgtcctgcacggcacaggcagcttcgagacggcccccccccgaacacgcaggaaatgcttgcccgggtga

SEQ ID NO: 194007 - DNA, 426 bp, Klebsiella oxytoca; identical to SEQ ID NO: 193347

SEQ ID NO: 194008 - DNA, 702 bp, Klebsiella oxytoca
atgaagcgtattgccctttttttctgtttcatttttagttttgcggcccatgccaataatattattgttaacggtacccgctttatttatccaggaaatgaaaaagaaataacggtgcagctctctaacaccgccgaccgtccggcgctggcgcaagcctggctggataacggtaatgccgacgcgacgccggataccattactaccccctttattatcacgccgcctatttcccgcgttgatgcgaaaagcggtcaaaccctgcgtattaagctcggcagtaatgcagggctggctaaagataaagagacgctgtggtggctgaaccttctggaaataccgccggttgaggccagccagaaaaacgaagggcaaaatattctgcagctggcgattcgttcgcgctttaagtttatttatcgccctgccgggctaggcaatcgcgacgctgcggcagaaaaactggcgctctccgctaacggcagcagcctgtccgtcagtaacccaacgcccttttatatcaccgtaagccgtatctcccgtaacggcggcaaagcgctcaacagcaaaacggtcatgtttgccccgcagtccagccagaccatcgccctctcttccgcggtgagcaaaggcgagaccctgaccgttaacaacattaatgattatggtgcagatgtcgcagtgaaagttaccgtcaaataa

SEQ ID NO: 194009 - DNA, 339 bp, Klebsiella oxytoca; identical to SEQ ID NO: 193365

SEQ ID NO: 194010 - DNA, 762 bp, Klebsiella oxytoca
gtggccaaaatcgtcgcccccggggcgaccgatctgggaaataaaatttattccaccaacgtgcccgggatcggcctgcggttcagccgcggtggggcgacggtcaatattatctaccctgacacgttctccagctacgtcagccggaccacgaattactcgctggaaggctcccgctttacgctggaggtgattaaaaccgcgagcgtgaccggcagcggaaccctggcggcaggtaagtacacctcttacgactgggagaacggcaataacccgatcctcgaaacccgcctcagcgccaacgccatcaccgtggtatcgccctcatgtaccatcctgagcggcaaaaatatgaatgtcgatgtcggtaccatcaagcgcagcgatctcaacggcgtcggcaccaccgcgggcgggaaggattttaatattgagctgcagtgcagcggcgggttaagcgagtcgggatacgccaatatccagacctctttctccggcacgctggccaccggcaccacggtgagccgaggtgcgctgctgaacgaaaaatccggctcctcgttggcgaaaggaattggtatccaggtcctgaaagagggcgtaccgctggaattcaacaagaaatacagcgtcggtacgctgcgcacgcaagaaacgcgatacatcaccctgcctctgcacgcgcgtttctatcaatatgcgccgaccaccagtaccggtgaagtggagtcgcacatgatctttaacctgacgtacgattaa

SEQ ID NO: 194011 - DNA, 609 bp, Klebsiella oxytoca
atgaaaaaggttcttctctctgctgcaatggcaactgcgttttttggtatggctgcggcaaatgctgctgataccaatgtaggcggcggtcaggttaatttcttcggtaaagttaccgacgtatcttgtactgtttccgtaaacggccagggcagcgatgcgaacgtttatctgtcaccagtgactttaacggaagttaaagctgccgcggcggatacctatctgaaaccgaaatctttcaccatcgatgtttctgactgccaggcggctgatggcaccaaacaggatgatgtgagcaaactgggcgtgaactggaccggcggtaacctgctggcgggcgcaaccgctaaacagcagggctacctggctaacaccgaagccgccggcgcgcaggatatccagctggttctctccaccgacaacgccaccgcgctgaccaacaaaatcatcccgggcgacagcacccagcctaaagcggccggtgatgcctctgccgttcaggatggcgcacgcttcacttactacgtcggctacgcgaccagcaccccgaccacggttaccaccggtgtggttaacagctacgcgacttacgaaattacttatcagtaa

SEQ ID NO: 194012 - DNA, 324 bp, Klebsiella oxytoca
atgaagattgaagaacaatacattgaaagtatttatagctattgtcagggggttgagagtcaggtttataatttaaaggaatatgcaaatgaattgatggttgatgaaagtcaaaaattaaaaggtaggaagcatctttcatcagatacggatgagaatatatcgaggtaccttaaattcagtcttggttcaatattaaatgctcatgcaagtgttttagattatttctataatttattattaataaaggttggttttacccaagatgatataaatggtcaggtattcagcctaatgtatgatctgtctcttatacacatctga

SEQ ID NO: 194013 - DNA, 123 bp, Klebsiella oxytoca
atggccttcatcaacagccttttgatagtaaggcacagcatcaggagaaacgccgtgcaggtagccgaacatttccggagacacaaatcctattccaccaacgagtttagcgccttcgcttga

SEQ ID NO: 194014 - DNA, 123 bp, Klebsiella oxytoca; identical to SEQ ID NO: 194013

SEQ ID NO: 194015 - DNA, 1248 bp, Klebsiella oxytoca
atgcttatatatcaaggtggtaaggaagttggtgaggatgatttccgttctcatgtttattcgctgtgccaattagacaatgtaggagtgctcttaggtgctggcgcttcggttggttgcggtgggaaaaccatgaaagaagtctggcagtcctttaagcaagaccatccagatcttttatcgctacttatcgaacgttatcttctcgtttctaggactgattcagaatctgattcagtaaacgttgagcttttaattgatgaggcaacaaaatttttatctgtagctaaaacaagacataatgaggctgaagaaaaagaatttagaacgatattaagtgcattatacaaaggggtaactaaagctgcgttacttacaggagaagaattcaggcaaaaaaatcaagggaaaaaaatacagtttaaatatcataaagagttaatatcaaaattaatttcaaatcggcaacctggtcagtcagcaccagcactttttacaacaaattatgatttggctttagagtgggctgcggaagatcttggtattcagttatttaatggcttctcaggcttacacacaagacagttttatccacaaaattttgatttggcttttagaaatgttaatgcgaagggagaggctagatttggtcactaccacgcctatctttataagcttcatggttctcttacatggtaccaagatgatagtttgacagttaatgaagtaagctcatctcaagcttatgataattacatcaaagatattataaatgaagatgattattatcgaggccagcatttgatttatcccggggcaaacaaatatagccatacaattggatttgtttatggtgaaatgtttaggaggtttggagagtttctttctaaatcacaaacagctctttttataaatggattcggttttggtgattatcatattaatagaattatattaggtgcgttgttaaatccttcttttcatgttgttgtttattatcctgaattagccaaggctcaaatcaatgttgattctggtaccgcatcggaaggcgaaaaagcaataattacattaaagcatttaactctcaatcaagtgaccgtcgtaggaggcggaggtgacgcttactttgatagttttgtgaaacatcttccatacccagttcttttccctcgcggaaatactgtagatgatttggttgaggctatctctaaattgtctaaaggagaaggtcatgacccattttaa

SEQ ID NO: 194016 - DNA, 1815 bp, Klebsiella oxytoca
atgacccattttaaactttcagagctttccgcgatcggctatgtagtaggattggaaggtgaaaaaattagaataaatcttcatgaagggttacagggaagattagcatcacatagggatggggttagttcggttacccagccaggagatctcattggctttgatgccggtaatatactggtggttgctcgtgttacggatatggcctttgttgaagcggataaagcccataaagcaaatataggaacttcagatatagcggacatgcctcttaggcaaataatagcctatgcaataggttttgttaaaagggaatctgacggatatgtttttgtttctgaagattggcgattaccagcattgggtgcttcagctgttcctttaacaactaatttcttaaacactatctatagcatcgacaaaggtgatttagataaagcaattgaacttggagtcgattcgcgtaccaaatctgtacgaatactggctagtatcgataagttgctgacacggcacatagccgtattaggtagtactggctatggtaaatcaaatttcaacgcattactgactcgacgaattgctgagaagtatactaaatcgcgaatagttatttttgacataaatggtgagtattctcaggcatttgtgggattaccaaatgttaaacataccattttaggtaagtgtccagacggagaagtacctaaaccacctttattacagggtgtggcatacacagaagaatcgtattcttacaagcagataccctatcaggcacttggttttgcaggtttaataaaattattacgtcctagcgataaaactcagttgccagcattgagaaatgctctcaatgctattaacagaactcatttcgataaaaaaacatactttctgagagatggaggtggaaattgctttaatatttatgacgattgtagagaagagaatcaactgcatcttgctgcttggttaggcggtttgcgtaacagaacattggataaagctggcaggtgggctccatttaagtgtttagcaagtttggttgcagagtttggctgtgtcgctgccgactctaggacggggggaagtaagcgtgatgcattttgctatggtaatgtactccctctaataaaaatcatacagcaattagctgatgatgtaagattcaaaaatattgtcgatatgaatggtggtcaagttctggctgacaatggtaggcattgggacgccgctatgaaagatgaagtggactatttttttggaaaagaaaagggagagccgaatgattggaatgttcatatagttaatttgaaaaatctgtcacaagaccacgctccaatgctgttgagtgccttactcgaaatgtttgctgaagttcttttcttgagagggcaaaacaaagcctttccaacagtgctacttcttgaagaggctcatcattatttgagggatccctactcagaagttgatgcacaaatcaaagcttacgaacgtctggcaaaagaaggtcgcaagttcaagtgttccctgattgtaagtactcagcgtccctctgagttgtcttcaacagtattagccatgtgctcgaattggttcacattgcgactgactaatgagcgtgacttacaagcgctccgttatgcaatggaaagcggaaacgaattaatgattcgccaagtttctggtctaccaaggggggatgctattgcatttggttccgcatttaatctccctctaaggatttctattcatcaagctgaaccgagcccacgctcatcagacgcaatatattctgaagaatggaagtag

SEQ ID NO: 194017 - DNA, 369 bp, Klebsiella oxytoca; identical to SEQ ID NO: 83429

SEQ ID NO: 194018 - DNA, 1062 bp, Klebsiella oxytoca
atgcgcagcgccttccgggttatccggaccgtgcgggaaaaacacgcctgtacaaaatgcgacgctatcgtgcaggcccccgcgccttcacgtcccatcgagcggggtatcgccggagcggggctgctggcccgggtactgggctcaaagtatgcagagcataccccgctgtaccgccagtctgaaatatatagccgccagggtgtggaactgagccgctccctcctgtcgggctgggtggatgcatgctgcaggctgctgtcaccgctggaggaggcgcttcggggctatgtcctgagcgacggcaaactccatgtcgatgataccccggtccagatgctgctgtcgggcaataagaagacgaagtccgggcgattgtggaagtacgttcgtgatgaccgcaacgccgggtcagcagtcgcaccggcggtgtggttcgcttacagcccggacagaaaagccatccacccgcagacccatcttgccggcttcaggggagtgctgcaggcggatgcgtatgcaggattcaacgagttgtaccgcggtggccagataacggaagccgcctgctgggctcacgcccgccgtaaaatccacgatgtgtacgcccgcacgccgtcggcgctgacggaggatgccctgaagcgtatcggcgggttgtatgccatcggggcggaaataaggggaatgccggcggagcaacgtcttgctgaacgtcagcagaaagcgaaaccgctgctgaaatccctggaaagctggctgcgtgaaaagatgaacaccctgtcacgacactcagagctggcgaaagcgttcgcgtacgcccttaaccagtggccggccctgacgcactatgcaggcaatggctggacagaagccgataacaacatcgctgaaaaggcgctgcggatggtctgtttggggagaaaaaaatggctgttcttcggctcagaccacggaggtgagcgtgtagcgctgatgtacagtctgatcgggacgtgcaaactaaacggcgtggatccagaaagctaccttcgtcatgtgcttgacgtcatagctgactga

SEQ ID NO: 194019 - DNA, 780 bp, Klebsiella oxytoca
atgcatcttgagcgcgtagaaatagtcggttttcgcggcattaaccgattatcgttgatgctggaacaaaataacgtgctgattggcgaaaatgcctggggtaaatccagcctgctggatgccctgacgctgctcctgtcgccggagttcgacctctatcattttgttcgggaagatttttggtttccgcccggcgatattcaggggcgcgagcatcatctgcatatcatcctgaccttccgtgaaaatgaacccggtcgccatcgggttcgacgctatcgtcctctcagcagctgctgggttccctgcgacgatggctatcagcgcgttttctatcgcctggagggggagcttgccgatgacgacagcgtgatgactctgcgcagctttattgatggtgaagggaaagcgctggagcttgacgatattgatgaactcgcccgtcacctggtacggctgatgccggttctgcggctacgcgacgcccgctttatgcgacggatccacaacggcaccgtgccgcactcgccgcagatcgaaattaccgctcgccagcttgatttcctctctcgcgaactggtacatcatccgcaaaatttaaccgatgggcagatccgccaggggctgtcggctatggtgcagttgttggagcactattttgccgagcagagcagcgcgcagtcgcaccatcgtctgatgcgccgtcattcacatgatgaacagcgcagctggcgctacctgtattatcaacaggatgatcgacaagcccggcgggcgtag

SEQ ID NO: 194020 - DNA, 753 bp, Klebsiella oxytoca
atgttttacagaaaaacaaacattacccttctttcgattgttgcgattctattacttttaacaaatttagtactgataaagtttttattctcagacatgaaaggttttgaatggggttctgtcacagattggttaagtgcttttgcaggtataataagtgctattggtacagtagcaacattttggatagcatataaagccctcaaaaaagcacccgaatggatggctcaaaagcattatgatatcgcatatagcatcattgaaaatgctgttttcaaagacttgtccaatgttcgatcatcaagcttacatctcaaaacaagaattgtatccctcgcaaataaatgcaaagatgtggtaattgggaaaaaagagaaatcaaaacttgttggtgaaatgttagagggtgttgaaagtaacattgatgagtttcaccgtgctgcatattctataattaatcaattaaaatctattgaacgtactaattataaaataacggaatatactgaatctattatcacagtacttaaaaatgcagcacaagaatataacgccttatattcgagagttttcattgctgaagatgaaattataattcatagttttgctgatgataaagcgagagagatatatagaggggagacatttaaaatacaaacagatgcaatcagtactaataaaaaattaactgatgcgattagtaaagtctttgatgaaaacagaccaattgaagattttatttcccacaaataa

SEQ ID NO: 194021 - DNA, 264 bp, Klebsiella oxytoca
gtgattagaatggaatttaatatatatgaggatggaacatactactttctctatattgacgaggatgtacgtattgaaactaatggttttgatggcttgcagattgaaacccgtgattcaaaagtacgggatttaggcgatccttaccagtacttaaccatcagagaacgcaaggatgagtactttaacgaaagtctacgtaaccagtacttagatactgtaattgaagcggtagaaaagctatgtgcattattgggtaactaa

SEQ ID NO: 194022 - DNA, 732 bp, Klebsiella oxytoca
atgaacagaaaacaattcatccagtcgcatggtgctacttgtagaaacttcacttggagttggtcatttgtgaatcacgacaagaaaatggtgatctttggtgcctgggatgttcagaaagagcaagaaaggtctgtcatactgagggagctgtggaaaagcaaagtagtggatggtaggacaagaaaaaacctgggatacattcaagctattgaacacatccagttgatagcagaaggttatgatcttttcacctttgatatggaacaggggcgaaacgatgaagatagagatgtagctgttatcaaacgtttcacccctaaacttgaaaagcgttaccttcgcaaagaaggtacagtttggtatgctgactttttacctaatccgtttcctgacgaaattacctcacctgaaaactacgctgaaggtgcaaaaaagcaagttacagtaaactcctacgagcgtgatccaaaagcacggcaggcgtgtattgaccaccacggtacttcttgcaggtgttgtgggtttgactttgagaaagtctatggcgaacacggtaaaggatttatacacgttcatcatatcaaaccactgcatacagtaggtgagaactatgtagtaaacccgattgaagatatggtccccctttgtccaaactgtcatgcaatgatacataggggaagtgaagtattaagcgttgatggattaaaaataatagttgagaaaaaatga

SEQ ID NO: 194023 - DNA, 462 bp, Klebsiella oxytoca
atggcaaaaacctattcaatttttgataatagaaacataaaagcactaataagccagtacaagctatacaaagatatcccatgtgaagatatcaaaaacattatgaaggattcagtggctaaactgaatgtgagggataagattagtgtatacgatgtgtttacagtattgagtaatgaagatgaaatacgaaatgatttacttttcaatactatcaatgccattaaagtaaagcagaataagaaacaagtaaaagagcgtatgattaggtactacggggcagcgataacggatgcagcaaaacgaatagagcaatatatgatagaacacccaaacgcactaccagcaccagcatatgggcaaagaacactaacatataaagaggttggtaatctattggaactacaaaaacaaggttattttattgatgacatgatcgagtacttaaatagcttgcgttaa

SEQ ID NO: 194024 - DNA, 537 bp, Klebsiella oxytoca
atggaaagagttaataatttaaaaaatgtacgtaaacataatgactacccaaatctaaaagcaggtcgcaaggcgttcaataacatgttcgatagaacattatacaatcctgattatgctgatgttacaattagtgatgaatttagtaatctaacatcatttttagattggcatgaaaagaattatcatgaggtcgaggaaagtaagaaatggcaacttgataaagacattctaactcctggttcacgagagtactcaccacaaaactgtatgtatgttccccctgaagttaatcaattattcaaaagtactaaacaaggtaagtacatgaaaggtgttgaagcatcaggtaagtggtttagggcgtactgtagtgttgatggcaaaaaaatcggtttgggaagttattcaacggaacttgaagcacatgaagtgtatttgaagtggcgtaaatcccgtttgatagaactcgctgagaagtacaaggaatatgaaaaactaagtgctgcactattggaacacgctaataaaatctaa

SEQ ID NO: 194025 - DNA, 156 bp, Klebsiella oxytoca
atgaagaaagataataaagattatcgttatacagtacgtctaacggaaacacaaaatgccgcagttcaaaagctgatcgacgaaggtaaagttaaaacacctgccgccgcattacagtacataaccaatatgttcatcatgttgggacagaaataa

SEQ ID NO: 194026 - DNA, 1944 bp, Klebsiella oxytoca
atgctccgtccaataagttatgaacgcgtctcaacttttcagcaagtggagatgggcaaaggactggtggatcagaggtcatcattaacagcatttttagacaaaaatgctgataagttcactaatgaaaggatttttattacagacgagggagtctcagcattcaaaaatgctaacatttccccagagtctaatcttggtaaatttttacaggatgtgcgagatcgcaagtacggtaaaggtgatgctctgattgttaccagccttgaccgcttatcgcgtcgttcaagctggtcagagaacacaatacagttcattgttgcggcgggcatcgttatctatgacatatctacagatgtagtgttacgtgatgatgacagtttttcaaaaatcctcatggaaatcattctgcaacgctctcataacgagtcagtgatgaaatcggtgcgggctaaggtcgcatggcaaaacaaagttatgagagctgctgcgaatggtgaggtggtttcaaatcgtatgcccttttggttagagaacatagataacaagtacagtgtgaaagaagaccaagcggcattaatagttaagtgctttgaattgtataaatctggttttagtactggtgaaattgttaaacgaattgatgatcctaagtggcagatggttagggtatcgaggctcattcgtgaccgtagattgttaggggaacataagcggtacaacgatgaggtgatctcgaatgtgtacccaaaaatcattgatgatgaactattcctaactgctaaccgtatgatggatacggttatgactgataagaaaaagcctgctgaggatcttcttcttgagccatcagtagttaaacaaatattctcattgtcagaaagtgggcttggttctggagccatagtaaagcgattaccaaaaggctggagtactgtaaacgtattaagagtacttagagataaaaaagttgttgaaatgaaaattatcgacaaccttacatttgaacgagtaaatgcaaaactcactgcaaatggtgttgcaaaccgcataagaaaagatgtaaccattgcacaagatgattatattacaaacctcttcccaagaattttaaagtgtggatgttgtggtggtaatattgcaatccattacaaccatgtaagaactaagtatgtaatttgtagaacgagggaagagaagaaaagatgtgatgctaaatctattcaatatactcgtattgagaagaatatacttagtgttgtgatgaacgttgattttggtaaggtattgagtgaagactcaacaaaaaaagacaaagtacttgaagcgttgaaagttgagttgtcagcacttcgaaaagaggaaaatacttatcaactaaaaattgatgaacgtaagaaaagtgggaagaaaacatcattacctcttatggaaggtcttactgatgtacaagatagaattgaagaaacgtttgaacaaataagtagatcatcaacaattaatgaattacctacctttgattatgacattaattgtttacttgatccaatgaacgttgaactaagagcgaaagtacggaaggaactaaaacatgtaatttccaaggtgacatatcaagtgattgataagtatattttagtgagattgcattattatactgatgtactgtcacatgtactgattattgataacaaacgtggtggtggtgatattataagtcaaattgcaatttatactaaagatagtaccactatctatacaacaccctcatttgcattgactacatctaataatgaaattccacgtattcattttatgggaaacgtaccacttaaccaaattgattatgaattattactaatttctgctgactatgttgaatgttcagattctgttacctcgtggatgcgtcataatcacaatttcctctttgcaaataattaa

SEQ ID NO: 194027 - DNA, 996 bp, Klebsiella oxytoca
atggcagataattcagaatcttttgcaacaatagaccaaattacttcacgcccaaatttttcttctgatttagaaattactgttaagaactttagttctcttgtaggacgatatcatcttagtgagagtgtgaaatgccaggtaaaaaccgagcatggaaactgtggtcaaaaacatcagcatggatatcttggtgttgacgatactggacatgaaggtttaatcggaggcatttgtggagataagtacttcggcgagcacacgcaatatatacaggaaaggaaacgtattgatgctgagcttgacaggcgtgagagtatagagaaactaatttcttttaaagataattttttatccttatcttctacgtacgctaatttattgaaagaaactcaaaaaataaaaaataaaatctattatttatataaaggttttcctgacatagtgcttacatatctttatcaagcccaaagaacacaaaattgggatttatatattgatgtattgcgtcatactcgtggtgaaaagggaatgacgagtaattggtatattgaaaaactctgtactttcccacctttgccatctcaacaagaaattacaagtttaataggaaaaattgaaaacttgcaatcgattttcaacgaggcatgttcaacaaaaattgatgaacttggaacgccaaaactgaaaagctacgtgaaaagtatttctgaattttcagaattagaaatttcctttaataaaaaccgcaaaaatactgaagattttgttaaaaaagaaaatatctacaatctatattatgcctgtgcaaattcaaaggacaaacatagtactgtcaaaacaattttatacatcctgaaggattccaatccgactgaagcatcagttagaaaaaaatgtgatgaaattgaaactacaaccaggaaaaaatttgataattgtgaaatacggtacaacaaaaaagtaatgaagtttaagaagaatagcttaggttaa

SEQ ID NO: 194028 - DNA, 795 bp, Klebsiella oxytoca
atgagcggttacattaccaatccggtaattaagaaactatacgcattatctgctgggaaatgtaatatatgtaaaatttcattgtttgaaaaagatgtacatattggcgaaatggctcatgtaatagctaaaagccctaaaggaacaagaggtgatctctcatcaattaataataattcttatgagaacttgatacttttatgtgcaaacgatcatattcgagtcgataacgactctgttacctttccagttgaaagattactcgaaataaaaaatgatcatgagtcatttatagctaatgttacagatttctcaccttttgcattaaaaaaaagaaaaaatgatatagagtttcttaatgcctatttctattataccccatttgggcgtgttcgtggtttaattgataccttgccgtcatactatcacattcatttggatatatttgatgatatgttcgatagtattttgaaagatcttccagcacattatcctttgaacgataacaaccttcaagaaaaattcaagtcgttcattcaggcatacaaagatgttgattacatattgcacagcagtatcactacttctaatggatactttatagaaaccttttcaggagctaaccataatcacatatgtcatttcaactattcaaatttaccatatgataaatctcaacaaattgaagttgaactaattaaaagaagaaatgaaatgttttcagcttatgactctctgctttcttatattagaggttattatccagaggttgaaatttattcgccaaatttctaa

SEQ ID NO: 194029 - DNA, 294 bp, Klebsiella oxytoca
atgattggtgtaatagtagaattactaacaaaaggtgtgaacttctttctaaaacgtaaaatgatagaacaggaagtgcagaaaacaaatgctgaaggacaaatagaaaccaacaaagaagagatcgagaagagtaccgtacattggcgtaactttttgggtttcgtgatttcaatgattattctttataactggatcatagtaccggtacttgactacttcggtattgtgttaatccaagtaccacttggtcaacttatgcaagtactgttgatcatgattggcggaacctaa

SEQ ID NO: 194030 - DNA, 609 bp, Klebsiella oxytoca
atggcatggcgtaggggcaatagcccaaatgatatgaggcgttttataaacaacaacagcccagcgatagggcaggagttcaaaaaagaacttagtaaccgtatgcgtatagttacccaacacatgcaacgtaaattagataatgatgtagcaggtggaggtgtaccgtttactggtaagagtatttactttaattttaaaaagattagtgactacaagaccgtaaatcagatcatagtactatctaaccaaacctcatacttgaagtacatccttgatcctgcttacagacacgttaatgaaggtaaaattattccatataagaatgctaagttaacgaagcaggggaacattacacagttacgttcaagaactcagagtgataaatacaaaaaggtaaagagcaagaacggcaatacgtacttgatcgatactaccaagaaatcctctaagcgtaatcctaaactggcacgtgaaaagagggttattggttactatggttccgttggtagaaaaccattgtttgatttctacgatgaaaccgagaaaaaagcaatagaacaattaagaacattacgcggtacgtttgattaccgttggaggaattaa

SEQ ID NO: 194031 - DNA, 432 bp, Klebsiella oxytoca
atgaagcaatggaattacaatgatgattggagtgaggaagaattaacaaacggtagttatgtaggattcgtgtacttgttccagtttgaagacagtacctcttatataggcagtaaacagatgtataagagagttaaggacgttaagaaactaaaagctaattcagttgaaaatggatggcgtgagtacagttcaagttcaaagatagttaatcaaaagatagaagagggcttagattatactcgtaccattttgtgggcttttccatcaatgaaagaaacattattcgtcgaaacagcactaatcattaatgaaggtttaaaaacgggaaatattaatctttccgttatgcataaggcacgtttaccgagtggtaaggatgctgtacgtattcgtggaattcttcaatcactatatgaaattttaaattaa

SEQ ID NO: 194032 - DNA, 177 bp, Klebsiella oxytoca
atgaccattatggtctttcaacttggcctatcaggtactttaaagttcagaaagatgattcaagccttacgagataaaaactataaagaagcgattttacaggctaaggattcactctggtacagacaaaccaaatcacgagtagatcagatgattgcagaactcaccaacaactaa

SEQ ID NO: 194033 - DNA, 279 bp, Klebsiella oxytoca
atggacatcttaacgattggttcattgattgtttcagctttagtattgtgctggactgtttatagggattttacatctgactcagacgaattagatgcacgtatttctaccgttgaaacgaaagttgctttgatggatcagtctctaacttcgcttgagcaggaacaagatcagatgaagaagactttgaaaaacttagaagatagtgtacatatgcttgatattaaaattgagcgtgtaattacaatgcttgaaacgctaaaaaacaaaaggggctaa

SEQ ID NO: 194034 - DNA, 900 bp, Klebsiella oxytoca
atggcagatcgctttagtgtcatcagtacggacagtgccaagctatcagacagggtttatcctctggttgttcagaatggtaaggtttggcttaactcagcggtgatagcatcagcaagcatcaatgaggcaatgatcaataaccttgctgtttcacgagcgaaaattcaggatgccgcgatcgacaatttaaagctcgcaaatggggcagtccgtaatattcacattatggacggcgtgatcgactcagcgaagattagccagcagatacaatccagtaattgggatggtgtgaacggttggatgatcaataagaacggtacagctaactttggtaacgtaactgtacgtgggaatatacaggcaacttctggtgtactcaacaacgttactatcaatgaaaactgtaacattcttggtactcttagtgccgctcgtatcgtcggtgacatttgccgtcctcagtctacaggtattgcatcagtaccgtttattttcggttctaaaacagtatcaggtggacaggttggattagatccagttgcaaaccagcactatgtagcgttacgtatccgtggtgaggattttggtagatatcttgatagtaacatgacaattacgttaggttcatatgagcgtcagtacttctatattcgtatgggtggtgatggtattggtatgactaacttaacttatgttgatgcgggtaatggtggtaataacacaccatatacattccgattaaatggtatctatattccacctgtaggccgtggcaactggaactatatctatgtcatgtgtactactaaccgtgccggtactgccaaacttgatgtaccagatttattaaatgctttagtatacagagctggtgatcaacctatatataacgcctga

SEQ ID NO: 194035 - DNA, 1164 bp, Klebsiella oxytoca
atggaatatacttctgacatgcaaaaaagactaaatactcataaaacacagcaagcgatcactatggcaggcttgaatcagactgctgtagctgatgctttaggtgtcaccaaagaggctgtttcacagtggcttctgcacaagtcttttcctcgcccaaataagctccttcaacttggcagattattgaacctttctttcgatgatttagttatcaaagaagacccgcatgctccaaaagttgcatttcgcaaaatgcgtggtactaagacgaaagatcatcatattgaaaaggctcaggaaattggacgttttctacgtcatcttgtgccttacttgccgtttgacacatttgaaatgccaccagtgctgaagtcgccaaattgtggatatgactatcttcgcactgtaactactaaagtcagggaagatataatccttggtccagtagagtgtgtggattttacacacctgattcgtcgctttagcgagttacaagctgtagttgttccggtgatgtggggggcaaagcagcgccacgaaaatgcaattcatatacaccttccggattcaggaagtacatgggtttatctgaatttggataccaatatccacgattttaaattctggatggctcacgagcttggtcattgcttatccccaagtttagaaggtgatgaagctgaagactttgcggactcctttgccgcaagcctgctctacccgcatgagttagcagcagaggcttatgtttcgattagttcacaatcctctccctctgctaaaatcaaccatattatcgatctggcagaaaagttaacgatctccccttggacagtctttgggcaagttaacaaatatgcagaatttacaggaaagcctgaaattcaactcagcaaggcagttttcccaggggctgtgaccaattttaataagagatttaaaaatctcagcgaagctcttttcagcgattctgaacttgatcaatatggtaagccaagtgctcgtgactatattgagaaaactgaacgtgctttcgacacttcatttttcgacttgctccgtaaatatttaaatgagcaagataaaggtcctggatatgttcaaaccgtgctggatatgtcacgacttgatgcacagagtatctacgctgagttgacctga

SEQ ID NO: 194036 - DNA, 549 bp, Klebsiella oxytoca
atgcctcaaacgaaaattcttgttgatacaaatgcatacttaaggttggccaaatccatccgacctttactgttcgtgccctttggtgatgacgagtattgtttgtatatacttcctgagcttaatgaagagctaacagcacgaaaattacaaagcaaattcccttgggtagatgaagatgaatttgctgaaaatcgcatgcactttcctaatattgcgagaaagcaaaaaaaaactatccatcaaacatttgaatacgtttgggatcatgtgcaaacggagttgccaggcccatctagggtagatgctttatatattgcttatgcgctggagcttggcgcgccagttgtgaccgatgaccaagatatgactaaattggctgaggtttttgaagcgcaagttatgcctaccttggaactactcaagattatgttggattctggtcatactgatatgaaaactatcaggggcattgttgagtattgggaatactttgcagacataccagcaaacttcaaaacggattatcaacgtatattcggtgagtaa

SEQ ID NO: 194037 - DNA, 1371 bp, Klebsiella oxytoca
atggtgtttttccaagggaaagctgaatttggtaaattatatcccacaccgaagaaattttgtacgaaacctgcaaagattgcgtcagtgggtagtgttttactatcagttagagctcctgtcggccctactaatatagcaagaaaaataaccgctatcggacgaggattagctgctataagcgctcgtggcggaattaccagtgaaaaatatattctttactactttagatgcattgaaccatggttgagtaagcaaggtaccggaacaacatttaaagctatttcaggtcaatttataaaggaattaattatacctttacctcctgtcgcagaacaaaatatcatctcgaataaactcgatgatcttttggctcgcgtggagagtattaaagcccggttggtaaacattcctgaagttttgaaaaaattcaggcaatcggtgttaaacgccgctgtgaatggaaatttgacggaagagtggcgaaataataattgctgtagccataatcccaccctaaacatccaaattgaaaagaaaaaatgggtgactaaaaaccctaagcataatgaagttaagagagtaattaaaaggttaaaggaatttaacgggagtcaaaatgaagttggtgagaagttaccggaaggttggtcatggcaaaaattagaagatagtgtgctaatgattgtggattgtcataacaaaacggcaccctatatcgagtccggtataccaattgttcgaacatcaaatattagagatggtaatttgaattgggaaggtatgaagtatgttggacgagaaatatacgagtactggtcacggagatgtcgaccggaggccggggatataatttttacccgcgaagcaccaatgggagaggctactattattcctcaaggccaacaattgtgtttgggtcagcgtactatgctgattagaactattgagaagtatgtaaaggctaaatttatattgactgttcttatgtccccaagctttagaacgagggcagagtctttcgctgtaggtaccggcgttaaacattatagagttggggatgttagcaacttatttattcctgtacctcctacggaagaacaaaatgaaatcgttcgccgtgttgaccagatatgcggttatgctgattctattcaacaaatgactgatagcgcattggaacgaatagataacttgactcactccatcctcgcgaaggccttccacggtgagctgacagcacaatggcgagaagaaaactcagagctaattagcggacttaacagcgcggaagcattattaaaaaggattgcagtggaaaaaatggaatgtagtatatcgaagaaacgtgttaaaaaatcgaatcattaa

SEQ ID NO: 194038 - DNA, 201 bp, Klebsiella oxytoca
atgagtgatctaaccgtccatcaggctgctgaaaaaccatttcaggcagaaattattctcgctctgatgaaagaaaagaaagctgaaagcatggaggattgcgaaatcaatgcactgatccaggtgataaaaagtttgattggcgatgtaggtggttttcttggtgaagaagcattacgcgaggaggaggaaaatgcgtaa

SEQ ID NO: 194039 - DNA, 1749 bp, Klebsiella oxytoca
gtgacagacaccgtaatcaaaccagaagaactctccgacgcgctcttttcctgcgtgtattcctgggtcaatggtcatgccatcgacaaaaaaggggcggatgctgctgtagcccgccaccgtgacagcacttcaccttatggcgtactggcgcgtcgcctgtgtgagtttgttgccggtagtggtccaacttacgaagaattatgtgatttaggcctggtattgatcgatgccagcaggcagaaagaaaaccgcattgcgctggtggcggagattatcggcgatgaggttaaacagcttctctgtgatgcagagcggattaaccggatattcccgcaaccgaagccggagaaaaagaagcgcgtcactgatgcggccacgtcctcacttaaccagatgggcccaagtcagcgcggggaggtacttcttgatcactatggtggattgctggcgcttcaccaggaatcggacacggtacaccactataacggcgtgatatggacgccagtcagtgataaggcgcttgcccgccagatggcggcaatatttattgaggctgatgcgccatattccatgacggctatgaagaatgcggtcgatacgatgaagttaagcctgccgccgatgagagccacagagcgtaacctgattggcttctctaatggtgtttttgatacccggaagggggaattccgagcccaccagagagaggactggttactggtcgccagtgaggttgaattcgggaaggtgacggaaggggagagacttgaagcccatgcgcctaacttctggcgctggctgcagcattctaccgcaagaaatgacagaaaagcctcacgactgcttgccgcgctctatatggtgatggctaaccgctacgactggcagttgtttcttgaggtaacggggcctgcaggcagcggtaaaagcgttatggctgaaatctgtaccatgctggcgggtaagggcaatacgcagtcggccagcatgtcagcgctggagaatcccaaagagcgtgagttgctggtggggtattcgcttatcgtcatgcccgatatgacgcgctacgtaggcgatggcgcagggctgaaagcgataaccggcggggataaggtatcaatcaacccgaagtacaggcagccctactcgatgcgtataccggccgtcattctggcggtgaacaatgatgccatgcggttcagtgatattggtggcgggatatcaaggcggcgggtgatttttaatttttcagatgtggtcagtgaggatcagcgtgatccaatgctggtggaaaaaatcgagtcggaactccctgtgattatccgccacctgttaacccgtttcgtgaaacaggacgaagtgaaacagcttttgcgtgaacagcaacgttctgatgaggcgatggaggttaaacggggtacagacccgatcatagacctttgcgcagcgctgttttttatggatgaggcgaaagggctgatgatgggcggcggtaatcatgctgcgctggagccgaggaaatacctttatcacctctatcttgcctttgctgaatatcacggcattaagccgctggcggtcacgaattttggcaaggcgataacagcggcagcgcgggaatatggtcaggaatatctcaccagaacgatcaaggggaggcggcagaccaatgtcggtataggtgagctggccgatgagtttatgccaagggcatatggctccgaactgccaaaagacgaagaatag

SEQ ID NO: 194040 - DNA, 222 bp, Klebsiella oxytoca
atgcaggacgccggaatggttgagaagaagtcagcaggcagcgcatcgctctggatgcgcgaggctgtggaggcaatagataaacagtttggcgatggctatgccagagaacaccctgagctggtggcagggttcatgcaggcagcagccatcgatcaggcgggaatgtatatccggtcactggtggaaactctggatttgtggccgggttctctgtcataa

SEQ ID NO: 194041 - DNA, 369 bp, Klebsiella oxytoca
atggctatggcccgcctggcagtctcgttgccgtgcaataccgcagaggatggtcaatccactttctggctgggtgtcattgcctttggtaaacaggccgatgcgctggcgcgacatgtgaaaggcgacctcgtcagcgtggtgggcaatatgcatctcaatcagtggaaggggcaggatggcggcaccctacagggttatcaggtactggcagacagtgtgatcagcgccagaacggtacgccccggcggcaaggtggggcaacaggggcaagctactgatgccctacgccgtgcgcacgagcaacacccaccagcggccgatcatgaggattttgaccagacgccgccgtttgatgatgggttctga

SEQ ID NO: 194042 - DNA, 2022 bp, Klebsiella oxytoca
atgactaagtgcctcgtcgtatggcatattgataaaaaatacgtacggggctgcaaaatggaaaacattgacgttattctgggaacagatcatttagaagatatcgcttcagcaaaaccaatcccagcactgaaagaagtgatatggaatgcctttgattctaagtcattgatagtgaaagtcgattttcttcgtaaccctatgaccgatactattgaaaaaataattgttaaagatgaaggtaatgggattcctttcaataaagtaagcgaactctttgggagccttggggaatcatggaaaaaagaagctaagaaaaaaggtgatcattctttacacggacaatatggcagagggagatttaaaaccttttcattaggtgaggttgtcgtatggtcaacaacttcagatgccccaaatgggaaagtaaaatattcgataaaagggaatgtgaacactattaaaagatttgaaataagtgatgccgaacctttagttgataaaaataaaggaacgatggttgaggtttttaacctggctaaaggtgtggatgcactcgctaatgaatcatctaaacaggcaattaccaaagaatatgcactgtatctgactgagtatcctgataaaaaattattttatgataatgatttaattagtccttctgatgtttggcttgataagcgtgattataatttaggtgacgttgaaattgaggggaagcccgaatgcgttgttgtctcgataattgagtggaattttaaaacatctcgagaaattcattattgtgatgaaaatggattctcttttttcagcgaaccacccggtaatgctttccgtgcctacggagtcgattacacggtttacgtaaaatcttcatatataaagaggaagtatgaagaaggcattctttcaattggtgatatgaatactggtattagagaattgaaagaggtaattattgatttatgtaggaagcattttgtaaataaagagtttatacaaaagtcaaaaattgttgaagaatggaaaagccagaatatttatccgtatgatgaagttcctcagccgggttcagttgaagaagctgaacaaaaagtttttgatattcttgctgtaaatgttgagagctatttatctccttttagtaaggcaaacactaaagttaagagatttacgtttaaactattatctcaagctttaaaggataacccacattcagtaagaaaaattctctcagaagttttagttttgagttctgatgatcaagatgcaatggcagaattgctggagcgaacaacgcttcctaacattattaaagcatcacaagtagtatctgacaggctgaattttttgactggattagagcaattgcttcacgatgatgtcacgcgtaaaaaactccttgaaagagaccagttgcacaaaattctagaaagtgaagcatggctttttagggaggattttaacttatcaaggagtgaaaatacgcttaatcaagtgttgagttatcattcatcattattgggggtagacaatgattcagatttgcctgtattgcgtgtagatggtactaccgggcgcatagatatgttgttgagtaaagcaagaaaacctcgggcgagtgaattggagcacttagttgtagaattaaaaaggcctacaaaaaaaatagacatgtcagttacaggccagataaaaagctatgcccatgcggtaagtaatgatcctcgatttgataaaagaaatacaaagtggatatttattgctgtttctaacgaggtggattcattggtagaggatgaaatatctcaagatgataggccatatggcttactttatacgaaaggaaatgtttctatctggatttatacttggggggagttgatccagcaggctcgttctcggttgatgttttttagtgatttgctggatattgatattaaccgtgaatctgctacaagttatttacggtctacttatgaaaaatttatacccaaaatagatgagggtgttgagtcctga

SEQ ID NO: 194043 - DNA, 195 bp, Klebsiella oxytoca
atgatgaccaaaagtgttctacatctaaaagcgttagcgttttttgaggggaacagagattctgctttgaaatggtgcaatacctctaacagagcattagcctggaaaacacccactgaagccattgaccctgaagagggaggtttaatggtcgtatcattaattttgcatttagagcatggcgtatactcataa

SEQ ID NO: 194044 - DNA, 1374 bp, Klebsiella oxytoca
atggcagaagtttacaaccatgggaggtctgcattcttggcttatttactcaactcagcagatgtatttattggtggtgatatcattactacagatgaatcgattgaattcagggggggacgaaatgtgggtccacttcccacattgtatggttatgatggtaattatatagaacctgtaaatcaatggcttatacatctcaaagctgaaaaaagactggaaaaccttagctcttatgcaagagcgttaaaattttactggtgctttttggagtctgaagaacttgcatgggataactttcctgcagtaaaagcattaaaacctgcctatcgctaccgtaatgatgggctgctaaaaaaggtcaaaactggagaaatcgctttttccacggctaatacctatatatgtcatcttgtacagttctatctctgggcagcgtatgagcactactttccggtaactgaaacaaacaaaccctttgacatagaatttgtcagattcagaaataacgacatactggcacatatgaagccaaaatttttcgtacagacaacggatttacgtatcagggtccctaaagactctaacagtctgaatattcgcagattatcaccactttcgcaaacaatgcttacagaatttgcaatccatcttagccagacctcagttgaaatgcagcttatttgtctgctggcagcacaatgtgggctcagaattgaagaagccacaggatttaccttaactgcgttaaatcaggctgtacaaagaaccgaatcacgtacccactacgaaatcactattggacctagtaacggtgtacccactaaatataataaaacaagaacgattgaaataactaatactcttttagataaattacagcactatgccattagcgaaagaagaatgacccgctttgataaattacagaggcgtattaaagcgatgttaaaaatgggtcagcaagaaataaaaaccgtacccggaacactcttttcagacaaaatcagatctgaatctttagtttctgccattcaaaatgaacccttatttattagtcagcagggctccccctgtaccccacagagcacgggtgcccgatttggtgaattgcgaaaaaaaattattaattcagggatcgcatttgaccataagtttcatgacctgaggtgcagttatgcaacgtatcgcctgtacagtctacttactgcgggcatagagcctgccgatgcactcagcctgctgatgcaatggatggggcataaaaatgaatcaacaacatggaagtatttacgctatctaaaaactaaagaagccctgaaagaaaaaatctctatgcttgatgaaattatgcacagagcactactggagtga

SEQ ID NO: 194045 - DNA, 1737 bp, Klebsiella oxytoca
atgagcagcaaattaaaactcacaacgccctgggttgaacacctctgtataccaatacgcaatggcgccaatgctcataccctgttagattttaaccgctttcgctataagggcatacccaaaaccaacctgataaaacaggggggtgagcaattactggcacgggatgacattgtacagtcactgtttattgcaattactggccatgaagatgtcacacctgcaacaaagtataatatttttaatgctgcaagaaagcattttactttctgtgacagtcaggtgccagcacttatccccctgtctgagagcacgttcatcagagagttgaaatgtcatttacttcgtcaaaggaggggcgaaatcaaagacagcacagcctccaggataaaggcagacctgacaaccttatacaactggatggggcggagtacaaagtttacgtcagggtttaaaaacccgggaaatacacaatcagagcccacacgaggatatagcgatggtgacctgaaaaaattactccctttactaagaggactgttcaggcaactttactcccagtttattcttgacccagattcacatatcaaagccagcggtatcacagcaacaatgactttttgctggaaagggaaaacgtatcctgtacgcagcggtgtatcaaaattattttatgcagccgcatacctgctcagttattacacatggagcaacagctccatcctgtacacattaaaaagaccgacactcagcagccatacaccatcagataactggcatcagatgccagcctttaagcgccgggcatttaaaacaatctctgttgagataggtgacaacaatcggctggaaatacccaaatacgcaacacagttttttgaccagctcattactgcgtcaacgttgttagaccccggcccggatggcctgctcttaccgacctatagtcatcggaaaaaaagcgtccagatgatgagttcctgcctgctgaatgacttcaaaagtagctggctctctgtacacttccccatgacagacgacctagggcaaaggctgtggccggtcaccaggcgctttcgggccaccggcagtcatctgacactggcgctgaagggcccggtcgaggctgcactactgcttgataatacccccgaaactatccgtcaggcatattctgatgggaacccctacgagaacaatcaaatgaaccgggataccagccagacactggaacaggttgtccgggacaggcagagtattgaatctgcaaaacagaaagtacgtgaagcacaaaaggtcagcgttctggcatatgaggcctatgtcagaagagcatcgcctcccgtacgaaactcccatggaagttattgtaacgacacggctggtataatggccacgatgttcacttcccgggccaggagaaacgggctgatccccccggaagaaacgctggcttgtgctgacctgttaaactgctggagttgcaaacatcaggttctggtcgaatcagtaacggatttatggtgcgtgttaagcttccgtgaatatctggaagaatcacaataccttcacctggataaagcccattacacaaaaaactttggccagaccatcgtaaacatcgatagcaggctgaaattactgaatcaaaaaacactacaacatgcccgtcgaaaacttgctgatgaaggacgacatcccctgtggtcagatgtgcaaagcacagatatgacataa

SEQ ID NO: 194046 - DNA, 2121 bp, Klebsiella oxytoca
atggctattctgttgaactcatttcataaagacgctctgacgtatggagccacagaagatattttacttctgataaaaaacaaaaactggtctgcgctcgataagctcccaatatgtatcgataaacataacatcacgcgagcatattttggtcaaaattgctgggactgtagcccctttgcttcagataagggaacggataaaaaccagcgtgaatttaactttacctatttggagtccgctccggcgcttctccttcaggcgaagcttatcgtatatggatggatatttgagcaaaattatcactccggaaaagactgcaagctgtcaacactgacctcccgattcaatttagggttaaaaaagagtttattaacgcttttacatagtggcagcacgtgcatgtctgacttcaataaacccgagatatggcaaaagctacaaaacgatatcgaacgtgaagcctttagtaagcgaactgttgaattgattttctctgcactacagtcagtcgaaagactaaattcatggcttcctttccagcttgacctgccacagctgaactacaaacagacagccaaaaaactgtcagctaaaaataaagcagaacacaggcaaaccctggccatcccccaggcaatagcaaatatactctatggagaagccgttagacttgtcgagcttgcatggccccacagagaaacactagcccagctagaacgtgaactgcagtctaattatgatatcgggcgtgccgttgttgactataaaatacttacaggtaagtggacatggctgactaacggacaggggaaattatgttcaaaagaatatgtagaagaaattaataaagcgacaccccggtcgcaaaataccctaatcaaaaaccatctcaccggaacaggactcctgcccagtagcgcagcagacggtaactggctcgtcagttttcgtgctcaacttcaggcagcctgttttatttgttgtggtgctttcacaggaatgagagtcagcgaaatatttgaattgcatgtggacagttttcacacctacaccattaatggacaggattttcactcggtaagcgcagcaacccacaaactggctgccgggaaaaaaaatgaagaatggctggcaagccctattgttgaaaaagccatatcgcttgcgacggctctcagcgcgtgtgctcgtgaacagctgttaaaaatagcggttcacagcaacgacccagggcagtctgatacgcttactgagacagcaggaaatctgtggctcagccagtaccaaagaaaaaacctgcctgtcctcatttcacgaagcaagtggaacgaccgtttaaaaaatttttccagacatgtgggtgctattgttgataaacaggcactcgcagagtgccgtcagcttaaccctcgggacaggggggctatagaagataagataagaacaggagaggcctggccccttttaacccatcagtttcgaagaactttcgcctgctttgccgtacgtaaccagctcggacaccccatcgcaatcaaacaacagtttaaacacctcagcctgcgaatgagtgaatggtatgggaacggtgctgttgatgcacggctacaatcaatacaggtggacagcgaactgattaaattactgaatgaagcaaggctcgaacagacaactagtctttttgacagctggtttaacggggatagtcaactcagcggaagttttggcaaagccattctagctatgcgtaatgataagcctgtgatctacagtagctgggataatctctatcgactggtcagggaaaaacgacttactttgcatggaacgctacatagttactgcaaaaacggctatgactgcgatatggatggtgtggtcaaccctgcattctgcgtggattgtcgtagcggtggaagcattatcgatacggataaggccatgtggtggcagcaacgtcataatgctttgataatgtatcttcagcaacagacggatctaagcatcagtgagtatgcccactgtatcactcaaatccgggctgcggaacgggttatgcaggatcatgggattggctatgacacatatgaacatcccattaaggtgacaggcgtatga

SEQ ID NO: 194047 - DNA, 441 bp, Klebsiella oxytoca
atgagcaaatcagaaaatacacttcttaaacttgaagctgcactacaacggatccttgatggtcagacaaaacgtatccctgacaaccgaaagttgtcggtgcgtgctgttgaagaggaggccgggctgggaaacggaacctgttactactacggggcatttaagtcacgcgtccaggaggagattctgcggttaaaaatatcccctcagggcaggctgactcatcagtcacaggaagccctgcgacataaatttaaccaagagcgtaaagtgaaaattcagtaccgtgtaaaagcatctgatatgaaacgtcgtctggaagtgatggcggctgaacatcatcagctctcccatgcgctgagggctgcacgttcacgtattgaagcgctggaacaagagataaaagctttaaaacaaggccagatagtaagaataaaataa

SEQ ID NO: 194048 - DNA, 1281 bp, Klebsiella oxytoca
atggctgctgaagttgccaggaaaatgctggagctgaaactagtagatctcatcctatgctttgcaccttcatctgtggtggttgcatccattgaaagtactttctcccatattcttcaaaggaactttaatggtggtcttggtgcagtaggtgctgcgtatacttatcatagcttgatgtatttcgataaaagcttctggaagtctttgcagatgcatcgggtattagttattttcgacgaaatccatcattgttctggcgattcgctggataatgctaatgtgtggggcggggaaatcctttctcaagttcagcaatgtgccagttactctttggcactaacagggactccatggcgaactgatagtactcctatagtgctctcaaattacaccgatccggatggggagatctgttgtgactatgtatatggactacatgaggctattgtcgatggtgtttgtcgtaaacctaaaatcgccttgataaacagcaataatttagtttattcatcaaaggataatgttcagttttttggttccatcacagatttcctgagtgaaaccgttgcttcgtatcaatcaataatttggcatccagaagcaatgaagtatgtactagaagctggatgtaaaaaacttaacgaaatacgcaaagttaattctgatgcgggtggtttagttgttgcttcttcagtcgagcatgcatataagctactgaatattttggaaaaagagtttgaccaaacagcgataattgtgacgtaccacgatcgagatgctttggctaagattggatattatcggcaatcaactacagaatggattgttagcgttggtatgattagtgagggcacagatatccccaggctacaggtctgctgccatttgagttctgtcaaaacagaactttacttcagacaagtattgggcaggatattacgggtgaatcagagtgaaaatcaggaagcctggttatttacaatggctacaaatgaactgacattattctcaaacagattggccgaagatctacctgaagattataaagttatgcaacaacaatctgatgattggtcattccctacaattgattctcagtctatgcctccagagtttatgcggaaaaatggtatatctaaaataaaagagattgatttagaaatggatattggtgaaataactaaatcgtcacctacgatttcaagtcaaacaaaacaactaaaaatgggctcaatgcatcaacaagtgatagatgcatttttattttcaattatttaa

SEQ ID NO: 194049 - DNA, 678 bp, Klebsiella oxytoca
gtgagccacgaagtcatcatcattgccttagagtacttagattgtctaagtttcgttggtttctgtatacttagcaattctaagtttactgatttggaaattttaacaatgaagtctgcagtgaagttgcacccttatatttataatttgttgatagaaagagattttgatgagttcggtgctatccatctcagggacgctttgctgaagattacagattcatatgctgatgtaactgaagccagaaaattcatccgccgacaacttatccggctggaggcattgggcttcatttttaaaattgaaaatagcagtgggcgtccgaagatcctgtacaagaaaacggaaagcttctattcaacgactttcataccaagaaaattgccaagtaactcgcgcctggctgctgtgcccgaaaatgtgaaactacacgttttggatgtcgatctgttcttaatggacctgacaaaagaaaaaactgtccatgaggccaaacttgccgtgattctgagtgaaattgaagagtaccagtctcttatggagcgttttcccagtagacggagctgctttattgaactccatcagcacgcaaaaaatcagtccgccgctttgcttggcagggttactgctttatcgaaagtgctaggtcagcttagcgatggggattgcgcatgctga

SEQ ID NO: 194050 - DNA, 195 bp, Klebsiella oxytoca; identical to SEQ ID NO: 129415

SEQ ID NO: 194051 - DNA, 222 bp, Klebsiella oxytoca
atgcacaaaggagcgtgggtaacgctggaaggtaatgttatcagccagcaggatgagtggtacaccttccgcgatccaaccggcaccatcaaagtgcgcattcctcagaaggtctggaacgggcagcacttcgatgctcaggatttggtgcgggtgagtgggcaggtaattcatgagaatggtgctacgagccttgatgtaggtatgattagcaagccctga

SEQ ID NO: 194052 - DNA, 297 bp, Klebsiella oxytoca
atgaaaaatgtttatccgataaaaatacttacccaattgcgtccaatgctacttggctttcgtaaagcgaatgggctgacgcaaaaagacgtctctgaaaggttaggtgtgacccagcaaacctatgctcgtctggaggccaatccagccagtgcgagtattgaacgcctgttcaaagtgtttaccgtgctgggagtagaaatcagcctttcatcgatggcaaattcatcagaaatgatgccgtcgggagagaataaatctttggaaaatttgcccgccagacaggagaaatggtga

SEQ ID NO: 194053 - DNA, 1071 bp, Klebsiella oxytoca
atgtctgacttaagtgcaggaaatcactatggcgtgcggatactaagtcttaatggcgggggggccaggggaatgtttacgatcagtgtcctttctgagattgagaggatacttgccagcaaacaccctaatcaggatattaaaattggcgattattttgacctcattacagggacatcaataggcggcatattagctctcggccttgctacaggaaaaagtgcccgtgagctggaacgagtgttcttcgatagggcgaatgacatttttcccaaaagatggtccctgaccaacttgcttagatcactttgtgctcctatctaccgcagccatcctcttcgcgaaacaattcaagaaatgattggggctgaaaccacattcaatgacctaacccggcgagtaatgatcccggcagtaaacctttcaacaggaaaaccgcagtttttcaagacaccacacaacccagattttactcgtgatgggcctcttaaattgatagatgccgcactggcaacctcagccgcgccaacgtatttttccccacactattgtgaggatctccgcgcatattttgccgatggtggtctggtcgcaaacaaccccagctacataggacttctggaagttttcagggatatgaattctgacttcagcgtcacccataaagacatacatatacttaatatcggtactgttggtgaagagtattcacttagtccaaagttgttgagcaaaacatggtggaatggctactgtcgtctctggggtatgggaaaacggctggtgcttacaaccatgacagctaaccagcatcttcataaaaatatgctacagcgtgagcttatgctccatgacgcggtggataactacatctacctggatgaaattatccccaatgaagcagccagtgatatcaccctggataatgccacgaagagttcccttgaaaatttaagcgcaaggggaaggcagctcgccaatgttaagttcgctcaagatcagaagcttaagaattttttcactactcccgcaaaaccctttaagcgcatgaatgcgcaggagatccactga

SEQ ID NO: 194054 - DNA, 1302 bp, Klebsiella oxytoca; identical to SEQ ID NO: 129409

SEQ ID NO: 194055 - DNA, 1770 bp, Klebsiella oxytoca
atggaggaaggaaggctccataaaatgatgatagagtgcgggtatcgctatacgctagcccgcaaacttcctgaaaaggcgttcctacacagtcaggagcgcctgaaaggctattatacgaaagaatatgaaaccgaagccggaaatttcaatgtagcactagttattcggccagatccttttacggaactgccattagcttgcatagttgatctgcctgaaaagttcagagatcgccttatgcctcacataagccaagaaggaattctctgttatgtagagcagttggaagctgattgggatccaaacaaccttgagggtacgtacaaagaagtcgatgcccagattcaccgaacactgattaattcagttttagctgctactaatggcctgaatgataagagagaactcgaaggtgaatttgcaacttactggcgacctagtgatagtttatatattttatcaaaagcaagccgcgggatcagacttaaaacactgttttcagagtcaacatttcctgatggttctcccaggctagaatatataactgtccaagaatcctctcccgaggactctgaaaccattttaaaaaaatggcttaatcaaagataccttcgtcaagtatctttgaaaaattattctatcaacactcattatatttctgtaaaccctaatcgtcttgctgggatgaaatggccaccgacttcattccgcgaattactggactggctagaaaatgcggaccataatgccagggacagagtggttcactacatcacaacagaggggaagaaaagatatatttttttattcgacattttcaatcaagatatatttgccatctatattgagttaaatactaacgctgttgatttcagaaggcacaagagatcagctaaaaaatcaacgtccaaacttgccacattgttagctggtaaaaatgtatgcgcctcatataaacgattgggtgtggttcgcgctgatatggcaaccctccttagccgaaatgcccaaaggagaagcaaagaatgcttatccgataagcgtatagctttagttggttgcggaaccattggtgggtatattgcagaattgttactccgaaacggtgccggttgtgggaaaggtttactgcatttatttgatgatgatatctaccgtcctagtaattttggtcgtcacattttaccttcacatgattttgggtggtccaaagcgctctcactcgcaacaaaacttcaagactctgtgcatttacagaccagagttgaaggattttataagcaattccccatcagtattgatgttatgaaaaaatatgacattattatcgatgcaacaggtcgacctcctgtttccaagcgtattgcggctatcgtaagacagattccctgtgagcaaagacctattattatccacgccttcaatgatggtaatggacgagcatccaaagttttaatcgatgatggccgaagctgctatggatgtatggttactaatccagcaaaataccataatggtatcgattcccgattttacaacctcgatatctcaagtgaaaaaaataaaagttgtggtagcacatacacatcttatgatgcggcggtgagtaatataacggcatctttggctcaacaggcagtcttgagtactcttgagcctgacctcaaatggacttacaacgagcatatgttagaaggtggacgttcactgaaacctcagtttttgccacatcagcctaactgtcctatctgcaatgaacataactga

SEQ ID NO: 194056 - DNA, 471 bp, Klebsiella oxytoca
atgaacataactgagttagtttttatcgatgatgattacaatcatgtcgtcatcatgagtgatgttgtgcagcggttgtatttatatcgtcaattacatcatgccagtaccgaggcaggaggaatccttattggagaacgtcgtgggaaacacattgtcatcacccacatatcagaaccaggcgcaggtgatataagatcgcgattacgaatagaaagaaaaagcaaacatcaccagcaaaaagtggatgacttatttcagcaatcagacggttttctagtctatttgggcgaatggcatacgcatcccgaagatttcccacagccatcaagtactgatctaaggtcttggcgaaccggactgaaagcgaccgagccaatggttttgcttattatgggtaggaaacaagcatggtgtggtaaaaagcatgggaatgtcataaaaaaattagaagaaaaaaataatcattga

SEQ ID NO: 194057 - DNA, 1224 bp, Klebsiella oxytoca
atggaatcaaaaaacagtagtttttattttgatagagttgactttttatctaagtctatcagttattcaacattaatgatttcctgcttatcgatcgtcgggattttcttgaattctcattggctctacggtattgcaaccctcacgtttataatacaactcctcacttggtttgcaatgcattttaaaacttcgtatgcagctaaggctatagaaacaaaaagattagaaatgctgagaggtattataggcgaggaaaatttttaccgagagcgactctacattgatggtaatgcggaaaataaaaatggctttcgtgcagagaggttaataacactcatacaagagaatgcatactggaactctatcttatatattaaagctttccagcagaagttattctatttattactaacaatactactactagttagtataattattattatgtataccacgctgactgataatttagattttcagtatagccgcgccatatttgggatgctagtcataaataatttctataatttattctcagaagtgtcaggttttttcaaggcccacaatgagatgaaaaaaatagatggattcatagagattaataatcgcaaagcaccagaatatctatcttacatatattctaaatacgaacatgagatatttacagccccaagcattaataatgcaatttatttaaaacacagtatacaaataaaacaaacctgggctcaacggctttataataaaaataactttcaaagcaaacaattgatcgacgcaattacagaattaacattattactccaaccgattgaggaggattggagtataactggtggggctaataggtacttacaaggcgttcaaatttatgcaaatgatattgatatcataacaacggagaaaggggctaatgaaatatgcaagttaatcaaccctggtatcaaaggggagttgtttaaaaccacatcagaaaacatcaaatcattttattgtacatttacgttaaaaggtatcaaaattgaagtaatgggagaccccgagaacaaaagtgaattagcatggaatgaaaacaaaaaatggaagaaaaatcaagagtctcttttattaaatggtgttgaaatacctattgtcagcttagattatgaaattgaaataaaccaagaaattggcaattataatgcattcaaagacacttgctatctggaaaattatagatag

SEQ ID NO: 194058 - DNA, 1107 bp, Klebsiella oxytoca; identical to SEQ ID NO: 129405

SEQ ID NO: 194059 - DNA, 351 bp, Klebsiella oxytoca
atgttttcgacgcagaatcgcgacgcaaatggttatatcgctgccaaaaccagcgctctcaaagcattgaagaaaatggaagagcctctgacagaggatgaggtcaaggcattagccgacatagcatctaaaatgcaaaacgattacgacccgatgtcgcctgacaacgtgagagcccgccgtaaggctgatgaagagtatcgtgaggaagtcgcacaggcggccgcacgccgcaatgatcgtatccgggcatctggtgtgagcttgccgggagatactcgtcgcgttaatggcaagattgaaggaccaaacggcgaagtcgagctcctgaaatcacaggtccctctttga

SEQ ID NO: 194060 - DNA, 1857 bp, Klebsiella oxytoca
atgagtaattcattcgattttgagctggtggctgatgacagggccacggctgccattgacgaaatcaacgaggccattaaaaacctgctccctcaactggatgagacgcaggaaaagcttaatctgggcggtgatgggacagttgataacctagatgacgttggcgggcgtctggataaaatgtctcgtagtgcgcgggataacgtccagttcatcggggatattatccctccactaaaaattgtaggtgaactggctggcaaggtggctggcttcggtgcagctggcgtcgtagggttcggcattcaaaaggttgctgacggttttcgggacgcggcaaaagaggcttacaacctcgatacccacgcgcagaacaccgctatgagcgtccgggactttacgcaactggcaggtgcgatgcgtattcttggggcggacagtgaaagtgcagcctcatcaattgagggtattttcaaagcatttaatgaggcagccagcggtaagaatgcaggtgttatggccgctatggcacaaattggtgcgcagatcgaaaagaacagtgacggctcagtaaataccctcaaaacactggagtcgattgctaaaattttcccgaccctgcggcctgaccaacaaaaatcctttgctgatgcggttgggcttactccagatctgctgaccttgatgcgtgagggggccaaatatgcaacgctcttgtcgaaggcggagaagtttggtctgacagtggatcctgagtttaataaggaaatgtcagaagctaatcgccagatgaatgaaatggcggcgatttggggtggtcttaaagttcaggctacacagcgggtaggtaaatttattgtatctccggccaatgattcaaaagatataaatggtaatcgctggcaggacagtttgaatgatggtctgaaatataatggaactcagttttatcatggcgatcgggataaagatattcgctggaaagcattaagggatgatgagtttaaagccagcctgtcagcttctgaaaggctcaactttacacttaacagacccgaccccgaggtggagaaaaagcttaattcccgatacggcgcaatgtggcaggcatatcggttgcaggatgatttatctgccattcccaaaatatccggcaatgacaaagtcccttataacgatggccataatgcctctaacacactgggatttcggaatcacaatcctggcaacttgagagatgcctcaaacacaacagggaagaacggcggtttctcgtcgttcgccagtgatcatgatgggcttgccgcaatggcgcgccagctgatgttatacggtgaccgcggaaataataccccaaggggctttcttcatacgtatgccccgagctctgaaaacaatacacgggcttatatcgatgatgtgacttccagaactgggtttggtgctggccagcgtcttgacctccataaccctgaagtccttaagacgttgatggccgcaatgatcaggcatgagcagggctctcaaccctacacggaagaacaactcaaaaacgcaataagaacggccgtcacggatgaacgatggtcaggaaagcgcagcccggagctactctctcagcagcggaacaatatcaactcgatgccgactgctggctatcgcccagaatcaatactggcgccaaagaaaagcaacagtgactcgaatgccgtcaccgataacctggcccgttccctcaaggatgctttcacagaacaaccgttaagactggagatcgttatgactaacgataaaggcgagaggaagacgtacaacgttgaaaataatgggaaaataattacgcccatgaactattga

SEQ ID NO: 194061 - DNA, 588 bp, Klebsiella oxytoca
atgtcactaatgagcgtcagccagtacgcaaaacatgccggaatgagccggcaggcgctgtataactgggagagccatgaaggatttccggcgcgggttgacgggaagattgaccaggaggtctgtgatgcctacctggcccgataccgcagcgccagtgacccgcgcacgaagaatgccagggggaaaaccaaagctgctccagtcggtcaggcgcaggggagtgcgctggtggaaatgagtgttgcggagattaagcgcatcatggagtcaggtgccggtaaggtgtccgggatggacccggacgaacgtgcccaactggctgcaaaggctgtggagctgtttttaagcgaagggccttataaccctcctgtgacgttcggcggctaccggctgtcgattgctgaaacgccagatgttgaaatcgggcagatcatcgcgggcggcgcgttcggcctgtctgcatatgatgtgatttacgagtgccgggattacaccctgaccctcatgagcgatgaaaccgaagaaacagccatgcgaagagttattccttcgttgctgtatgccctggccgatgataccgactaa

SEQ ID NO: 194062 - DNA, 1086 bp, Klebsiella oxytoca
atgttgtttgaagaaaacaaagaaaggattaatactgaaacatctcgtggcaataaaactaattttgattatcttgatcaatcatgtctcgaagaacatgctctgataagaaaattattaaattattgcttttcacaagtcagtaatttttcaaagagtgaaattaaaagcagaattgagtcttcaatagaagatgaatttcatgctgtttgttttgaactattgattggatgcttatttagaaaaataggatgcacaatgcaagagcatccagatattccagaaaccaataagcaccctgattttttagtaacccttccaagcggggatagtttttatctcgagttagttacaattagcgaatatgatgattcatcaataactagactcgaacattttattaaaaaacttagaaatgaaagtcatttcacaaatataaaagacatatccggaagaacaattgatcataaaaatagcatggaaatttataaatcaataaaaaaatggtggtacttaaataaaaaaaatggcactaatccagtaacttttgaaagtaatgataaagagttttcagtaacactacagatcctacctactgaagaggtagggttaactggagcaatagttcctgtaaacttccacactcaactcttacgaaaaataaaaagaaaggctatgagatacggtgaattagacttaccttatattattgccacaactttccgcccctcacgactttccgcagcacttccattcatgcaaggactaattataagcactttatatggaatgggtaatattattaacccatcaacagggcttttagaaaaaaacagtagtttatggaatgtcgatagaaaaacaaagacatatggcaatgtgagtggagttatgttttttgatgagttgactatatacagagcgttaaatccgttcaagtactgtttatttctaaatcattttgcatacaatccaatttatgaaaacatatcctcagtctttaatatttactacattgatgatgcaaaccaaaactggggagatggcatcataatttcagacatattcaatagttgtgtaaaataa

SEQ ID NO: 194063 - DNA, 2151 bp, Klebsiella oxytoca
atggatgccgcccgtaaaagcgccgccgcgctccagcaaaaacacaacagtttgcggcaggccgtacaacgccagcggcaggaactcagcctggcgggaattaatacccgtaccctggcggcagacgagcgccggttaaaaaccagcatcagcgaaacgacggcgcagctcaatcgccagcgtgaagcactggcgcgcgtcagcgcgcaacaggcaaagctcaatgcggttaagcagcgatatcaggccggtaaagaactggccggtaaaatggccggtgcgggtgcagccggagtgggtatcgcgacagcgggaacaatggccggagttaagctgatggtgccgggctatgacttctcattaaaaaactctgagctgcaggcagtgctcggggtcgataagccgtcgccagaaatgcaggcgttacgcaagcaggcccgccaccttggggataatacagcggcctcatccgatgatgcggcagcggcacaggtaatcgtcgctaaatctggcgctgataaagatggcattttggcgcaaactcccgccattctgaatatgtcgttagcgaacaaaaaaacaatggaggaaaacgcgactttacttatcgggacaaaatccgcctttgggcttgccgatgataaggcgtcgcatatcgctgacgttatatctatggcgatgaataaaactcaggccacctttgaagggttaagcgattcacttacatatgttggcccggttgccagagatgccggtgtcagtctggaagaaaccgccgcgatgctgggcgcgttacacgacgcaaaaattaccgggtcaatggccgggactggaggtcgtgcaatattaagtcgcttgcaagctccaacaggtcaggcttatgcggcaattaaagaacttggcattaagacaatggacagcaaggggaatacgcgcccggtctttaccattctgaaagaaatgcaggccagttttaagcgcaacaacctcggaacgggtcaaaaggccgaatacatgaaaacgatattcggtgaggaggcaagttctgctgccagtgtattaataacagcggcggccagtggaaaactggataacctgacccgattaattaaagagtctgacggcaaaacagaggagctggtcaaggttatgcaggataacctcggcggtgacttcaaagaattccagtcagcgtatgaggccgtcggtactgacctttacgaccagcaagagagttctctgcgtcagcttactcagacagcaacacgatacgtgttaaagctcgatgactggatcaaagacaacaaggcgttggctgaaacaatcggcatcattgccggtggcgcactggcgctgattggcattatcggcggtattggtcttgttgcgtggccggttgtcatggggattaacgccattattgccgccgcaggcgtgatgggtaccatctttactgttgcaggtagtgccattgtgaccgcgttcggtacgatcacatggccgattgtcgccgtcggcgcggcgattgtggccggtgcgctgcttatccgtaaatactgggaacccatcagcgcatttttcggcggcgtcattgaaggggtgagcgccgcctttgcccccgtagctgacctgtttgcgccacttaaaccgatgtttgactggctgggcggaaaacttaaagccgcatcggactggtttaacaacctgattacgccggtcaaatcctcacaggaaacgttagaccgttttcgtgatgctggtgtgttattcggccaacggctggcagatgccttaacgttgccgctgacggcatttaataagctgcgcagcggtattgactgggtactggaaaagctcggcattatcaataaagagtccagcacgcttgaccagactgccgcgaaagcgaacgcagccacgcagggaggttcttatatcccggcaaccagtgcctacggcggttatcaggcatatcaacccatcaccgcaccggcgggccgttcttatgtcgaccagagtaaaaacgaatatcacatcgacattcaggggggcggcagcggcacgccgctcgatcgccagctacaggatgcgctcgaaaaatatgaacgcgacaagcgggccagagcccgagccagcatgatgcacgattaa

SEQ ID NO: 194064 - DNA, 171 bp, Klebsiella oxytoca
atgcctttgctaggccgtgagataacagagctaacaatacaggatatacccaggctgaacggtgaagcactcgataaccatacccactacaacattcacaatgagctggcacagtcgctacaggtcaacgagtgccaccgccgcaggatgaacacaccagcctaccagtag

SEQ ID NO: 194065 - DNA, 939 bp, Klebsiella oxytoca
atgaaagatgacccattagtttcaataattatcacgacttataaaagagcagataatttggatagggcaattgtaagtgcccttcaacagacatatagaaatattgaaatcattgttgttgatgataatggcgtggggagcttttatcagaaaactacagaacaaagtgttgaaaattatgtttcccttaaagagataaaatatattgcgagggaatataatggcggtggtggggaagcgaggaatacaggaatcgaattatcccaaggagaatatataacttttcttgacgacgacgacgaatacttagatgacaaagttgagaaacaggtcaggtttcttgaaaaaggatatgatatttgtttatcgtcgatgatcgtaagaaaagaaaatggagaagagatatttcctaattggtcttatgcaaggggtaatagtgttaaagattttatattaaatggtaactcctatactccgatgattatggccagaacagatcttataaaaaaagttggcggcttcgattcagtaaaaatgctacaagaccatatatttatgttgaaaatgctaaggtcttttccgaggctcatttcgataaaagataaattatatgttcacaatattcattctaacgaacgagtgtctaaaaaaaagagcatagattgctatttattaaagcaatctatggagaatgagttcatatctatactgaactttagtgaaaagaaaagtctaaagtttaagcattcgaaagaattggctttattatacagtgaaaaaaatgaatatagtaaatctataaagacatcgttagattcacttcggtttgtctgtaactttcatctaatgaaagagtttgttaaactcatgttgagagtttctgtagggccacgtggttataatataatcgaaaaaatcaaagagaagaatcatgcataa

SEQ ID NO: 194066 - DNA, 1056 bp, Klebsiella oxytoca
atgcataagacgaaatattatttcttaaacgaattgaatttccaaggtagaaatgcaggttttaaagctagaatagatactctatttgtgtttgaccatcatcctgatgtcgaagttgttaatattcctctttggggggggggctggagcagagctaaaaagcttggtagttttttgaattttttgcttttaaaagtaaaacaaaatgatgttgtttttatacaatatcctttccctaagccttttatagatataataatatttattgtaaaatatagaaaaataaaactatgtttattaatacatgatgtagatattttgagaggacagaagcataataaagactttaaaaatttatctaatgcgcactacttaatatcacataataaaataatgagcgcgcagttacagacaattggtattaatactcataaagtaaatttagaaatatttgattatatattgaatgctaatgcattgcgtttagaagatattaaagaaagaaacaactttggtgttaataatataatatattgtggtaaccttgacagtaataagtctggctttatttactcttggaataaatgcaaggcgaatcgtattgtttatggagttaatgcagatagtgatataaacgaaaataatgattatagaggttcttttgattctaataatcccccggagatcaatgactctggtcgatcttatgggctcgtttgggatggtgattcaacaaaggagtgttcaggtagttttggtgaatatctgaaattcaataatccgcataaaacctctttatatttagctatgggattacccattgttgcatggaaagatgctgctatctcgaaatttattgaagaaaaaggtgtaggattagttgttgatggattagaccatctagataaagaattagaactaattaccgatgaacaatatactcatatgattcgtaatgtttataaagaaagatcaaagttaatttctgggcaatatttacatgaggctatcgatcatgtattgagtttgagcacaaatactatcaacaagcagtga

SEQ ID NO: 194067 - DNA, 978 bp, Klebsiella oxytoca
atggccactgtttccattagttactcaacatatgaccccacagatcaaaccaatgaacgcatattgggtacggaacatattgataacattgaagagattctagtacctttaaatgataagaacaccccaatatttattacaaaagcattttcgggggaggtttgtaaacgttggcgagtccggttttttctgggaattgcacctgaccattggggcgtttggttaacggagaaagacgtcagcaaagacatctatctgtcggagattttgaccaaaagacgtataggcaatgcggctgggttcgtaaaaaaaggcgctatcgttatcgttgagtttggacacatttatcaaactctaaattttcaaactggtttaactaagagtgcaatgtacccttgcaatcaccaagaaggggaaatgcataagagaagaccagcggtggtcgtcaaagttgatagaagaggagttacagttgtccctgtaacatccaaagagcctgatgcccatgagtataatcgtgcgattttcgagcttgaaacagaatctatccaacatatcaacgaattagatactggaaagcgtagctttgccgtgtgtgaaatgatccagactgtctctcctacccgcatccttcctcctgaatctagagatcataaaggtcgtgatcgaacttatcgccgggatgaatcgtttagtagacggttatctcgtaacgatatgaaagcgcttgaacaggggttacttgctgccgtaggtatgtactccttacaggataaacttgatagaacaattcaaaaaggtcaactgcagtcagctgagttggaggagttacggcctgaagttgaagcaatacgggaagaacttgcggagttgagggataaataccgtatattgtctgacttgtacctagcatcatctgggcatgttacaagagaagacgttgagcaagaagttatagagtacatggagcttgactaa

SEQ ID NO: 194068 - DNA, 933 bp, Klebsiella oxytoca
atgaatgccatttacacgaaccagtcgaccagagaaaatttggatttactgtatgcgcaggcccgtgtgtacgacagggtaaaaaactggaacaagctcaattttctcttcagcaccatcgtgcctctcctgctttcgctggttaccgtatacaaccgaagccgaggatttgtcgattcagaactgttgtcttcactgttgggattgtatggacttctggtgcttacctttaacattgccatcagtggatacatatcggcactgcgcaggaaggcagcctcaatccaggaaatgtacgactgccgggtacttggcatccggtgcaatgaactgaaggtggaggagatctcaagggatgaaatcatccgggcagctgaatacttcagaaacagtccggaaaaagcacgaaagcgatttggtgaagagggatggtacgtcagtaaggtgtatgacgcgccgcaggccgtaatggcgctcctgtgccacggaaaaaacctcggctgggacaaatcgctcagggaggtgctgcacgtgttttatctttcagcattcattgtctcgcctgtcgcgatgcttgtttacggcatcgccatgaaatctgggctgaatgagatccttttctatgtagtgttcacattgccggtcatacgctatttcttgcttcagtttctggataatcgcagcagtatgaaaagaagcgagaagctgaaaaaatacgttgaaaaggaattatccggcatccgggtttccggaagagctgaagaagagaaacttggttatacgctccggaatatccaggatgagatgttcgcttaccgggcctcatgtccgcccgttcccaacggtatccagctgataatgaagcctaaaaatgagcgaatttatgttgattactttgaaacgaatctgaaggagctgcaccttcaggaataa

SEQ ID NO: 194069 - DNA, 996 bp, Klebsiella oxytoca
atggcgaccacagtaatagctgcctttaacgaatttatgaaagataccgtgaatctcgaaaaggcagacaccgatgacgcgcgtgcaagtcgcgactggctaatcggtaagattaatgattttgaaaatgatgaggtttttccggtgagttatcccgggatccacattgctttcggttcgttcgcaagaagaaccaaaattcgtccgcttgatgatatcgatctgatgtttggcttaaccgggcaaggtgccacctataccatcctgagtgaccgggtaactgtaacctcctccggagaggggtcacgtctgcaccgttaccgacattccggggcagacaccgtctgctccgtcagaattctgaatgcctttaaaaaccgtctgcaggatattgcccagtatgcccaggctgatatcaggcgtaaccaggaagccgtaacgcttaagctggtcagtaaagactggaatttcgatatcgtgccctgctttattaccagtgaagatgcctatggtaaaacgtattatctgatcccagacgggaacggacactggaaatttactgatccccgaattgacagagacagagtcaaggctatcaacgttaagaatgacggtaatgttctcaatgttatccgggctgtcaaatactggcagctgcgttcgacaatgccgtccatgagctcctacctgctggagacgctaattctggactattacgccggcaggacctcctgcttatcgtttgtcgatatggagctggaagcgctattccgccatcttggtcttttcgtacagttctccgttaacgatcccaaaggcatacagggagatatcaactctctttctgccgaggctcgtaaggcgatatcggacagatgttatctcgatgcgcagaaggcatcggaggcgagacagtttgaaaatgataaagagtatgaaaaatccatcaataaatggcgcgacgtgttcgggccatcctttcctgtttacgggtga

SEQ ID NO: 194070 - DNA, 819 bp, Klebsiella oxytoca
atggatattaaggtggatagattgaaaaaatatttattgatagaatggattaagtgtttttattctcgtttgaatgttagtcaaaaattgcatttaaattatattttattgtttgtctatacatacgtaatatttcttgtattgagtcatggtcaaatattcaggtctgcattcttattggctattgtattttggtgtattgcattggcatatgatgctattcttctatataagaaaatttatgaaaatgttatagggaaagcattgttaacaataatattggttgtcgggactaatttttctatatctattgctgggatcatattaaatgatgttagcggagttgagccttctaattttcctcatgcattaattattgtttctattttaaccattccattcattacagctttaattgctttgtttttatattatatcttagccttaattgtttttccttttatacttctatattttttattattggatgctaaagtaaatgattttttattccccttcaaaagtgaaaaagatgatatttatctaaagaaatccacaatactaatcaagatttttagttttggcattttttttgttttcatttatggagtatcacaaaatactatgtcatggtatgaaaagaatttatcaaaatttgcagagaaatttatatatacatttgagatgtattcgaaaagcccatgcgatcttggtagtgatactaaatcattgtttataaatgatgatagaattatttttgcaaaaaaagttggtgatgaagttatttttcaagttgaggaatgtaattataaaaaatag

SEQ ID NO: 194071 - DNA, 933 bp, Klebsiella oxytoca
atgaataattcgacttacaagaaagtaccaacattagagtattgcaagataacaagagcggctgaactacttgattgctcggttgacgatttactgtattgggccgaagaacgaaaaataaaaatttgtattaaagttcaagatcttaaaggcatgttggttgttccagctatttcgaaaccagaacaattgcttatgtttttatgcgaacttatgcatggggaacacactacaaacataatgtgtagaggttatggtgatattaagccttacccattatcgaaagtttatgctgaagagatttatgatttggaaacagagagtgattttctattgttttcagaagtaactatcgcacgaaatggttttgatgttcgtattgatggattatgggaacttgcgaacataacaatggggttaattgattattatgataaagaaaatcccccagtcctcggtggggagtgtagtgaaacaaggactatggttaagttattggaggcattggactttccatttgagaacggcatgaggcatacacttaattcaacctcttttgttttacacccggcagatactttagatgaagttggtgattttgtatttatgggatatgagcaagaaaaaccgatctcactaagccttgataatctatatgtaacaaaaactcaaattgaaaatattattagtaatctaatgattccatttgatgacatgattaagaaagataatacaaaaaaaacaaacacgaccaaaaaacaatcagaatttaccgtcgggattttgaaggagattggttttactaatagtgatttgagtggaagtatcagtgaactcagaaaaaaaatagcaagaaaattgccaacggtatcagttcctgcagatgataaatcactgattgattggcttcggaaaggcggtatcgaccgctag

SEQ ID NO: 194072 - DNA, 213 bp, Klebsiella oxytoca
atgccagtaaaaaatcatttcaattcactgattagattagctgaagcacagcggcgaacgggttatagtaaagcatggctttatcgattaattggacaaaaacgttttccacaaccagtaaagattggttctcgctccatcgcatttatcgaaagtgaagtggatgaatggatcaatcagcgcatcgctgaatctcgtagtgaggttatctga

SEQ ID NO: 194073 - DNA, 180 bp, Klebsiella oxytoca
atgaataagcccaccagcaccccgctgctaaatcacgcctaccgcgacgctcacggccagatggtgagcgtggtcgctatagcacataaccgggtgacgttctaccgcgaaggctaccagttcccatgcgtacagcccattgagcgcttcatgaaggagtacttggaggtgaaacaatga

SEQ ID NO: 194074 - DNA, 903 bp, Klebsiella oxytoca
atgattactgccgcccaaggtaaaagcctctctctggctggcctgatgtatgtaaaagttaacgctctgcgggtggtgcgccaccgcaggaacctgtcaaaacctgtcattctgtgggccactgatagtggtgtacaaaattcttggcggaatttcgtgaccagtggtagcgatgcctttcacacctgcagtaaagagtttttcgagtccataaaaaaggacttgatgttctacgtcatcccggtctatggttataacgcaccagcaaaatctggtgccgggattggcgtcctgaatgactgtatggcgatacatgacgcgccgagcgtctttttttgtgtcgttaaaccaactcaccctttttttggcgctgcggttataatccgcgccgctcacaaaattatggtgggctgggtgggggcttcttcggaagcgccggagtccatacagtccggttacgccaacctcgctcagtccaccaccagtgaaattggcgtttcctgtggtggtcttttaggtcactgtatggaggatgccacatggctactacccctacccaaaatacgcaatttatctggattatcgccgctgttcgccgcgatatgccgacaattaaagcccaaatccatcacatcaccgcacattctgagcgcgaagcccgccgatctctggttcgggatcacgtctgctttttcgctggtcgcatccgtctggaggtggctcatgcgtaactatttccgcattactggctatgccgtcaataagcgcggcctgaccgttggtattggctacgaaatcacatcctcagacaccagaacggcaaagactcatgcattgcttcaggcgcagcgtgaaggcctcagccatgttcgcattacccgcgttcaggaggtatcagcatga

SEQ ID NO: 194075 - DNA, 627 bp, Klebsiella oxytoca
atgaacaatatttacccactcccgaaaaagccgggcaataccgatccattccgtgcagagcctacgcctgaaggggtgaggatcaccagctctggtagcaatgggcgtgaaacagttcaacttattggctacgaggacgcggtgaaccgtcttgacgctggcggttatgacgactccagcgcgggttatgacattcaccttgccgtagccgagggcggaaactgcggatatttcgactttaccgcgcagcacaacgtcactatgtggcgctggctgattgctgcaacgttcgtttctgaaatgaagcgcgagaacggcaccaccacggttactgaaccggacggctccgcgtcacaggtagcgatttactccaatggtaaagcgggaattgtggtttatccattcgctgaacggctggcgatggcgaacaacattgagggggctcttatcgagcgttacggcactgaacagggtacggaaaacgccattgtgttttatcagtccatgctggatgtggaggccggagaactcacgcccgccgggcgcgagatactggcagagctacatgatggttttattgatggcatagaacaaaacggccttcccgaagcgccgatggcgcactaa

SEQ ID NO: 194076 - DNA, 486 bp, Klebsiella oxytoca; identical to SEQ ID NO: 128128

SEQ ID NO: 194077 - DNA, 2628 bp, Klebsiella oxytoca
atgtttctgattgattttattgataaaaattacactgtaaaaaatgaagctgatgtccagcattatgctaagacaaaattagaatctgaagcttttagctatgatgtgcatcagcataaagtgggggtccccaaattagactcagcattcccaagcaaggcctctactaatggtacagggcgaccagacttgttgctttgttgtaaaaacactagttatcctgtatgcgtgtgggaaaataaagggccttcagtttctgtaattacagcattgaatgaagccaaattttacattgagggattatttaaaaacctccctcttgaaccatccttaccaagaattgcagtaggatttaacggaatagagttagttagcgaattctatacaaacgaaaataaatgggtacaaataagaaacaagggtagtgtagccaaagattttttctttaactcagcagttattcgaaatggtattagtaaccatggcacctttttagctgaaaagggttgggctactgcctccgatctaagagagttattgccgaaacttaaaaacatctataggtatattccctctttaactcaaggaagaaaaccaattgactttactatagcccttctaacattaagaatgctagtagagagaaatcctgcatggggaagctggagtgagcaaccatcatttgcagttggagttttcgataatgactcagctgttagagaaagattcaagaccttaaccgatcgaattttaagtgatgataaactaaacacaaaatatggcgaaatattccactttaaagaaagtaatgatggtgatgagatttcattttccttcattagcactttgaattcaataccaactaaacttgataactttggtaaaatattctctttattagacctccttccgccgttagaacattctgactttgatatatttggtgaggtctatcaaagtattggtgacaatgcaacaaagaaagctttaggccaattctttactggccgccatgtaatttcatcaatattacccattttaatgaaacgctctggattagatgaagacgaagaaaaagtaaaatctattaaggtgtgtgacccagcatgtggtaccggtggttttttaactgaattattcagaattattaaaggtagtttcacctttactgaaaaagaattaaaaagactttcaaaaagtgcattttacggatttgatttaagccatgccaatgcatcaagagcgtcggtaaatatgtactttgctggggatggttttagtagaatcgaaggtggacgagatagtttaaaagatgatttcctagaagagtatgataattatttcgacctagtagtaactaatcctccttatgggaaaagtagccatgggcgagcagaggaagcatttcttaatttagtaatacaaatacttaagccgggcggctggggcgttatggtattaccaacgggtgtcttggaaaatccaagatcaactaactcacgtttcaattttttaaaacactgctgggtgagtgactcaatatcgctacctaaacatacctttgcaccatatacacaacaaaagacagcagttgtaatatttcggaaaagaaaaaaagcgctaccagtagctgatggtgatatatcaaacttatcagcacttataaaaaatgaaagaatcggatatttcattgtagacaatgatggatacgcgaatagcgacaaaagatatccgaccaatgttaaatctgaaaatggagagttccttcacaatgatttatcccaatggattgacaattccgaaaataagcaacccagtctaatatataatgcactaataaaccaaattcctgtgaggaataggttatccgagtttggaaagttgctgggtaaaaagtactcaagcatgtcttatgacgattgtttcaatcctatacatagagatttaagcttgcttcctgaaacctatttgagaaaagagcatgatgaaatatcattcgatgattatcaagctagagtggctatcgtcgatggctatcttacgggggaaaatgaggtacttaatggacgattcattgaagaactcattgaactaacatctctccccatcatttacggcaaagaaactaaatacactcaatccagtgtaaaagaattatttacaataacaaaaggcagccaaggttttacagaagaggttatttacgccaactttgacattaatggtttggatgtctatggtggaggggtaaaacctactggatataaagtaaaagaaaatacccttaacaacaagggggtgaaagtaaaaatattcgaagcgccagctatcgttgtatcaatggatggtagttctggcagcttacaggtaatcagagctggaaaatttacagcgaatcatcatgccgctgttttgaaggctaaagatcaatctaccgacttagattggtttgttcagtctgtcggtgtttccctcaaaaaagaggcttcaaatcaagagggctcagctacattaacgaaagacagacttgaaaatcaactagtttatataccgacaccaatagaaaaggtcacctatattggaaatacaaggcgtcatttattaaatattcttgcaaaattttcatga

SEQ ID NO: 194078 - DNA, 459 bp, Klebsiella oxytoca
gtggatagagagttaaacgagcaagtcatgattgaaagagtcgaaatgattgcgcggctgacgacagagggtatgtgtcaggaaagggatcgtgaaattgctttaaatttaattgcggaaattgcgcgagggaacttgatgagaaataacagtttctcggttttttttgctcctaactctattcaaaaacgattaaaaaaggagcgggaggtgagagttagtatcacgttggataaagaccaaaaaattgaacaatccgtagtcgatgctttccagtgtgagttggctcgacgggtgcaatcaattttcccatcaacgctagtgacagtaaaaaaaggaacgatgactggcgttgaactggtggggttcgtgcaggaagcagatcgtgaagcgttgggcgctattcttcaggatgtctgggaagatgaaaactggcgttcatttcaatgcgttgtctaa

SEQ ID NO: 194079 - DNA, 234 bp, Klebsiella oxytoca
atgcgtaataccgcatctcgtaccactaaagccacagtagataagtctgaccttaaccagttgatgatggacgcgcggatacaagagcgccgcgcgcgtgcggaagttatggcaagccgcatggttaacctggctaaccacattaaaaccaaccaactcgacattaacgaggcactggagctgttgttgcaggaaagcgaaatttaccgccatcaggctatggagatccactaa

SEQ ID NO: 194080 - DNA, 1290 bp, Klebsiella oxytoca; identical to SEQ ID NO: 153640

SEQ ID NO: 194081 - DNA, 513 bp, Klebsiella oxytoca
atgctcattattggcaaaaagctctcgccgtatgccctattgtccatatcgggcctgctggcagcgtctgatcaggctgtaaagtggctggtgcagcaatcaatggcctatggcgagtatgtttcggtgaccccgttctttaactgggtgcacctatggaacaccggtgccgcattcagtctttttgcgaatggtggaggctggcagcgctacttttttatcggaatcgcggtagtggtctcgatttttctgatcaagctgatccttgaaaatcgtcataaaggagaagccatcgcttacagtcttatcctcggtggcgccatgggcaacctgattgaccgggtctttcgcggctatgttgtggattcctttgatttctattggcgagactggcattggccggccttcaacctggctgatattgcaattgtcctcggtgccttacttttcgtttccagcagcttgttgggtaaaaaagcaaacaccaatgccgagtcggatggatctgactga

SEQ ID NO: 194082 - DNA, 897 bp, Klebsiella oxytoca; identical to SEQ ID NO: 108036

SEQ ID NO: 194083 - DNA, 408 bp, Klebsiella oxytoca
atgcgcattggtcagttggcgcagttggtaggggtcgaaacacagacgatccgcttctatgaacagcagggcttgttgccgccgcctgatcggcaggacaacggttaccgtgtctataccgagaagcatggtgaggggctggccttcatccgtcgctgcagaatcctgggcctgtcactggctgagattcacgaactacagagctatcaggacgaccctcatcagccttgtaccgccgtcaacgccttgctcgatgatcacatctctcatgtgcggtcgcagataaccgctctgcaagcgcttgagaaacaactcgtttcactgagagcgagttgcaacgatgaccgggaagttgaggcgtgtggggttcttgctggaattagcgaaggaaacatgcaccagcagtag

SEQ ID NO: 194084 - DNA, 825 bp, Klebsiella oxytoca
atggatagccatacgctgatacaggcgctcatctatttaggatccgccgcgctgatcgtgccgattgccgtacgacttgggctggggtcggtgctcggctacctaattgccggctgtattattggcccgtgggggctgcggctggtcaccgacgccgagtcgattctgcactttgcggaaatcggcgtggtgctgatgcttttcgttatcggtcttgagctcgatccccagcggctgtggaaactgcgcgcctcggtgttcggcggcggggcgctgcagatggtcgtctgcggcgtgctgattggcctgttctgcatgtcgctgggtctgcgctggcaggttgccgagctgattggtatgaccctggcgctctcctcaacggcgatcgctatgcaggcgatgaacgaacgtaacctgacggttacccagctgggccgcagcgcctttgcggtgctgctgttccaggatatcgcggccattcctctggtggcgatgatcccgctgctggcggcgagcggcggctcgacgacgctgggcgcgtttgcgctctcggccctgaaagtggcgggcgcgctggcgctggtggtggcgctcggacgctatctgacccggccgatgctgcgttttgtcgcgcgctccggcctgcgtgaagtcttcagcgccgtggcgctgttcctggtgtttggcttcgggctgctgctggaagaggtcgggctgtcgatggcgatgggggccttcctcgccggcgtgctgctggcgagctcggagtatcgccacgccctggagagcgacattgaaccgtttaagggcctgctgctggggtaa

SEQ ID NO: 194085 - DNA, 234 bp, Klebsiella oxytoca
atgatgatctcatatcaggaacttgttcgcaccttccataaaacgctgatggcctggcatgagcgttttaatcaggcatggccggagctgtcttcacgttactccgccaccttcagaagaatgtttaattactatttatgcgcctgcgctggggctttccgcgccagagatattgagctttggcaggtactgtttagtcgcggcgtcgagggtggcctccgcgtttatcgttaa

SEQ ID NO: 194086 - DNA, 330 bp, Klebsiella oxytoca
atggaatatctggaattcgtggaaacttctgtttttacgagagaatgtaaaagcttactcactgacgacgagtacaaggagtttcaaactcacttactcttagacccggaagctggatcgatcattgtcggaacgggcggttgtcgtaaggttagatgggctagacagggcacaggcaagagttcaggcattagggctatatactactactataatcctgctggacggctctacatgcttcttgtctatcctaagagtgagaaagacagcttatcagcagcagagaagaaccagcttaaagccgtggtatccgtttttaaggagtcatag

SEQ ID NO: 194087 - DNA, 207 bp, Klebsiella oxytoca
atgaaaaataatgttagatataattgcaaagcaatattagaagagttaaaaagtgatggtgttttggattcattcgttgcctggtcgtcaagtatatatccagacatccatttaagtcagtcttgttttgaaagttgctatgaaatatataaattgaacgaaaatttttttaaagaagattggaataaaaaaataatatcttcctaa

SEQ ID NO: 194088 - DNA, 594 bp, Klebsiella oxytoca
atggaaaatgaaatgatagatttatattttaaattgcctggtcaatttataactgataatgatttagctaaaatttataaattttatgaaagtaaaatagtagttataaaagatggtgtaggaactggtaaaacgactatattaaaaaatatctataataaattaacactaccatcaaaaacagtttttattgatgatttatcattcaaatgtaataaaaaactgctaagagaaaaaatacaaaaatatattgcagatggtgtttttatatttattacaacaagttgtaattattcagtgatcaattattatttaaaacctttttttgattattccatatatgagtctgtatatcatttttacgcttttaatcaaaatatcaataagacttttttaggtttatcgacacacaagcaaacagaaacaaaagaagactgcttaaaaaaaataataaatggagaaatagatttagacaaactggatacggatataactgatatgagtatagtaaatgagattgtagcagaaagagataaaataaaattagaagaaattttaaaatcaaaacaagtatccaacaaaagaagactataa

SEQ ID NO: 194089 - DNA, 474 bp, Klebsiella oxytoca
atgaaactttttaaaaaaactattcaaaaaaacaaagatagaattaccaataacggaagcttccagatattaaaatatttcttttatccacagaaaagagaagaaagaaaatatagtggttttgcagaagcattagctgattacaacactgatgaagcaacattgcaaaagagttaccgtaatttttgctttatggcttatatgtggggatttgctttcttagcaaacctattttatctgttaatgggtttatttatagacggtcaatttcacgcaagtaatttcttttttggctgtatctgctttgggtgctggtttaaaggtgctggctatgcttactcacttaaatatcacacattagaagttataaaggttttaatgtctcctttagactggttcccagacttcactcacaaagtaaaaatggtttacaaagacaagccagtatcaagagatatagacattagaagataa

SEQ ID NO: 194090 - DNA, 294 bp, Klebsiella oxytoca
atggatataatcttaacaattttcgtatacataccagccgtattgttttatatattgctattgagtgaactatataaacttatattaaaaaatatcaaaagaaaaataaaaaggaaagttaaaacagaaatattagatagtttcaggaactggaaaggtactttaaacgaattcgaagaagaacttgaaacttcggttactgattactttgactttgacaatgacggtttaacaacagcagaaataacagcaagtgatttagtagcatatgaagacaatagaaaaagaaaataa

SEQ ID NO: 194091 - DNA, 660 bp, Klebsiella oxytoca
atggaaaatcaagtttttaaaaatctacaaatcgcagtatttagagaacaactaatgaatataaaaaatcataataacattattgatattgtagaaacgatgaaagataaagtgtcttttgatattttagtttatcattcagttattgcttatatgtcaaaagtcgaattattagcattacaatacagtcattacattgaaactaaaaaatcaataacagacagtattaaaaatgtcagggagtttatttgtgcctatgaaaagaaaagacaaaaaaaagttaaagatatggactataacgaattaaaagaaagacagaaatataaagaattcaaaagaaacattagcttaatagataatatgtcagatctatattcaggcaatgataaagagttttatcacgaaatagcagagcagttaaaaagatacgacgacttaatttatcatttactggaacattcagactgtaatttaacggacgataattttatttctttaatcgaagatatgaaaaaatttaaaggcaaaagaaaaatgagcaatgaaatatttgaaagtttgcatactaaatatataacaatactttcagatagagttttgcatttagtttttgaaaatgaagaaccgaaattaaaaaacaggataaaggggagggtttaa

SEQ ID NO: 194092 - DNA, 2268 bp, Klebsiella oxytoca
atgagaactaaaaataaaaactatatatatctattgtttatgttgctattcgtaatgacacatacacaaaccgcacaagcatttgatttattcgcattaccagaagaagatctaatgaataaatacttttttgaaccattatttggggacaatagtattctcggaccgttatttgcaattctaaataccggagttctatcattaggtggagttctctttatgtataatatgataattatgacagagagagcagcagcaaaagctgataaacttgtaaatagccgttggtattttattagattaccgatcgctgtggctttaatgcttccaatacataatggtttctctggtgttcaaacaattgtcgtatggtctgcaaagcaaggagtagggcttgctacacaagtttttaatgcagtagctgtaacttcttttgaaagtgctttatatatacctccaaaattaacttctaaagttgaaaaagtagcttacggaatgtttataaataatgtttgcgtaaatgcatttaataaagcaatgcagaatgtcgaagccccaaatataatttttaaaactgaaattaataaactcggtctaatggcaccaaatccagttaataataattatttcagttcaattgattactctttcaaaaataaagatagaaatgtttattataatgtaaattcaatgtatcagccttatttttgcggtagggcagttcaaaatctaaataaaaatacttctgtaaaaaaattaatgcaaacagagtctggaaagatgttaaatgttgatgctgcattaactaaactttctcctgtccaaacaaatgaatttattagtttgcaaaactcaatgtttacattatcacaaagttttttagctggaagtgaaaatgaaagtagtgtttataagcaaatacaaacagcagctaatacttatcaaacaaatatgtctactgctgcacaagtcgcttttctatcctctgttaatcctgattatattagaaatatgatgaaagacggtattcttatgttcggagcatatccgaaccaaataagtgcagccgctgatcaggttacaacagctttaaataatttaccaacaataagctctccaaaattagatggtattcctgaattctctaaaagaaatgtagcagaagctattgttgatatagagacagcagagaaatttgctaaaaatggcgaaatggcttcaaaatcaggtgttcaaaatataggagatgcaagagctaattcttctgttgctggcacacttatagcctggtttacacaagataataatttaggaataggtaacgatgaaggtgcaattgcttctaagaatttacttttagcagtcaaaaccgaagggaacaagcttatcaatgcagcatgggcttcttttgctgctgctactggtttcgcggttgccggtggtgcagcttcaagcaatataatatcaagtgtcgtaggagccgatgggggctttcaaagtctaatgcaaatgctaaccccagtctttatggctatcttcttcactctgttaggtgcaggtatcacattagccgttgtaatccctctcatggtctttatcacctggggtatggcaatcattcactatgtcttagaagtctgtcttgctgtctgtgcagctccattctgggctttaagtcatactatggacaaaggggatggtttgataggaacggcagcaaaaggctatacagagcttctttctctggtttcaagaccctcactaatggtaatgggtggagtcttctcaatgaagcttttatcagcagctaatgcttattttaatgaaggttttgcagcagtatttaatctttcagtaatgagtgataccggaggaacaggaataactttattttgcggaggtataattgtttattcattaacaatgcttgctctaactaaaaaattaatttcttgtataactatgtttccagataaatttatgacatggatcggtggtgcaactggcgatatgtcttcacctgttaaagatattggggcttctactgcaattgcagccggttcaaccgtagcagcaatgaaagtaggcaatggttctaatctttcaaatgctgttaaatcaatcaatggaggaaataaaacaccacctaagagcccagttaaaacaccagattttactaataataattcaagttctggaaaagaaagcaatgctgaacctaacaaacaagcatttaagcatttaaaagacctaaatagagataattaa

SEQ ID NO: 194093 - DNA, 705 bp, Klebsiella oxytoca
atgaatatagaaaaagaattagaattaagaaaaaacattataaaaatttctgtcaacagtccaaaaggtggcgtgggtaaaagcaccagttctttaatattggcttatttcttcgctaagattgctaataaaaatgtaatcattgttgagagagatccacagggtacttgttcactcttttatcaaggtgctttaaagaaaaataaagccgtctttaaagtcgttaaagagctatcaaaagaagatattgaaacagctaatgtaatcatatgggatcatcgccctgaatgggatatggatgttatgggggatattgtagtagttccttatcaggcaaacggcgaaagcattttcccgactgttaaggctattaatgaatttaacaaaatgggtaaaaaagttttagctttcgcaaataaaactaagccccgtctttctgcacttgaaaaaaatgtaattaatactttctttcctgaaagagaaaatcataaaacgattatcgttcctgaacgacaagcatatccaaatgcttatattaaatctactactgtatttgacgaagattgtggaattccattcgctgacaaagcaaaagatgaattttatgaagttatccagggtattttagatctctacactggtaaaagagaaagcgataaaatagagccgtcaaaaattgctgaaataaatagttcagaagattga

SEQ ID NO: 194094 - DNA, 321 bp, Klebsiella oxytoca
atgacagacaaaaaaacagacttattagaacaaataaacagactgacagaaatctcagacgaagttatttttaatgagagtaatacatattttgattttactcttaaaaataatgacagtaattctgtttgtgtgattacagatgcaagcattaaagagcatagtcgcaagctcttagttcgcattacaaaagacttagacgaagcattagataaatatacgatgggaacaaaaggggtttctatcgtcgctctcgctgaatgggctttaaaagaattaaataaaagaaatgaaacattacttataaaaaataaggaataa

SEQ ID NO: 194095 - DNA, 1965 bp, Klebsiella oxytoca
atggcgaatgtaacaatattaagtaatttactaacaagcgattttagaaaaaaaatatcagaaggtggttcacctgctgttaatggtgatcccagcattggtgatcttgcttcttatatggaccctttcactggcaataaaattacagcactaaatgctgttgaattggttcaaaaattagatgagcaagggatagatttacctgaaagaaataaaattgctgcaatgcaaggtgataataacttttcgtttggaaaagaagaagaaagaaaagaatttaatacaagaataaatgctccaatttttgaaaaatttatcaatactcttattgataaaggtttagtagaatttaatgatcctaatttctttaaatcttttattaagcaatcttgggaagaaaaattagacaaagattttttcattaaggcagaagaaaaagggttaatgtcattccctggcgaattagacaatgaatataaattagaaggtgtaaataaattttttgctgtttactctccgaaattcgacgaattaaaacaaactgaatatattaaagcaattcgtccgcgtgctactcctaatatcaaatatgaatatactcagattggctgggatttatcacagtatggctcggaagaaaggcaacttttagcaaataatataataattggaacattagaacaccctgatatgactttccagggtgatcgtgttgttggttataggtctgttttagcttatccccgtcatgtagaccaggaaaggggggcacacggtcaagcttgggttcacccaacaaccctatatcactatgatgataatggcattaagagaactttggttcagccattaactgatattaatgatagtaaaggtcaagcggctatactcgaagctatcaataaaaacttaaaagctgctggcttgccagaacttgccactattcaatctaacagaataaataaaggcactgatccagaagcccacaatcaagcaagacaagcggcatttactggtaatcttccagaactaccaaccattgaagatactgatccgggtatgaatactgctcaggctggcgactattacagacgaatggaagaacaccagacaagagaattagctgatttgtttgcaagacagaaagcattggtagatcaaattaatgcggcaaaagctgctcgtattgcggttgaaacaaatgctattttggaaaatgaaaataataaacttttaaaagagttagacaacaaaactaatattattgaagaattaaagtcttcccataaagaagaaattacttctttaaatgaaagtcatagcaatgaaattcaagcttacatcaaaaagaatagtgaacttgcaagtgaacttgcagaacaaaccgaaatagctcaaaaagtacctgaattagaaaaagaagtttctggacttgaagaagataatacagctttaactaaaagtaatttatataaagcaaggggctttgatagacttctaaaaattgcaaaagcaattcgtgatactttaaagaatgaagttaaattgcttaaagataaattatttaaagtcgaagaagaaaatggagttttaaaggagactaataaagaattggtttctggcaatgctactttaaaagccgataatgataaattacaaagtgaaaactctactcttaaaagtaaattaaaaaatcaaacggaaacagatcttgaaattgaagctcttaaagaagagaacaaacttcttaaagcgaaagctacggaagcagtgaaacttaaagtaaaaaatgctgaattaaatatcaacattgatactcaacaagaaattatcaaattatatgaagatacacttgttgagaaaaatattatcaaaaatgaagaccgtgtaataccaaaagaagaagaaccgaaagcagaaaatgaaaatgaaaatgaaaataaaggtaaaagtcctaaattataa

SEQ ID NO: 194096 - DNA, 684 bp, Klebsiella oxytoca
atggatttagaaaaattaaaggctttaaaagccaaacttaaaaccactgatacggaggctgggggggaactcccagcattacaggatactgtaatagaagaagctaccgacgaattagtttattatccagcggcaacagtagaagaagcccgtgaatttatggcgggtagttttaaatttatggataaatatccattgaatgggcaaattagccgtattcaaaaagtaaaagataaagaaaactacaaagaaccaaaaataaaaaactttggtactttaaatattcagtttgataaaaacgaacttttagtttcttgcgagcaagattttaaaataaaatatatgcaggacttccagcattatttttatactaatttaattgaaaaatggtataacgattgcggaatatacataaaaggcactgacaactttatagtttattccttaatttgtgcaattttatcacaaagaaaaatatttcctttgttttgtgatagaccattattagaaaaagcattagaaaaaatcactgctgattttaattctaagcaaagttatatatctgaaatttttgacatacaagatcgtaatgttatattaagaagaaaaaaaatatatatgcttgctttcgagtcagcagtaaaaaataataaaactttaaatctaaaaaaagagtttgtataa

SEQ ID NO: 194097 - DNA, 2124 bp, Klebsiella oxytoca
atgactgacaaaaacgaaaatatagaaatacataatcagctatgggctgaattaaaatctggtcttcaaattaaagcggacggcttctggacaccagagaaagacggtaatagaagctgtttccatccatttggtatttgcccgattgcagttacaaaagccattggtgaaaatggtaaaactgcttttacttctattcgtgtaaaatatagagcgatttctaccgatctggaaggtaatccagaatatgaagaagttgaaataccgttagaagattttaactctttaagccataaatacttaaaaaactatatgccaccggcaaaacaaaatactaaaacgactattgctcaatgcttgcaggaagttttagcaaatccaaaagaacacgatataaaaacaaaacaggcttatacttattgcggctgggttcagttaaaagataaacaaggtaatttgagatggaaacatattcgcccaggtagtgatatgtttgcaactactgccgaagaagataatgttgctgataactcaggaacggctggaagtgaagctatctataaagaaatacaattaaaggctatgagagcaagtcttctttatgcctaccttacagctcactattttggtgcttatgctaagggtatcattccccgttctgctgacttctcaccaatcatttacataaagggacagagatccagaggtaagactaccttcctgttcctgttaggaagccaccagggacgaccagacaagcgttttactgtctttgatagtaagtctaccgtacaaggcttacagaggcttatgccgtggtttaaacacggtggtttttgtctcgatgagatagacaagtttatgaacgacagggacggcatggaaaacctaatggcttatgctaacaacggtggccgtgtcgttgctcacaaagataaaggggttaaattccaggatacctgggacattgttatcttctcaactggtaacactgatatgactcagcataagaactttaaagaagacggtaaagcaggggctgtattatctcgttttgatattcgagacattggctcaaaagaattaactggctttaaagtggaaacagaagaagataaaaaagatttagcctcctttgtatctactttaagaaataattatggctggggttatcagggtgtagttaaattattagaagaagcagagtttgaagccgaagtaaaaagaaataatggggatagttcggctatatctcgttatcacgaagtatataatagtttctttgacgaaatttcagaagataaagaattacattcaatcgacgaagaaaaaagattgagtgaacatttagcatttgcaaaagtgggtgctgaattaatgaaagattattttggtgaggaagcctgggaaattgcaaacaaagcaattcaaatcgtattagacgaatatagaaccgcagttacagaacacggtgacattgtatttacaagagaagaaagagaagcattagaaagatatgaagaaatttttgatttcgtaagtaataacacaggtaattttgtatgggaaaattatgcttttgataatgaaataagtcaaaaacaaaaagctgaaattctttcccgtgaagcaagggaagggaataataaagtttatggaactgtcattcaaaataaacatatgaactcaccacgcgatttgttaggtgaaatgtatttgagcagtgacggtgaaaaagcttatggtgataataaaatacagcaattaagacaagatttatcaacattaggtcttttagtccaaaaaactaaaagaagtggtgaagttgaagatcgtgttgatattagtaaaaatgcccgtagtgcgtggggcttttcaagagctttaagatttaaacttattcaccctgacgaattcgaaaaacaaagaagggacgaacttagaagacaagctgaggctcgttcgtgtgaagaagaattaaagagaaaaacggctctggatcagattgaagatatttttagcttcaataatttaagtgaagaagaagttaatttaaataaaaaatataacagtgatctaactttcgatgattatgcaccttatgataatgattacgataattaa

SEQ ID NO: 194098 - DNA, 210 bp, Klebsiella oxytoca
atgactatcgaattacaactttattcaatgctcgtaattgcttctttatttttcacctttaaagcaattgtatcccgtaaaaaaacctgggcttttgttagtgctaataatgcagaaatgaccaaaaagtataataataaatttttcacttatacagtaatcggtattttctcttggtttattacagtattagcaacttcttcaatgtaa

SEQ ID NO: 194099 - DNA, 1113 bp, Klebsiella oxytoca
atgattagaaaaggtaacataaataatgcccttcaaatgttagaagggcatttgaaatttttagaacaaaatacaggtttaactaacgataataaaacagaacattttgtttttaatccagataaagtacttgccaataacaggcacttcatcgcggaaactggatgggaagcacaacctgatggtgatgcaacaacagaaggacaatccttagcaatacttggtgctatctatgcataccaggcaaccaaagaaccccactatctggagctggcaaagaactactttaacgggtatcacaatgcgttctacagaggggtagcgtttccagatccacctgatggttcactacgctgtaactggatatgtaacggaaaagctccggtactggcacactacccattagatccagagtacccaactcatggaggcttcaagggagtactgtttacatggacgaacggacagacacagataccacacggttctcctaactatggcgagtacctcgatgctgtatggttcgcttttcctgaacgtgcttctttaggctggaatcaggtaaacgctactgtatatgcgtgggattcagaaggttcggtagactggaaaaccaaagcacctacatacaatgttgattggatcgttgaccgaacaggccgcaaggtagatagcaatggtgatgtactggcagaagggctaacaagccagatcggtacagtccagctcaaggatacttccatcaacggtaattaccgcttcaactatgcaacacgtaaccccgtagaacatggcggttatctgatggggcgtaatgaacgttggcacaacaggccagtacatgtaccgattgataactatggttcctttgatttcgcagataatgcatcagatgctgaattgtggttctgtcaggcggcaaaactactatgggatatcacaagtgagcgtaagtactggttagcctggcaaaactcattgattacctgtattgggtactctgatatagataaattcgataagttcttccgtaaatctaccgcagctactaccccattcaccgacggtatctcatacgattatttctatccacgtaatcagaccgctacttag

SEQ ID NO: 194100 - DNA, 1689 bp, Klebsiella oxytoca
atggctcaaacatttttagggaatctaactacggtatggattaacaccgatgcaacaaacgttgatcctaattcccgtaacttttcccaagtagaaaacctttcaggatttccaagttttagtgaatcaacaactatttcaactgtagaaacatatgatagtactttcacctcgaaagtagcgggtgatagttcatacggtgatatgactattgcagttaactataaccctacagagcattctgaacttgatgcaattgttgactcacagcagttagtacaggttaaggttgaaatgcttgatgaaggtactaacgatacgtcggtgaactatgtgatgtacaacggctatctatccaaagtttctgactcatcggatattgatacggtagttacccgctcgtatgtgtttactccagaaacacaggtagcagcaggtatccttgatgaatctgtagtaccgcttaaccgtggtgattggggcgtaggttctaacggggtagagttccccagctatcaaggccgtgacggtaactcattcgttaagatcccagcggtgaactcaccatcaggcgtagatatgttgggtatcactaaccttgacggttcgaacggtactcaactggtaatgaacaaatccggtactccggtactaaatttccgtaacttctcatcagcaagtactggtgcatggtacaaggtctacaccactgccgataagcctactttgtcagaacttggtgcagcagcggctacggatctcaataactacgtaccgattacccgtaccatcaatggcaagccattaagcggaaacatcactcttgtagcagcggatatatctgatgtgtactcaaaaacgcaaaccgataacagctatgttcctaaagtctttcagttaaacggacacgcactatcaggtacagtgttgaacctggtagcagccgatattttagatgtatattcacagacgcaggttaatacaaactttgtagcaaaaactactacagtaaatggattagcattaacaggtaatattactctaacggcagcacatttaacggatatggcaagcctaagttatagtaatagtactttcgttccaaagacgttcttaattaataacaagccattatctggtactaacattcaattggtagcagcagatattagtgacgtatattcacgtactcaggctaacgatctctttgcactacgtattactactgttaacggttatccactaagttctaatgtatcactaaactataatgatgtaggaacttattcgaaatcacagattgatgtaaaggatgcagcactacaggcaaacattgatactaaggtaactattactcaggatttattactactaaataccgtaacagacacacttagtcttgatatgtcagatggtaagagagtgttctcagcaacacttacctctgcaagtactcaattaagtattatcaatgcaagcggtagtactaagaacagtcaaagcatcacggtatatctgatgcaaggcacaggtgctaacaaaatagaatggccttcgaatgttaaatggtcatacgggcgtactccagtattaaccttcactaaagattcagttgatgtttttcaattcacgtcaatagatgggggtagtacctggtacggctccttactaatggcggatcttcattaa

SEQ ID NO: 194101 - DNA, 438 bp, Klebsiella oxytoca
atgttcacggcagactataaaatcaggaagtacttaattaataaactctctccggttactaatttacactttccatcaaaagcatcagtagatgatattactgtagtttatattggtgattcttctgtactacgtactcaagtatctaaagcaaacacagttattaataatcaaattgtgccatcaacgattagaaatttatgtgaatttcgtgttgagtttgtgtctgtcggacaatcatataaagaagcatccgatgaaattgaaaaaatacttgaagcaatttatatgcctggtttctttaatgacttaaaccagcaacttccaatgccattattcaatatccgtattgaagatagcctaatgacttctcaagccgaagcaacggaaaccgcttatgtacacacgcaaactctatcttttagctatggggaataa

SEQ ID NO: 194102 - DNA, 300 bp, Klebsiella oxytoca
atgagagcattttttagtaactcacaatcagagtcactacttaatgcttttggtgaaaagctcgtcattgttcaagatggtgtatcaataacgattaccgctattttcgaacaagacgagctttttttcgatgatagtcaaactactgtgacatattttagtgctaagtcaggcatcaaactaaatagcaccttcaaaatcgataacatcgaatacgtagtaaataggatagatgatgatacaagcggtatctctaattatcactatattcgcaaagtcgatttagaagaggaaatataa

SEQ ID NO: 194103 - DNA, 1830 bp, Klebsiella oxytoca
atgaagttcaaaaaccagacgagggaattaaccttaccaacggcgattaattctgataatcgtaccgttgaagttgctttttgttctgaaactcccgtagcacgtgaaatagaaggaaagttatataacgaagtacttctatgtaatccagaaaatgtagacctatcgcgtttgaataattcaggggcagtactttttaatcatgaccgagatcatttgattggcaaagtactatcagcacgtattgattcagataaagtaggtcgtgctgtattacagatttccaatgcttcggaaaaagaatgggaacaaatcaatgaaggcgtattaacacatattagcttcggttataccgtaaatgattaccgtattgaaggtaacattatctatgtaactcatttcaccccatatgaaatatctcttgtaactgtacctgctgatgtatcggctggtgttggtcgttctttgataaataaaaaagaagataaccaagaggatattaatgtcatggatgacaatcaagaaatgatggaggagggtacagaggaagtacaggaagaaattaatgaaactcctgaacaagaagctgctgaatccgaatctgaaaaagtaattactgacgaagaacttttagaaattatttctaatcgtcctgaattacttagcaagatgttaaataaaagcgatgttgaagaacaaagcataaaggattctgaaactaaagaatccgattctgaagaagtaccacaagaaagtactgatgaagaagtaaatacaaatgaactggaacgtaagcgtgaattggaatcaatcggcaatgttctaaaagttgatgtatctgaagccattgagaaaggaatctcggttgtggacttcaagcgatcactaaatacaaaacaaaatccaaatgataaggaaatcaaaatggaaaaaactgttcttaatggcctaattcgttctttaagtgaagggagttttacaggcaaaactgaaatccctgcgggtgatttcgttcgtacctcaagtactgttggtggtgctgctttaatcaaagaagtttatgcagattcatatatttctgttctacgtgctcaatcagtatttgctggtttacctgttcaggtatttgcaaatcttgaaggtgaagggaatctggtactaccaaaactatcttctgatttcactgataacttcggttatgtaacagaaggtgctccaagcccgtcatataacgcatctttcgaaaagatcactctaaaaccagagatcttcactggttctgttgaactaactcgtactcttatcaagtctgctaatactgctgaacagtacattcaagatgcaatggttaagggtgctgctcttaaactggaacggctaattcttgctgatgttgtttctaaggctccatcaaaatctttaactgctgctcttactaaggaagatgtgattgatgcacttgcttctcttgccgcttcaaacgtgcgtgtagagaacgttgtagctatcgtacatccttctaccgctgctgttcttcgcaccactcttgatggtgctaataccagtgccaagtaccttctacaaggttacatgggtgatggcatcctggctgattcagtacgcttagttgaaagtactcaagttgccgccggttctattgtgtttggtgattggtcaaatctggtacttgcacaatggggttctgtaactatggatcgtgacgataccactcaacgtaattcaatgggtattgtgctacgtactttcagcttccaggcacacgcatttgcacatgatgaagcattcttagttttaaaactaacaagctaa

SEQ ID NO: 194104 - DNA, 1494 bp, Klebsiella oxytoca
atgtggtttaaaagaaaaaagtctgatgtacaaccagaagtactaacaaagagaactgaagtacgtgaacatgctggcagaacactacaacgcgatctgaatcaaataagaactacaacaaatggtattaatgctttcagctttaatgctggtgttaactcagtaagtattaacaatctcattaaatggcatttggcagaatggcgtaatgaatcacgacaatctactttaacaaacccaatcgcacgtaagtacatgatgctttctgtcgatggtgtagtaggcagtaatggtatctatgtgaaaccctcagttgaacttgatattgatgaaaatgaaaaacatcaaatcaatatgcaacttgaaaagctgtttgatcgttgggcttatgatccaagtcgttttagcctcgataactcaatgacgtttgacctctttactcagactcttgaaaaacaccgtgtacgtgatggtgaagcctttgtaagaattcataactttaatcgtaccatcagattggaaatcattgattcagccagactaacacaactaaacaatgcattactcagcaatggacgttatatcagtaacagtattgagttcaataaatacaatcaaccagtgaattactattttgctaaatacaatccggttacatatacatacgatgcaacaagctatgacgtaattccggctactgaaatcctacattattatgtggcagatgatgcaacgcaaaatcgaggaatccccgatcttgttgcaagtactaaagttctttcagatttgaagaactttcaagaggcggctttattagcaaagcgtatttctgccagtgtaactacattcattactaatagcggaaacaacgaactttccctgaatgaaagtgaacaaagtactgctatctacaatgagtacttagagcctggtgctatttttgaattaggtgcaaaccaggatatcaaatctgttgatcctcgtaatggtgttgatggtattgccgaatttactgatgtattacttgataatatttcaatgggcttaaacgtcactaagcaatccctaatgggaagtactgctgatgcttcatttagtgcggctaaattagctgaacgtcttcaggctactacattctcaacacgtacaaatgtacttattaataaagtactgaagccaatctattcagcatggttaaagaatgaaatgctaaataataataagttaaatctaaaattctctgatttcgatgatcttgtttgtgctcgttatattcaaactaaaccaatctcacttgatccattaaaggatattcagtgtgaagtggctgctattgatgctggattgaaatctcgtacacaagttattagtgaaatgggcggtgatccgcgtgtcgtaatgcaagaaatagaaagtgagaagaatatgaacaaggaagttcaaaatgaagttcaaaaaccagacgagggaattaaccttaccaacggcgattaa

SEQ ID NO: 194105 - DNA, 543 bp, Klebsiella oxytoca
atgacaattttaccagaacaaatttatatggtatcaaacccgtatgagtactctgtaacgattcctgcaaaaacaattttcgtcatttcatatgttagtactggtcaatctgtaacacttgataatcaaagtagtgatgttgaacgtgattttattatcaggtttgatattgctatttcatcagaaaaactattctgtactcagattactgacggtattgttggtacttctcaatgtgaagtaattgatccaactaaacatactgccgaatacgcacgtgtaaagacgatgatcaatgaaattgaggcagtaattgaagcgaaaatccaaggtggtgctaactatagcattacaattaataacaaaacattagttagtgaaagcctaagttctttagagacaatgagaatacgttatattgaacgtgctaattctctatgggctaaaatgaatggtcaatctacatccggttcaagtaaaccatttaagagtatgactgtattccgagatcctaactatccaaatcgttgggggactcgataa

SEQ ID NO: 194106 - DNA, 1887 bp, Klebsiella oxytoca
atggacagcaagaagaaagtaacaaaactactacagaaagtactaccgacgatacaaccaccgatgatacaaaaaacaagtcagtggatcagtaatggtgtagttaagtttgtagatggcccgaatatggggcttgattggattccatttagttttcaacgcgagccaatggatatagcacaacatagaagtactaagaagatcgtacttcaatcatgctcgcaacttctcaagacgacagtactacaatcaatagcatttaacattatggcaaatgatccatgtaactttgcttttggtagttgttctgaatctgaggtaaagaaattcaaggatggcaaatttttaccagcaattgaaacgagtgatgtactcaagccattagtaacagataagaacgataagaacgccgctaataatgcaaaacaaacacagatggttaacggtactttcatctattggttgaacctcaacacgccagggaaccttcgcggtatcacaacacgtgttgtcctgttagatgaggttagtacctgtgaaatcaccgaagaaggtaatccaatcaaacttgctgaagcacgtacaagtactttcggtgatgatgcgttaatagttatctcaagtaccccattatataaagatgatttgattaactcagaatataacctcagtgataaacgccgttggtttgtcactcatacgtgtggtcatgaatatacttttgagtgggaacaagtagcatttgaatttaagcagttagaaaatggtcgttcgataccagacagtgtaactactcgtttaatatgcccgtgctgtgaacaagaaattgatgaacatacacgacatcaaatgatagataacgggcgatgggtcgcaactaatccagatggtgaacctggtgtagtaggttatcaaatcagccgtatgtattccccattgaatacgattactgaaatggtaagtaagtttgctgatgccctttataacttcaatctacaaacattctataacaacgaacttggattaccttatgaggatgaatatcaaaaggaattggatattctccaattggaatcactacgtgaagatgaatttaacctacataaaatccctgaaagtactttaggtatttgtatttcagttgatcagcaaattgatagatgcgaagccactatattaggctttgatgagaagaacatatatgtacttggtcacgaattcttctatggtcacgatgtaactaaaatcgaatcacaagcctggaaagaccttgatcagttctgtaggcaagatttccgcacggtagaagggcgtttagtaccaactctcgcggtattcgtggacagttcgaatggtaacgctactgatacggttaagaagttcacagcacgttgggctaagtaccatcctattaagggttccagctccactactggtgatctcttcaaggaatcaacacaggctggttacaagctacagatcctaaacgtgcatgatcaaaagaatacgatacgtaaacttctaaatctgatgcttagtactgaagcagacaatgcacctgtgaagctccgctttagtagttcattaccaactgattattttgaacagctttcagccgaagagttaaaacctgctggtggtaaattagtatggcgattaaagaaaggccagagaagaaatgaaagtcttgattgtctttgttatggtcttattgctattgcctacgctcaatctaaattaggtaatcaaccatttaaaaagttacgcgaatataaacactctgaaagtaataacaaaaacaaaataaataaaacagaagaaccaaaaaatacacctaccagacgtagacgtactggtatgggttctaattggttcggcaaaacgtaa

SEQ ID NO: 194107 - DNA, 456 bp, Klebsiella oxytoca
atgattagtataagccagatatcgagacagtacggatatgatgaaagtactgtgagagaatggaaagcgaaaggtatgccacatggtaaaacaattgacgatgctatcacaatatcatggatagttgaccatattattaaaccattacgtgataccgatactaaagagcaaattgaaaaagaacgcctacgtaaattaaaggcagaagcggcactatcagaattagaactacaagagaaacaaggtttagttgtaagtacagaatatattgagcaagtactaacggaatacctatttcaagttaaaaccgcaatgcgagcaattccttctaaatcatacttagagttattttctcaaacagatgccaaggatttacgagatatattaaaagaacatattgataaaacgttatatcaattaggaactatggaatttgaactgccagaggatgaataa

SEQ ID NO: 194108 - DNA, 570 bp, Klebsiella oxytoca
atggtcagcaggaaagaagctgcggcaggcggccgggtaaaccgtcagttcgtggcagagcgtcccaatcagctgtgggtagcagacttcacgtacgtgagtacttggcaggggttcgcgtatgtagcgttcatcatcgatgtgtttgccggcggcatcgtgggttggcgagtgtcgtcatcgatggaaaccacgttcgtgctggatgcgctggagcaggcgctgtgggcccgtcgcccttccggcaccatccatcactcggataagggctcgcagtacgtgtcgctggcgtacatgcaacgtctgcaggacgcgggcttactggcctcgacgggcagctcaggcgactcctacgacaatgcgatggcggaaagcatcaacggcctgtacaaagcggaggtgatacacagacagagctggaaaagccgagcagaggttgagttggcgacgctgacgtgggtggactggtacaacagcggccgactactggaacggctcggtcacatccccccggctgaagccgaaagagcgtattatgcttccatcggaaacggagctatggcagcctga

SEQ ID NO: 194109 - DNA, 1950 bp, Klebsiella oxytoca
atgagtgcaattaacgaacagacgaaatgggaagatgaggtttacctgctggcgcgtgaagaccgggtggagggcggcatttatggtccgtcaaacaaacaggcccggcagctggcgaaccgtacccgctatttaaaaaccgccgttgagtcgctgcaggactaccgggattacacctttttcatgaccccggatgacccggacggcacccttgcggggcttgccggtacgccggaggggaaactctttcgcgtggtggtgcctgacagcgaggggcaactgctggcctttatctattaccagaagcgcaacggccaggcgaaccggctgaatgcgctggcaagtcagcaggcgattacgtccctgcgacagcagctggagcaggacaccggcgcggcgctggatggcctgaccgcattgcagtccggtctccagtcgctgacggccgccctgatgcagctcggtctcgatgagatggccgcgcaggtgaccagcatggccgcctcgcaaaaaagccagtcagaccagattcaggccctgatgctggcgtttcagtccggtatgcgggcgctggctctggtggaggccacccccgaggaggtggaaagtcatcagttgagtaacctctatgccttccaggtgctggcccgtcagcttctcccgctcgacggcttcgacccctcagcggcaggcagcggcacgggaaaccgggaggcgcaggcgaaatatccgggcgtgtttgccttcggtgagccgcgcggtctgattcgcctggacgtgacctccgacagcggcgcgccgaccagcaaggacaacccggttaacggcaccttacaggtggacgtcgacggggagatgttcacggcatacgtatccttcaaggttcagggggcctcgtcggcagggtacccgaaaaagaacatgaaattcgagctgtttgccgacgcggcacataccgaaaatgtcagcctgaaaatcggcgatgtggtgccgaaggataaatggattttcaaggcgaactggattgactcgacccacctgcgcaatgtgctctgctacaacctgtggcagaaggtgatggcgacccgcagcggctggccgcgccgggatattgataacagctacgtggggaagctgggggccagcgccattgataccggtgccatcggctgcccgaaagggtacgcctgcgtgctgtatatcaacggtgagttctacgggataggggattttctctacaactcgtcgcgcaaggattacaacatcgccaaaaacagcccggagcaaatcatgattatctgggacggggcgattaacatcccggcgctcacggataacggcacctgggtgatggactcaccgtcgaaacccacggcggaaacggctgcctgcctcgaccgctggcgggacttcgcgcagtccgcgcaggacgcgtttaccgccgccgccggtacgcatctggataaaaacaacgtggtggatttctacgtcttcctcagctttatctgcgccccggactgcgtgcagaagaacaccacgtttatcacctgggacggcacgaaatggtttttcatgccctatgacctggataccacctttggtctgcattacgccgggacgtcgattgcctatccgccagacctgaatctgtttgataacggtctcgccatgcaggtcaaccgcaccttctggaagaaagtccgtaccaccttccaggcggaaatgaatgcccgctatgcggagctgcgggataacggtctgttttcacagcgcggtgtgctggagctggcccgcgacctgctggggcgctacaccccggaactgatgcaggctgaatatgaaaaatggccgaatgtgccctccctgagcatcaccagtctggaccagatgatggactggacccgacagcgtattgcatacctggacacttttttcagctaccaacagtaa

SEQ ID NO: 194110 - DNA, 555 bp, Klebsiella oxytoca
atgttaaataacactcttattagtgagttcatgttaacggacaatataccgcaataccaaaaccaaacatggacaggtgaaactattacacgtgttgttggttctcagtactttacccttagtttcaaagttaccttaaacaagatgaaccgtgctgaactcgctaacttctacgccttatatggtcagggcaaaccgttctctatgcctcttggatggtggagtacatatactggtactcaaatctcacaggtacaaacaaccgcagcaagggcagcaggggcaacttcaattgccgtgaatgctaatacacttgaggttggtacattagtacaattcaatggacacaagaaactatatcgaatcatcgccaatactggcagtgtgattactattttccctggtcttgttaaaaacattcaacttggggaagtaatgaaatatgacaacattcaaggttcttttattcttacgccacagaacgcagcatatcagatgccaagtacaaacattattgaagtgacaataaatgcaaccgaaaacatcagaggttaa

SEQ ID NO: 194111 - DNA, 2463 bp, Klebsiella oxytoca
atggcaaataacaataaacaatcaatgatctttgaaatcgctggtgatgaatcaggactgcaaagatcattaaaaaatgcagccaatgatataggtaactttggtgatcaggctggtggggtgttcggtggtatcaatactggcttatctactacctctaaagctatgtcaggttttgcaggtgctgtaggtgtggcaggtatagccatttctgcaactatgttaaaagtacaagaacaatcagaaaaggcgtttgaagtctttcaggcagcttcactatcacagtcaggtatagtacagattcaacaggccgctaatatgttcgctgccgttggtcttactatggataacgtcgccgaccaaattaaggacagtaaggataagttgggcgatgcaataaccaacaatgctggttctatgttaactgacgtaattcagccgttgaagttgaatatgtttgagttacaaaaagcagcagaaaacggtgaagatattattgctaagatttactatcaggctaaacaaatgggatttagtcaggctcagacagtaaacatgatggaaaccgtagcaaacgatgcatcaaaacgcatgactatctacagagaattcaatagtgaacaagagtaccaaaatagccttgctaatgaaactatacaactaaccgcagaacaatcacgacaatttgaagaatacagggctgcaacaaataatttatccagagcgtgggatacctggaaaaactcaacgcttgcacctatcgcacagaacctcgctgaaattctcgacttaatgacgaaaattattaatagcaaacctgttaatgcagcggcagtagctgttagtaaagaaggtatccaggctactcaacagtaccaacagcagttccaacagcagatactaaaaaattcttcaatctatggttctcagatagtagcagatcagcaaaaacaacaagagacaaataaaaaaactttttcaaacctattagcaaatcttgatgctgcacataacctacttgataaacagaaagaagaatacaataaaggctcagatagaagtgttattgatacagctttaaaaccttatctttccgcaaaacaaaagacacaggcacagattgatacccttgatgctactcatgcacaattgcgagcggctataaaagactctttagtacgtgcatataaaggtgatcaatcggctatgaatgccgatttagctaaacttgatgaaggttataaagctaacagagagaaattagtaaaaagcctaacagccgatgaagataaagcacgtgatgctaaatccaagaaagacgaagcagcagcgaaagcagctaaggcagcacaagataaacttaatgagcaaactaaaagagcaaaggcactattagaacagacgctatcacagatcggtactaatgaagctcaaatacgtattactcgtttcaactatgaacaagaccagattgaaaagcgtatacgtgaagcaggtaaattagctggtagttctgaatctgaaattacagatatgttatccaagcaatatgaaagccgtaaaactaagtacaaagatatggttgatcagatgcttgctgaaactaacagacttaaacaggcacagaacattgcagccattgctaacgatcctaatgcaacatcaaatgctaaggcacgagcagcggcagcgggtacaacatggatgaatgacacagttagtcagggtttagggtacaaaaacccattagacttttcgccagatccagcacaggtacagcaagttaacactgaacagcaagagaatcaggatggggctaaagctctatacgatgccaaagtaataggattccaggagtaccaggatcagctaacagcgattcaggccaacgccgatatgaaacgtggtcgattaaccgcagacgcactatcaaacactttgggtatgtgggctacgggtgctggtgatgtaggtactatcatggctggtgttttcggggaatcatcagcagcggctaaggcatttttcgctgtacagaaaggtattgctattgctcagtcagtgatcaatatccaacaaggtatttcagaggcaatcaaacttggttggcctatggggattgccgcaggattaaaagtagcagcagaaggtgcaagtattattagtactatcaaaggtacaaatattcaaggtcaagctcatgatgggtgggattctctaccaagtactggtacatacaatcttgaaaaaggtgaacgtgtagtgggtaaatcactaaaccaggatttaaccaaatacttgagtaatcagggtggcagtaaatcaggtgatgttaaaattgatgcaccattaattattaatagtaatggtcaaatctcagattctgatttccaaaagatgtgtgataaacacgccgatactattgtacaggcaacacgtaaatctcagaagaataacgtataa

SEQ ID NO: 194112 - DNA, 291 bp, Klebsiella oxytoca
atggatttttcaaatctaatgaatgctattggtgtgaaactaacaccagtagaactaacaccagaatgtactgtatatatcaaactacctaacattactcaacacgtagaatgtgccgatccatataaggcaattttctattgcgtagttgatgaggatggtaaacagatttttgattcaccagaacaagttgaagaaaaagtagatcttactgtacaactaaaattgaatgctgaaattggaaacgtttttgctaaatcctttaatgttgaggatgtagagggaaagtaa

SEQ ID NO: 194113 - DNA, 1167 bp, Klebsiella oxytoca
atgaaaattactatttccggtaccggttatgttggtttatcgaatggcatcctgattgcgcaaaaccacgaagtggtggcgctggatatcattcaatctaaagttgatatgattaaccaaaagatttctccgattgtcgataaggagatccaggaatatctggcggaaaaaccgttgaattttcgcgcgacaactgacaagcatgatgcctatcgtgatgcagattatgtcattatcgctacgcccactgactacgatccgaaaacgaactacttcaatacttcgaccgttgaagccgttattcgtgatgttaccgagattaacccagatgcggtaatgattattaaatccaccattcccgttggctttacgcgtgatattaaagagcgcctgggcattgataacgtcattttctctcctgagtttctgcgtgaaggccgcgcgctttacgacaacctgcacccgtctcgtatcgtcattggcgaacgttcagaacgcgcggagcgttttgctaatctgctgaaagaaggcgcgattaagcaggatatcccgacgctgtttactgactctaccgaagctgaggcaattaagttattcgccaatacctatctggcgctgcgcgtagcctactttaatgaactggacagctatgctgaaagccagggtctgaacagtaaacagatcatcgaaggcgtgtgtctcgatccgcgaatcggtaatcactataacaacccatcctttggctacggcggctactgcctgccgaaagataccaagcaactgctggcaaactacgaatctgtgccgaataacatcatcggtgccatcgtagatgctaaccgcacgcgtaaagattttgtcgctgactctatcctggcacgcaagcctaaagtggttggtatctatcgcctgatcatgaagagtggctccgataacttccgagcttcctcaattcagggcatcatgaagcgtatcaaagccaaaggtatcccggtcattatctacgaaccggttatgcaggaagatgagttctttaattcccgcgtggttcgtgatttcgacgcgttcaaacaagaagctgacgtgattgtctcaaaccgaatggctgaagagctgtcggatgtcgctgacaaagtgtatacccgcgatttgttcggtagtgactaa

SEQ ID NO: 194114 - DNA, 1188 bp, Klebsiella oxytoca
atgaagcagtttatatattttcctttaaatgtaattctaataatgtccatcgggttattcttaacgttctttccattttcatattattacgtaacgcctgatacacttgatgtgttcttttatattatctctttgttgccgtatgttttcttctattttttttcaaagaaatactataaattagattttcctgaatcaaaaaatataacgcttcattctatttacaagattttttttatccttagtatcatctgtttcatgattgtctttgctacatcaggagtgcctatcctatcttctggagggcgagaaatgtccagcgctatggccgaaggaggcgatggggataaaaataaatttgtaaccattgttaatatagttggatattgcttcttaatttgcactgttttattctccgctgctttttcatcaaaaaaacaaatgtttttttgtctcatttatataatagctatgtctgtaattatattgtctagacagttaactatggtcagtatagttgtatttggattatgctatgtaacaagatttaaagttaatgctaaaagattttttatgatgcttggtatattatttttgatcattcagttttttagtattcttggagattatagacagaaacttcatggtgattatgttgttaactatgctcattttgtaggtgcatctacagttgaaggtgatagtatcagtgatgcattgttttggctatggctatatatagctagcccagtatataacatgttttataattatcactcctataatgagctactctctccttgttattctgtgcttagttcccaatgccaggaatatgttttatcatccaatttattacctttaacaatctcaaaattcatagggcttcctatttctactgaaaaattaatagttgagcatcttaatgtaagcactgcatatgccagaaccatacttttattcggtggatttggtatgtttatctattctataatacacattattttttatattataggtgccaaactatgtactaaagaaatgagaataattttcaacgtgtattactctgcattgtctttttttgtgattttttataacgtttttatttttccacattttatagctgtcctgtgggttattataattattagttggcttaacaaatataaaattaagtttttataa

SEQ ID NO: 194115 - DNA, 567 bp, Klebsiella oxytoca
atggatgaaccattatattttggcgcttataggggagagaacaagagtttaggagctaaagttgcggttgaaagtgttgtggagaaatcaatcagtaatattgaattaataaaaaaaaactatcctaatgcagagttgggtttggtggaaccaattcaattatttatgaatgatgatttctataactattttaaattgtataatgacgaaatgaaactacgtaaagtagatattaaatttattcaagatgatatcgtatggaataaatttgataaaggagttgttctatcattatctaataggttaaaagttaataatatttctttcgatgttattataaactccagtgtaaaagcaaatacaaactcacaatggattgattctgctaatggtaatctgagattgatattcgatcttattaaaaaaaaccagataggtgtagtatttcaaagttggaataaataccctgataaaattattcctgaatggagtcctaactctcatctgagtcaagttgttttttttgaaaagctaatgcaattaaatagtaatggtactcagaaatga

SEQ ID NO: 194116 - DNA, 996 bp, Klebsiella oxytoca
atgtcgctaatgaaaaaactgacgctttttattggcttaatggcgatggggaccacgtcggcatgggcgtactgtacgcgcctgtcgcagccgacggttagcctcgacatggttgtgggtcgggtggtggttccgccggatctgcctgtaggctcggtgatcgtgtcccgggactggaccatgtcggcgccgggcggggccagctatagctgcagcagcggcactaaccgctttgtggccaaaatcgtcgcccccggggcgaccgatctgggaaataaaatttattccaccaacgtgcccgggatcggcctgcggttcagccgcggcggggcgacggtcaatattatctaccctgacacgttctccagctacgtcagccggaccacgaattactcgctggaaggctcccgctttacgctggaggtgattaaaaccgcgagcgtgaccggcagcggaaccctggcggcaggtaagtacacctcttacgactgggagaacggcaataacccgatcctcgaaacccgcctgagcgccaacgccatcaccgtggtatcgccctcatgtaccatcctgagcggcaaaaatatgaacgtcgatgtcggtaccatcaagcgcagcgatctcaacggcgtcggcaccaccgcgggcgggaaggattttaatattgagctgcagtgcagcggcgggttaagcgagtcgggatacgccaatatccagacctctttctccggcacgctggccaccggcaccacggtgagccgaggcgcgctgctgaacgaaaaatccggctcctcgttggcgaaaggaattggtatccaggttctgaaagagggcgtaccgctggaattcaacaagaaatacagcgtcggtacgctgcgcacgcaagaaacccgatacatcaccctgcctctgcatgcgcgtttctatcaatatgcgccgaccaccagtaccggtgaggtggagtcgcacatgatctttaacctgacgtacgattaa

SEQ ID NO: 194117 - DNA, 450 bp, Klebsiella oxytoca
atgaatgacttcaaaccctttgaggacaagctcgccgggttgatagcggccctttctcctgccgggcggcgtcggatgaccgccgacattgcgaagaaactgcgccagcggcaacagcggcgcattaaatcgcagcaagcgccggacggttcgccatttgccccacgtaagcgcccgcccgtcagggcaaagcaaggccggattaagcgagagatgtttgcgaagctgcgcaccaatcgctatatgaaagcgagcggtaacgacagcgcggcggtggtggaattcaccgggaaagtacagcgtatcgcccgcgtgcatcagcttggactcaaggataagccatcccccaaaagcgccaccgtcgagtatccacagcgccatcttctgggctttactgaagataaccggcagcttgtggagtgcgtcattatcgactacctcacagactga

SEQ ID NO: 194118 - DNA, 1098 bp, Klebsiella oxytoca
atggcgtctcaacctaaaattattgagccacaaaaaaaacaattaaatctacctagaagatataaaagattaaaaagttattgggatcccatatttaaccctgggtttaacggacctactaatgtttttgactggaattccagtcaaaaaacaggagttaaaaaatctttatgtacgtcggataagcttaaagaatcgatggaaaaacttgatgttagaggatggacagtaaaaaattttagttttattgaatgcgatttttctgggagttttaattcaatactatcattcaatgcatgtgctttttcaatatgtgacatgggttctacgatatggcgaggagtaaaattttcaaattgtaatttcacacgatgctcattcacaatggcaacatttgaacaatgtatttttcataattgcacttggaatgaaataggtatctctgggactgaaacaaagttatttgatacaatcataacaaatcctgaatctttcatttctgcaggatatacaaatttggacgaagatgcgctaaagcaatatggtcctacaacgccagattaccaaattctaaggctggaagagtctaaggtaaagttagccagaacagttctgtccaataatgaaagaaatgcagaagatattgcgtattacgaatctgtaaaaatatatcttaaacaatcaattagggctaaaatatcaaaggcaacctttgaaaaaaaacagaataaaagtataataaaaaactcgatatctcaaactcttggtttctttgagcaaatagttatttcactttcgggtttgataaatggttggggtggcaatattagtcgagctgcaatatgtggtggaagtatcatatttatattttctctgttatatacttacaatatattagggatattgccatctattgcatggaagtttgccctgattaaatcatttgatatcacattgctaattggttatacaaaacatgcaacatctgctcaaacatggcaggagcagacattttacggcatcaacgccctgctaggattgtggtggtatgctatatttgtcccaactgtaatcaatagaatatgcagggtgcgataa

SEQ ID NO: 194119 - DNA, 690 bp, Klebsiella oxytoca
atggctatattaactttaaccatatatggtagccgggctcggggtgactatactgattcatctgacattgatttgtttgcaatcacagatgaagaccactatagaatgattattgaaggtaaaactaatttggcatgttacccaaaagacttggctgagcaacgtgcaatgaatggtgacttatttattctccatatttgtaatgaggctaaagagatttatggaggtggtttttattttaattgtctcaagaatgccttcaagtacaaaccaaactactatcaagaaaaaaacaatgcagccgaattggcttggtcattaatagatctaagttcaaagttcgacaatgtgctacttcttaatagaaggatagcatggtgcgttagaacaatattaattgcatcagcggcggaaagtcacgaacccatattttcaaaagaaagtctagttgagtattcaggcaataaattagttgataaattaatatcattaaaagactcatctatatttaatcgagccagcatgagtgaattggaaatgtttttgatttctttaggtttttataggccgatattacctaatgtcagtctgaatacgtaccgtgacaggtttttagtcacaaataatgaaatgggactaaaaacattaatgagtttatccatagacaatacattgttagggtattcataa

SEQ ID NO: 194120 - DNA, 1095 bp, Klebsiella oxytoca
atgataagaacattggaattcatagattggaataaattcctcgaagaaaaaaatgagcatattacattggtacttgactttgaaattgatgcggggtttagttttactaatgctgttgctttaagaaaaatgtataaaaccaattcagctgtgccgcttgatggctcactttgcgtaccatctaaattattgcgattcactaacctggttttttcagatactattgtattgcattctgtcacaatcgaatctaatgattttcaaaaaatagaaacgactgagcgctatactctgtcagctaatttctcgccttgcagtattgattatgaattgattagcttggaattgtctcgacttatagaaaggaaagggggttcttctaaagaaaatatcattatgttatatatggtgagttattttcaatctctcgctaatattgtaaaaaacaatattatttctttcgtagggctttcgggttttttcacaaaatttgtgagtggatcttataatttatattttattaaagacggcaaaccttatcgcattgttcaggagtcagggggggaggaaactgcggggcataatcctgtacacccaaactcacttgtagcaagtattattcagaaaaaatatgaggtgcaatcaaatattcctagtaacgttaagacctatcttattaagggattgcactataagttccttggtttttatgatgaaagctttataacttattataaaattgtagaaacaatatttaaagggagtgtcttcccatctattttagctcaagagatattcggttgtgatgataaaaaattgatcgccaccctcaaaaattcaaaccaaaaaaccatgatgctttttatttttcagtggttagtgtttaatgaatttcttgaaaaaaacaatgagagtagaaaagatcttatggataaactgctggcagctagtcagttgcgcaatgatatatcgcacagtgtcgatcaaagtgaagaaagcaagaaacaattgccgtttatcattttgctttcatgcgttctgatagaaagcacaatgactcatcgccaaccaataaaagtaatgaagacagaatag

SEQ ID NO: 194121 - DNA, 321 bp, Klebsiella oxytoca
atgaacggcggcgcgcaggcttttcgccagcccgttaaagctgaccggtggctcgaaccagcggccgttattgacgcattccacgtaatccagaatatcgcggcggtcgagcaccgcgctcggttcaccaaaggtaaacgcctccactttctggggcgcgctgtctttcatgttgcgcgggcgcttttgtggctgcggcttgcggcctttgtatttactcatcagttgaactccagaatggacgatgtggtctggccgctgccagcggtaagcggttcgtttaacagcgcgtgcatggtcgcccaggcgacgtccgcgtga

SEQ ID NO: 194122 - DNA, 381 bp, Klebsiella oxytoca
atggccggttttcagcgcgtgcagcagcgcctcgcgggaaaaataaaacgtcgccccaatctggcgcgatttcagaatgtcgcgaatgcggtgctcaagcccggcccggtgccagcggagctgatactcgaaagactctgcaaagaaaatctcttccagtttctcgatagcctcgtcgctgaaaaagttctttgtcggctttttacgttcgcctttgttgcggttggccacgcggggattcaggtcagcctcgtttccggtctggccgtagcggttaatccgcgcaaagcgctccatctgccgggccagaaaatcggcgaccttgaaatcgtgcggcgtcaggctgggtttcgcataaagctggatcagccgggcctctaa

SEQ ID NO: 194123 - DNA, 426 bp, Klebsiella oxytoca
gtgccggtactgcgtaccaaccccgatatgctgcgcgtctttatcgataacgggaataatgcggcaacgctggcgcgctccctgtcgtatgaaaagcggtacacacttaacatcgtggtgacggatttcaccgacgatattgacctgctgtttgtgccggttatggcctggttgcgcgtcaatcagccggacatcatgacaaccgatgaagggagaaaaaaaggatttgcctggtacgctgacatcaataacgacagcagcctcgatgtcagcatcagcctgttgctgaccgagcgcacccttgtcaaagaggtcgacggcgcaatgtacgttgagaacatcccggaaccgccaccgccggagccggtggtgcgccctgttgagatgtggagtaatggcgagcgggtgagtaaatgggatgaatga

SEQ ID NO: 194124 - DNA, 1122 bp, Klebsiella oxytoca
atgaatataaatgataaaaaaatcataaacatcctcttggaaaactataataatttaacatggactgatgttaatgctttaatagatggcttatcggatacaattaaaccttatatatatcaaagcataatagacaacccaacaccaaaaatcaagtcaagattaagagagttgctaagtaaaatagagaaaaagaaaaagaaaaaaataaagaaagagcaccaatataaatgttgtcattacaactgtactgaaccagctatacagtcgcatgtcatttcaaagtcagccgtattagcaccgttagctaatgctagtaatgaaatgtattacttcgcatcagatataaattcaaatccagctaaatgtatttttaaggaaaggcatatagactatatatcttcatttcccgggtattgtggaaagcatgatcgggatatttttagagaattagatgagggatcgtcaataaatgctaaatttgtcaatttgagtgttatgagagtgttaaaaaaacaaattttcgatctgaggttagaaataaacttgcaaaatgaacagagtgatgagtggaatgataaatgcctagagcgtattaataagcaggaagatattgacttaattgctctagaaaatgcaaatgaacattacattaaaatgaataaaaaaattaaaagaatgaagaacgacattaatagatatgaatctttgtatgataagatttttgggggaattgatgagtcgacagcattaaaattcaacataatgaaagtgaagtatgttagaagttgtttttctatcatgattgatgctcgattagaggacggaagtgctggtgaaccgcactttgtattttaccttccagttaatgagcatggatacattattgttgcgaaagataatagtgagaagaattatgatccttttgtagttgatgaagatggggcgcttagtatatatttttggatgtcggccttaatgaagaaggagtctttatttttttctgaagaaatgctctctgttttttcaaatcagcaaaaaaatatattaaacactaactataattatttcgatgtaaccccgctcgaggcaatcatgatatctcaaatatatttggactaa

SEQ ID NO: 194125 - DNA, 1005 bp, Klebsiella oxytoca; identical to SEQ ID NO: 53712

SEQ ID NO: 194126 - DNA, 789 bp, Klebsiella oxytoca
atgaaaaaacaatttaaaaaaacactggaaagtattcaaacacgatctaatcgttcaacttccaatacagttagagagttctttaattgtgtgtcttacactatgataatgaacagtctattccagttagaacaaagagagttgttttatttaggtggtaaaatatatggttttaacaaacttgctatgcaagctggattaatcaataatttagtaactttaaccgataggcataaattcagcatagaagaaaaattttataatcagtttgagagtgaaataatagaaacagctaattttctttgcaatgaaataaacagtaaacctttaacagatatattcaatgaactattcgaagaatgttatttgattggtaaaaaaggtaatggttttgctcaatatttaactcccaacagagtatcaatcggtgctgttaaatttttatcaataaaaaagaaagataattatagagtaggggatatttgcgggggaacaggttcaatgattttagctttaacttcagaaatttatgaaaaagaaggattagaaggaattcaaaaaatagaattattttatcaggataaagactcttttatttctcaaatattcatagctcaaattttaacgaatatggtttaccataattttgattttaaagaattacgagtttatattggtgactctataactgaatacgacactataaacactctatttttaagagttaaacaaaatcagttagtggctcaacgagtattggaaattgataaagaaaagaaagcagcataa

SEQ ID NO: 194127 - DNA, 237 bp, Klebsiella oxytoca
atggaagataaaagcctttttattaaggcttcaattgaattatttaaatataaaattaaacacttatcagataatattgataatttaaatatttctttcaggggtggaaatgtgatttttatttcacagttcgggaaaaaagaagaaatttcttggtttacattttcaaaaatcgcaggtgatatttttgatattaaagactcctcagtaaacaatgaaaaattacttgcggcataa

SEQ ID NO: 194128 - DNA, 300 bp, Klebsiella oxytoca
atgcccgctgacgcgatactgtgcgttcagcatacgttcatgacgcaggcgggcgaagtatgccccggtctccgggctatcagcgtcacctgctgtcaggaagggttccgcataatggtacgtttccccggtagtgatcccttccttgctgaaaatgctttcggcactgtcctgaggtttcagcgcgtcgcgatagttgtagtcacgggtggccacacttccgctcaccacattgtatgcggtctgaatatcccagatgctctcctgcccgctgtcactcatcccggcctggttgcgtaa

SEQ ID NO: 194129 - DNA, 327 bp, Klebsiella oxytoca
atgaccagcgccatcggcaccgatataggttacgcacggctcaccgtcttcagcgacagcagcaatctgcttgagaattggagcaaccagttcataagcttctttctggccgccaggcatgatcgaaggacctttaagggccccttcttcaccgccggacacgccggttccgatgaagttaaaaccttcagcagaaagctcacgattacgacgaatcgtatcctggaagaaggtgttaccaccatcaatgatgatgtcacctttgtccaggtaaggcttcagagagtcgatggcactatcagtgcctgcgcccgccttcaccattaa

SEQ ID NO: 194130 - DNA, 291 bp, Klebsiella oxytoca
atgacggaaggtgaaaaaagcgtcctgtcactctttgtgatcggcgtgctgattgtcgtcggtaaagtgctggccggtggtgagcccattaccgcccggctttttattggtcgcatgttgctgggcggctttgtctcgatggtggccggggtggccctggtgcagtttcccgacctgccgcccgccgccgtatgcggatttggctcgatgctgggtatcgccggttatcaggcggtggagattgcgattcagcgcaggattaaaaaaggggaaagcgatggcggtcattaa

SEQ ID NO: 194131 - DNA, 273 bp, Klebsiella oxytoca
atggcgggacatgcgctgggcggtatcacgcgtccaggacaaaccccgctgcatcgtgagccaaatctgatgcaggccatcgcacaacagggcgacacgctcgacatgatttgcgcccggtattacgggcgcactgagggggtattcgagtcggtgctcgccgcaaatccggggcttgccgggctcggcgcagtgctgccacatggcacggtggtcgaactgcccgacgtccagtcatcccccgtaactgaaactattaatctctgggagtaa

SEQ ID NO: 194132 - DNA, 510 bp, Klebsiella oxytoca
atgaatctacaagcaagtctttttatagccgcagctatagctattgcagcctatcaatgggtgaagcataagggtacaaaaaagaaatgggagaaaggtagtatcatttttgtaggcttattacttgcaatacctgttttctttgtttcctctattgcgatttatggtatttgggggcaagaaggtcaagcaaaagaagatgctcaaatggcagcacgtaaagcagaagaggataaaaacccaattggttatgctaacaatcaccataatcccacttatgaatgccagagagctattgagaaattagctaagtatgattttaaatggaaggattcaattaccaacccggcttttgtaacatacgtatggattagtaaagattcaaaagtgattgaaatgtatggcgaccaagctcaagcacagaatggatttggtgcatataaaaatgtccagtattcatgcaaatttaatggtgaaactggcgaaattttatcttatgacttcaattaa

SEQ ID NO: 194133 - DNA, 228 bp, Klebsiella oxytoca
gtgccggtggtgctggtcaaagcctccacccgcgtcaccctcgataccccggaggtggtctgcaccaacaaactgaccaccggtacgctggaggtgaagcaaggcggcaggatgtccggcgatattgagcacagcggcggcgctttcacatcaaacggtgtccaggtggataaacatggtcacggcggcatcaggcgtggcgatgaatggacggaggggacccgatga

SEQ ID NO: 194134 - DNA, 228 bp, Klebsiella oxytoca
gtgccggtggtgctggtcaaagcctccacccgcgtcaccctcgatacgccggaggtggtctgcaccaacaagctgacgaccggtacgctggaggtgaagaaaggcgggaagatgtccggtgatattgagcacagcggcggcgctttcacttccaacggtgttcaggtggataaacacggtcacggcggcatcagacgcggcgatgaatggacggaggggacccaatga

SEQ ID NO: 194135 - DNA, 156 bp, Klebsiella oxytoca
atgaacaaagaaatcaattctcgcccgttctggcgaaacctcgtgatctgctgcgtgctgtgctcgctgcttttttggttgccgatgggctatctcgcttttcgtgttggctctgtgatgtgggaggtgctgtggtcgcttattacaacgaaatag

SEQ ID NO: 194136 - DNA, 990 bp, Klebsiella oxytoca
atgaccttaaaggattcacacagtgccatttcttcgccggaatcggtggatggtcgctcgcactgcgtcgggcaggttggccagatagtcgcccggcatggtcagcatcatgcccatgccagcctttcagccaggcaggcagaaaaaaaggatttactgacgagcggcacctatggcccgccgcacattggcttgtcggccagcgccgccctgtcgtggtctttggcgagcaatctggcagcgctgacgcgaatgactggatcgaccttgtacaggctgacgtggaagccctgggctatgcattcggggcggttgcgtttccgtctgcgagcgtcggtgcgccgcaccagcgagaccgtgcgtattgggtggccgacgcctctcgcgaacaatgggaagggcgcggggaatttcaaccgacaggggggggtaaaccttcagacagcagcgttattaactggctggccgacgccggccgcgaacgaattcgaaccgaaagacttgcaaaagcttttggagagaagggagaaatactcgaccaaatatggaaacaacgggttcggcctgacgctggggcagtcagtgcatctgctggcaggctggcccacgccaacgacaatcgacaacaatcagattgcggggcagggtgcggcggccaatgcaccaaagcgcgggacgacgctgggcggcgctgccagactggcagcatggccgactccgacagccacggacggaaaaggcggctatcagggcgggcggatccgcaacggaaaactatcaacggacaggctggatgtggctgcgcagattgcggggccggcccggttaacagtttctggagtgatgctgattggctccattgccaggatggaaagtggcggccagttagacccggatcattcccgttggctaatggggttcccgccagagtgggaagactgcgcgcctacggaaacgctatcaacattgaagcggcggcagcgttcataa

SEQ ID NO: 194137 - DNA, 354 bp, Klebsiella oxytoca
atgaaatttaaagaaatagcggcgctaatagcgcttgcgttatctgctattgtcggcttgattgtttgttatgtagcgggaaatgccctcctcagcgtaatcatcccgataacctcatcttttttcgctctttttattgttatcgcccttgttaaatcttcatgggaagccttaacacgccacaataaatcccaagatcaccatgcaaaaaaaccacactatgacactgcgccgaaaaaattctccgaactcgtagagctaaaagatcatgccgtatactcatcaaccaaggcccaacttgagcggcaactaaaagagcttggagtaagccttgacgatgatagaaaagaataa

SEQ ID NO: 194138 - DNA, 603 bp, Klebsiella oxytoca
atgaatagctcacttctcccgccctcttcaacggcatggatgcgcagtgccgagagcgcatcggccagactgtcggctattacggtggcgcttcgcacgctgtggacgccgaccgcctgcccggtcgatttactaccctatctggcctgggctctgtccgtggaccggtgggacaaaagctggcccgccgctaaaaaagtggcagctattcagcagtcctactggctgcatcgccgtaaaggcactcgcgccgctgtgcgtcgggtgatagaggatatggggttttccgccacgtttgcggagtggttcgacgtcggcgacgagcctggaacattcaggcttgaggtggacgtgaatgatgttggcatcacgccaaaaacactggacgaactcaaccgattgatcggcgatgcaaaaccggtcagcagacatttatcccgaatgaccatatcgaccagctccagcggggatatctggacgggactggccttatttgatggtgacgttatcagcgtttatccgccgggatataaacctgacgacagcattcactatgacgcacagcagtatttcttcggcagcgtgtatttttcaggaaagtaa

SEQ ID NO: 194139 - DNA, 984 bp, Klebsiella oxytoca
atggctattggtgacggaggtggcacgctcccaactccctccagtgagcagcccggcctgattaatgaattgtaccgctccagacttaaccgcgtggtgattgcagaccaggcaaataacgtcatacgcgcggaactgctgatccctccgcaggtaggcggattctggctccgcgaagcggcgctttatgatgaggatggcaattgtctggcggtggcaaacatgccggagtcgtacaagcctttactggctgaaggggctggccgattccaggcggtcaatttgtggatagccgtcagcaatactgccagcgtggagctgaaggccgacccgtccgttattatggcaacggtggaagaggttgcccgcgccaaaagcgaagcgaaagattacaccgatgaggtgactggttcgctgaatacgaatgttcagcaggctatttctgacgctattgcagcggcaaagcgtgatttctgggaggatgaaaacccggtcggcacggtgaagttttacgcgcagaacgttaaccctaacgagcgttatccgtggtcgaagtgggtttataccggcgaaaacaaaacgatccgcgtcggcaaggctgacggttcggacgttgccacgacaggcggcagcgatactgtgaccattgaacgtgccaacctgcccgccgtgcagattgatgtgagcggcgaaaccagcgagcagcctgagcaaacactgactacagcggaaaatggggcgcataaccaccagggcggtgacggtgcgccgggtgaacagtggcgggaagggacgcacggcacggataaccagaaggacgctaattttaacctgaccagtgatgcgcctgcgcactcgcatgacgttgttattccgccgcataaacactcgacaaccggcaaaaccgccaacctcggcgagggtaaatcgttcagcgtggtggaagcccacaccctgctgatgtgctgggcgagggtggcgtag

SEQ ID NO: 194140 - DNA, 2781 bp, Klebsiella oxytoca
atggatcttagtattcgcgttgcgttcagtgccattgacaagctcacccgtccggtcagtgccgccagtaaagcgattggcggcctttcggactccctcaagcaaacgcagggttcaatcaaagaggttgagcggcaatctgccgccttcaaccgtctacgcgacagcgttaaaaaaacctcccgcactatcgacgacaccacccgcacgctggaaggactgaagcaggcccagcggtcaggtgccacgctgacggataagcaacgccagcagatgaccgatctcgcggcgaagctggatcgtctcaaagtccgacgcgataaagagaccgagagtctccggggagcctccgaggcgctccgtcgccacggcgtttcccttgcgggcggcagtcagactattgccagcgccattcgccgaacagagcaatataaccagacccttgagcgcgaacgtcgccagctcgcggcggccacgcaagcgcgcatgcagtatgaccgcgcgaaagagattgccggcaagatgcgtggtgctggtctggtgatgacggcggcgagtgccggggctggctatctgggcgcacggctgatggcaccgcaaatccagactcaggagcacgcctccgttattgctgcccagaatggtgagggtgccgcatccggcggtcgctactcccgcatcattcaggatattaacgccgctggcgtcagtcgcgatcttgcccgtatatccgaggcggtggcgggcgttcgcagtacgctgggcgccctcggcgaggtgggtgacgatgagctgacgcgtatttcccgcaaggcgctggatctgcaaaccgcgctgggcggggatatgacagagcagatccagatggctgcaatcatgatgaaaaacggcctggcccgtagcagcgatgaggcgttcgaccttattacatcggggatgcagcgcgtttcaacacggatgcgcggcgagatgccggaaatccttcacgaatattctacccacttccgcaatatgggcttcaccggcgcggaaaccatgtcgctgctggtcagcatggcgcaacagggtaagtttgcgctggacaagaccggggatgcgatcaaggagttttcgatccgtggctccgatatgtcaaagaacagcgtcagcgcctataaggcgatcggccttgatgcggctgtcatgtcatcggctatagccacgggcggcgaaagcgcgcgcaaggcgatggagaagacggcaaaaggactgctgtctattcaggatccagcgacgcgggctaatgccgcgatttcgctttttggtaccccgattgaagacctgtctatcgatcagatcccggcgtttctttcggcgctggcgaacgtctctaatcgtctcggcgataccaggggaagcgccgacaggctgggtgataccctgcgcgataacctgcccggagatatcggcaagctgggcggcgcatttgacggtctgcgcacggaggtgctgacggggatggatggcagtctcaggataatcacgcagacgctgaccacgtttgttaatcatcttcgcgaatgggcgagcgaaaacccggaactgacacaaacactcgtccttgtcgctgcggcgctggttgctcttacaggggctattggtgtagccagtctcgccgtcagtttctacgttggcccctttgcgaaactgaggctggcaattcaaaacatcgggttgtcttcaattaccgcaacttccagtgtcgccaggctcaatctggtgctttccgggatgcgcgttattcttgccaccctgctgggccttcccggcctgattgcgctggcgtttgttgctgctgggttagtgatctggaaattctgggagcccattaaagcattctttggtggatttcttagcggagtctgggatggactaaccccactcaggaatgcattttcagcactggcgcccgttttttcagtgctgggtgatggcattaaggcgatatggggatggtttaagaatttactctctccaatgcagaccagtaaagacacgctggataaatgcgccagtgctggaaaaacttttggtgaaattctcggtaccgctcttaatttgcttttcaccccattgcgcttgctaacacaaggcgtttccttgcttcttgaaaaacttggcgcgatcccttccagtcttgatgcagccaaagctaaggccaatagcatcacaaccaagccccccacatcatgggagtgggatcccaaacagaaaaagatggtgcagaaggaatggggttggtcacctgttatgtgggaatgggacccgaaacagaaaaaaatggttaaaaaagaatggaaaccatctgtttcatctccctcctcgcctctcggtggtaatggcggaggagttcagggacacctgaaaaacatcgagacgaataccaaagctacggccaacaacacgaagaaagttggccctggcgatattgtttttaaaaacctgccgcgtgcacttgcgctgcgtggtgcctatcaggaagcgcgggttattccgcaacctgtgccgcgcgtgtctgctgctgcggccggtggtgttctgtcggtaccgacggcgacacagggggcaacatctgcgccggtcgctgcctcgtcgggtgctgcgccgttcttccagctggtctttaacgacgtcggcaaacgctcggatcaggagcttgaaaaaatggttcgcaacgctgtgcgtgatgcgatggccagcacccgcaaagctaaccgtggttcataccgcgatcgggaataa

SEQ ID NO: 194141 - DNA, 774 bp, Klebsiella oxytoca
atggaaatagaagttcaaagatgggatcacaaatttgagataagaccaggggtttgggtctatgtcccaagtgctgaggcaagtgaacttggggaacggataattcaagcaatcaggaacaagtggattccaccactctatttttatcatttaagaaccggcggccatcttaaagcagctagattacatcttaaaagtgattttcttgctgttgttgatattaaaaatttttttcagtctactagccgtagccgagttacccgtgatttaaaagcctactttacctattctcagtcgagagaaatttcaaaattttcaactgtgagaaacctgtctcatagcccccataagcacgtccttccttttggttttgtccaatcacctatgcttgctaccctttgtttggataggagttatttaggtagtctattgcggcgcttgaacaaacatcccaatgtgaagctcagtgtgtacatggatgatgtgatcatatcttcaaatgatttggttcagctgcaaactgcttacgacgaaattttagttgcaatggataaatcgggctatcaacccaatcttgttaaaactcaggaaccatcagtacttattaacgtgttcaacttgagtttgggtagaggaacgatgaaagtttccccacagaaaatgagtgacttcatcattgatttctacgcgagtgattatgagccacataaaataggtgtcaaaaactacgtcgaaactgtaaatcctgcacaagcgaaactgttgaagttgtaa

SEQ ID NO: 194142 - DNA, 180 bp, Klebsiella oxytoca
atggatatcaacgaacttggcttagttaaggcgcgtgtggaacttgttaccgctatgctcaaatgcgcaactgcatttgtagtgttagtcggtacggtttacagcgttcttaacatggccttcaactacgactgtttaaatcatggaaatagaagttcaaagatgggatcacaaatttga

SEQ ID NO: 194143 - DNA, 1167 bp, Klebsiella oxytoca
atgatggcacagaaaaaatacttttcgctgctgacacaaaagggcatggataaatttgccgccgcctcactggatgacacttcggtcgggttcgcgtatatgtccattggtgacggaaacggcgtggtgccggtgccggatatcaaccagaccggtctggtgaatgaaacttatcgctcccggctgaacagcgtcaaaattgcggaatctgatgaaaatatcatcatcgcggaaatgataattcccccggagaacggcggatatacgatacgtgaagccgcgctttttgatgaagagggaatgtgtctggccgtggcctccctgccggagacgtacaagccgaagctggatgacggtgccggaaaattcagtgttatcagggtatgggtctccgtcaccagcgcggcggatgtcacgctgataaacgacccggggattattattgcgactgaagagtcggtgctggaagccaaaaacaccgcgatggactacacggacgaccagcttaccgaccatgagaaatccgtgaatcatcctgatgcaagccttacgggtaagggctttacgcaactcagtaacgccactgacagcgacagtgagaatatggccgccacgcctgccgccgtacgcaaggcgatacaggttgccatccggagcgcctgggagctggataatcctgtcggcaccactcgatttttcagcaataccctgaatccgaatatacgctggccgtggacaacctgggtgtacacgggcgaaaacaaaaccattcgcgtggcgaaatccgatggctcaaatgtcgggaaaaccggcggaagtgataccgtgacgcttcagcaggggcatttgcctgccgtgcagataaacgtcacgggcagcgtcggcgatcaccctgaacagaaattgcaaaccaaaggggccggaaagcacaaacatggtggcgttcccagccgtgataatccgtgggaaattggcggtgatatcagccagcgctttaacccggcgaatctcggcgaaacagatgaagtggacgatcactatcatgaaatggtgataccgccgcagacgcactccttcagcggtaaaacgggcaatcttggcgaaggacagacattaaatattgtggaagcccacaccctgctgatgtgctggagccgcgtcgcctga

SEQ ID NO: 194144 - DNA, 2277 bp, Klebsiella oxytoca
atgactaaaattaacgaatcccctgaatgggtggatgaaatagatttgattgcccgccgcgataaggtggaaggcggcaaagacggtaaaattaatattcaggccagccagcttgccagccgcacggcctttctgaaaggccagctggacagcctgggcagtgaggcgcaggaaagcatcaaagcgaagaccgattttatccggggcggtgagctgtcatcgtccagggaagagattgtctacggtaatctgcgcctggtctggacgggggatttccccaaaaccgtaccgccagaatccaccccggagaacactggcggcgtcgggccgggtgcctgggcgtacacctctgacgcaggcattcgtgccgacctcgggcgtcggggggcctccatctcggcggatgagcggtcgggcaatattcagcaggcactgcattttatgaccgtcagacagtgcggcgcgaagggtgacggcgtgacggttgaggatgccgccttttccgaagccgcgctgacctctccggcatcaaatattgccggggtgggaaaatcagagaacattccgcgcccggaatcgaccatcgtctatatcaacgacgggacgtatttactgtctgattatattgatgtcggcaaccgggatgtaacgtgggtggcgagtcacggcgcggaaatcattaaccctaaatatctgaacgggcggctataccgtccggggcggcagaataacctgtacccgcacggctctgcggggaatgcctgcggattctccgtgcgcctgcaaaaagtaggggaagacagcaccgatggcccggaaatcctcggcatcactaccccggccaggctggcaacgtatcccgaccgcgatatcgctgctttttatgcggaagcgaagatgcccccggcgctcgccaccctgaccgggaccacgttcaccgcaaccagtatttcgtttgcgacaaccctcagcacagcccagcgaaggcttatccgtcgggggatgattatcgataccgccggaacccggtattccggtgtagtcacgggctggagcacggatttcaaaactatcaccgtcaccgggtggtatctgtacaacggcggcgggggaacctcgacgcctccgggggggctcacggcggttctgaatgcctataccaaaggctgggggcagaatattaacgcccagcttgacccgaacagctttgccgattactgcgtcgcggcagagtacagtgtggtgaataacaagggatataacgttaactgctgggtggccgattttattaatctcgggtcgtttaaattagggacgctgataaatctcaggggcaatgcggccggggcgctctatggtgcgcagatttcgaatgtggaaacggccattaatatcaacaccgtcagcaatgcctactttatcggcgtggataataacgacgtccagatgacgttcgggaagaacacccagacgttcggcaaggcaaatacggccagcacgcagaccattgcatttcgtaccagcggcaaaggaaccggcaccgccgacgcttccattacggtgagtggcggcgacgcaaccaccctggcaacgatgaacctggtggccgctgcggttatcacccggaacgtttatcctcacgccgatgctgcggatgacctcggctttgccgggaatggtcgtttccgtaacgcgtatctggctaatgccccgatagtcacctcggatgaagtcgccaaaaccggcagcgaagatggcagcgtatcgtcagtcgatatcccggatgcagtgctggatgcatgggagaccgtcaactttgcgatgtacaagatgcgcgatgccgtggcggataagggctggtccggtgcccgctggcactttggtatcattgcgcagcgtgttcaggacgcgtttgaggccgccggtctggatgcgatggattacggcattattggctatgacgaatgggaggcacaggacgcggtgtacagcgaggcggtccctgaagtcaatcagccggaaatcgacatgccggagcggcatgtggatgcggtcacagatgaagaaggaaacgtcatcaaggaggcgtacgtcacccctgcacaccatcaggacgccgtgtatattccggcccgtccggcggcgctggtcaggccggcttttgcggcaggctcatgctacagcctgcgctatgaagagtgtctggtactggaggccgcctgcatgcggcggcggatggaccgactgacgcaactgctttccggcggctcactttaa

SEQ ID NO: 194145 - DNA, 612 bp, Klebsiella oxytoca
atgaataacccgctgctgccgtctggatcatcatcgcttgagcatcgcgttagcctggtatgcgccgccgcagggggattacctgtatcactgcgggacttatgggaccctgaccggtgcccggcagcctttctgccctatctggcctgggcgttttcagtggatggctgggatgaagactggagcgagcaggacaagcgccgcgtggttcgagacgccttctggctgcatcagcgtaaggggacgattgcggcagtgcaccgggcggtgggttatcacggttttaccgcagaggtggcggagtggtttgataccggcgacccgcgcggcacgtttcgcctggaggtggacgttaacgaaaccgggctgacgggcaaagtactgacggagctggagcgcgtggtggaggggactaaacccgtcagccgccatatttcctctttcacgatctccacccgtacagacggtcccttttatctgggcgcggcattactgcccggcgatattgtgacggtttacccgcaagcgcacagcgcggcggaaaatttgcggtatttgggtatcacgcatttcgacggtaattatcacttttcaggtgacgacgatgactaa

SEQ ID NO: 194146 - DNA, 909 bp, Klebsiella oxytoca
atggccgttattgatctttcccagctgccgccgccgcagatcgtggatgagccggattttgaaaccctgctgacagagcgtaaggcggagtttgtcgcgctctatccgacagaagaacaggaagctgtggcccgtaccttaatgtttgaatcggagccagtggtgaaaatactgcaggaaaatgtgtaccgtgaattgttgctacgccagcgtattaatgaagccgcacaagcagtgatggtggcgtacgccatcagtggcgaccttgaccagctcgcggcaaacaataacgtcgagcgcctgactgttacccccgcagacgatacgcaaatcccgcctgttgccgcagaaatggaatccgacagcgatttacgccagcgtattcccgcagcattcgaagggatgagcgttgccgggccaacgggggcttatgagtttcatgccatgagcgccgatgggcgcgtggctgatgcgtcggcgattagccctcttccggcagaggtgacgatctccattctgtcaagggaagggagcggcatcgcggatgaggatttgctccgcactgtaagcgatgccctcaatgatgagaacgtgcggccggtgggcgacagggtaactgtacagtcagcccgtattatggattacgccgtggaagcggttctctatgtttatcccggcccagcaacagagccggtgcttgcggcggcaaaggtacagctgacttcatatatcaacgagcagcgtcgcctcgggcgtgatatccgccggtcagctatttatgccgcattgcatgtgaacggtgtgcagcgtgtcgaactgattcaaccggccgcagatgtggtactggataaaacgcaggccgcaaactgcacgggagtcatggtagtgatcgggggaacggatgaataa

SEQ ID NO: 194147 - DNA, 1434 bp, Klebsiella oxytoca
atgatccagccgaaagtatttatatcctatagttggtctagtaaaactcatcagcaacatatcaaggatatggctgaacgattagcagcggatggggttgaaactgtcatagatatctatgatttgaaagaaggggatgataaaaaccattatatggaacgtatggttcaggatgaaaccgtcacacatgtcttagtaatttgtgataagaaatattctgaaaaagctgaccttagaaaggatggtgtcggtgtagagtctatgataatttctcaggaaatatattcatccgtttcacaatccaaatttataccgctgatttttgagtataaagaaagtggtgctccttatgttcctatatttctgaagtccagaatttatattgatttttctacgccggagaaagaaaatgataattgggaacgattaattaggctgctctatggaaagccagagtttacaaagccaccattgggcaagccgcctatctatttggaacaagatacatcgaagccaacatatgaaattcatgctaaatttcaaacgttaaagtcggcggtattaaaccaaaagcagaatgtaaaggagtgcagaaggcagtttcttgagatatgtcgaagttattgtgtatcgttacaggtattaacgaaaccaactacggatgattttgcagcagaagtattgcaaattcataaggagcttatccctgtgagggacgccattactgattggattattcttgagggggatactcagaacgaggatttctctaaagcactactgcagtttatggaagtaatgctagcgatcagaagtcggccaaaaaatattaactcatggaatgatttatggtttctttcgcatcagatttttgcttatgaaacattcttatatatattggcagcattaataaaaattgaagcttttcagcagatatatattttactacatacatcctatcttttgcctgatcatctagttagccctggtacggagtttgctaactatagtgaattttttgtaaactctgatttccttcaaagtaaattggctcctgaaaattaccgactacattcacccgttgcagagttggttaaactaagtgcaacaagagaagatgtgtcttttgatgatttgaaacaggctgatctcgttgctcttatgatatccttcattagtccgggagtttattggtatccccaattattactatattctgcgcattacgaaaaatatcctctttttacaagggcaatacagcatagaggatttaaaaatattgcgactatcactggggttaatgatagtgaacttttagttcagaagctgactgaaggtgatgctaagcgaaatactagcaactggcaccacttcagctttaatagaaatttccttgaacaaatgaatgttaaccgtttagacagcattgattag

SEQ ID NO: 194148 - DNA, 186 bp, Klebsiella oxytoca
atgtttgccagcagcggcgagataaccgcaccctgtggggtgccttcctccgatgcccgccattctccttcctctgaggtcccggctgtgagccactttcgtatgagcctgattaccctctggtcgccgattctgtgttctatgaacctgattagccattcatggcttaccttgtcgaagaactga

SEQ ID NO: 194149 - DNA, 1563 bp, Klebsiella oxytoca
atgatcgcgcataaaacaaaggcggcccggcatggccgcctgagtcacaacgctttactaaaacacagtcagattaccaggcttgtcgctggtggtcaaagcctgagcgttaccggaatcccggtatcgagtaactcaacaactgtgcagatttgcatagttttgctagacaaccattttcccccgctctcaggcagcgctcccggcattttgcgaggcatcaatactaaagtgcaaatcatctctgtgcgtttaacgtacggacatcgcaactcattgaaatttttccagactgtaaatttacattctgctcggaattcactgagccagcttaattatcgcgaaatgcgagaactggattacccattgaatatttcgaaaagcaccaatggcgtgagtcgagttcgaaccgtacaggggcaaaacaacgttaaacgtgatttggaggttccgacgaatatcttcggtagctatgtggataatggaaagaaccatcatgaggaaaatcaacaacatccagctttggacgatgggagccgactatctctgagtgagtccgagagcttacctacttactgtgggttagctcggcatttttgcgggactaaaagacctgcgcaaaacaaccccgaaatcatcggagcagttcacagcgctaacggcatttgccctgttccgggttcgctcgccaacggtggttggacagtggaaaagggcaggatttcagatccgaccccctggctggtgagctgccgtcatatttgtcgggaggggagcaaagcccggattcgggctttcggtgacaagggcagaattctgcccttggataccagagcaggaattcctgctttggcttattccgattctttggtcatgattcaaatttttggaatgccgaggttatacatttggtttttaatctttttttcgcgtttcttgaattcttttttaagctcgtcaagctccgcattcaatgcattatatttttcggaaattccgttcagctttattgcggaaatagctaattgcagctcttttgtatcattgaggtctggcgggaatattgagtctggattgccagttattagcgctgtggtatgtttgcaaagtaccgttgcagggcaatcgcatgtaattcctatttgtcctgcaatctcaaacactacgacttcatatcgatctgttttattgctgctgagtgctgaaaatttgtattccatagtttttctacgctccggtgaatgttcgttaattgcttctgttcagcctttctgctcgatatcgcgctgtttcaactcttttcgaactattcgcttaagccatgctgaaagggttgcgtctccatcttcgtgcatggctgcgagcattgcttcttcaagtgctggttctacacggaaagcgatctgcttattgcctttcggcatttttatgtttgacatgtgtctgacactcggcgtaatcttcgttgtgtcacgcaatgtacatcacatgtctgacacttgtaaagcgcgaagcccggcagtgttaccagcactaaccgggcctctgaccacaaaccgttaa

SEQ ID NO: 194150 - DNA, 285 bp, Klebsiella oxytoca
atggctgacaatcagtctacccaaactcgccctgaatttacatggctctttcttggcactcctgccggtacgtcatgcacccccgttgtgctacgcacgaccgcagtaaccgaagatgatgcccgcgccgagttcagcggctgggatttaacctttgctgcgaagatccgcactgaaagcccgcttagtgcatcgtggacttgcccggacagcatgacgctctggagcctccttggaactgatatttcatacctgaatgaaatggcagggggtcgccatgcgtga

SEQ ID NO: 194151 - DNA, 195 bp, Klebsiella oxytoca
atgcgtgaacatatcaccttagaccaggccgaatataaatccgcactggccgcctcactgttcgaaaccattctggagaaagcctgtgctgagtgttcagagaccctcctgaatcatatctctctggcatgtgaccttaatcatgaaattcacaaggcattaatcgctgtgacgggcaagggagacaccaaatga

SEQ ID NO: 194152 - DNA, 216 bp, Klebsiella oxytoca
atgagacaggttccttttgaagttctgatgcatgccgagaatgccctttcagagagtgaaggcgcttatgagattttgagtatgtggcttgacagcatacccaatggcgttgagttccacggcgaagcgtgccgggtgagcgcgattatgacgcttctgcataaatctatcgatgagctgctgaaagcgcaggaggcctacagtgcgaaatcctga

SEQ ID NO: 194153 - DNA, 186 bp, Klebsiella oxytoca
gtgcgaaatcctgagattaacgatcgctggaaggacaagcgcggcgaaatggtcacggtgaaagatatcgcctttaaccgggtgaaatttatccgtgatagctacgaattcccctgcgtcttcccgctggaaaggtttgttaaagagttcagttttgtcagctggggtatgcctgatgcgaaatga

SEQ ID NO: 194154 - DNA, 501 bp, Klebsiella oxytoca
atggacaaaaagaagcagatggagcaattcaacattgcctatatacgttctcttgctgcacatgcaggctttaaagtgtctactggtgaagtagatgatgatagcgttgatataacaattgaaggaacagggtttaataactcagttattcggaaccccaaggtagatattcagttaaaatccactaagaactttaaactaaaagataatgttattacatatgctttaaaagcaaaaaattattcagacctaattggtgataatgttttatctcctagatatttagtattgctccatttgccggttaatgactctgattggctataccacagtgttaatggtattacattaagaaatagatgttattggttttcgttaaggaatttacctccaagtgccaacaggaatagtgtaactcttaacatacctgctaatcaggtgttgacttcatctttgctaaaggacatgatgaaggcggctagcaacgggatgagtgtataa

SEQ ID NO: 194155 - DNA, 1122 bp, Klebsiella oxytoca
atgaaattatacaatgagaaatttataacgacagaggacttttcgaactatcttattttgaaaggatgggtcttattttctaaattacccaacgttgctaatgtctggcgttatgagaaaaatgataattatgaaatattacagccagtccgtgccgatttaaaagattattccaacagagttgtcgatatcattaatgctctcagtgagagtgagaataaatcaaaggatgaggttgttagagaacttgataatattagtaatgatattattagtctcagagtaattcatgatgatgtagctaacggagagataccttttgctgatggacttattctgttttctaaaacaaaagacttgatgctttcagcggcaaggtctgttgttaagcctcagcgcggccgctattctggcaaaaatccagaggttgtagatcgtttcttcaatagcctgaaactaggtcaaacccaggtaggtagttatgtgcttaatctggtttcaccaatatattgggaagatgatgtacaggaagattattgcaaggttcctttttcaagaacagttacggaacggttaatgtatagcattgagaaactaagtaatgctgttgataaatataaggattgtggggatttaaaggtttttgaatctattgttaacgacggtgttaatgcaacgctatgctctgcaataattggtttgagtggattgaataagtcaagggttgttgagattacggtcttaaagtcagtcatcgctgacgcttcaaatagtgatataactaaagtgtctataacgccagagaagataaaatatatcgaagaagcagaaggttattactcaagtaactatacagtgaagggttataatcttgtcggttcggtaatcaggttaaatagagatataaattcatctggtgggatggtgaccattgttgaatcttctgagaataaccgtaaggttacggtcgaactcgatgaggaacactataatgaagctattaaagcacatgagaataaatacgaaaatgcacgtttggttggtatgctgatagtaactccgaaaacgacaaaacttgttgatgtgagtgagtttcacatattacatcatcccataaagtaa

SEQ ID NO: 194156 - DNA, 486 bp, Klebsiella oxytoca
atgattaactttcagcatctcactccgccgcagcccgatgcgcaggcatatggcttttccgggcgccgtatgcaacgaatgcaccggcttcagcaatcagttgaagacgggcaaccctctgaatgctgccattctgatgcgcatctgatcgctgtgagcaaagaggccaaacaaaacccaatactggcatttcatcttatcgccgaagggatcccgcaccagcgggccatcgccagactacagggcagcgttcgccagcttagcttttttacccggcgagcaatggcgaaagtctatcctggctgggagctctttgatgccgaagaccagaacatggtggcattccagcacagcatgattaacggcgacaccaacggctatcgggctggtttcaacgctgctctgtcggcgctggagaagtttgtagagccagttacgtttgacgatatcgtgaatagcgttaattcgctggtggaggaagtatga

SEQ ID NO: 194157 - DNA, 588 bp, Klebsiella oxytoca
atgtcactaatgagcgtcagccagtacgcaaaacatgccggaatgagccggcaggcgctgtataactgggagagccatgaaggatttccgccgcgggttgacggaaagattgaccaggatgcctgcgatgcctatctggcccgatatcgcagcgccagtgatccgcgcacgaagaatgccaggagcaaaaccaagcccgtaagagcggctgaggtgctgggtaatgcgctggtggaaatgagtgttgcggagattaagcgcatcatggcgtccgatgccggtaaggtggccgggatggatccggacgaacgcgctcaagtggctgcaaaggccgtagagctgtttgtaagcgaaggcccctataacctacctgtaacgttcggcggctaccggctgtcaattgttgaaaccccagatgatgaaatcgggcagatcatcgccggtggcgcgtttggcctgtctgctgatgatgtggtttttgaatgccgggattacaccctgaccctcatgagcgatgaaaccgaagaaacagccatgcggagggttatcccttcgttactgtatgccctggccgacgataccgactaa

SEQ ID NO: 194158 - DNA, 195 bp, Klebsiella oxytoca
atggtgttaaaacagaagaaaatcgaggcggtaattgaagagctggcccgcctgcaggggcatgagctgaatgccgccgatatgctggagttacgttgcagggttgcgggtacgctcgcagcgaaggatcggcaccgccggaggatgacggcaccagcctaccagtggaagaagccagataatccacgtcgttaa

SEQ ID NO: 194159 - DNA, 360 bp, Klebsiella oxytoca
atgagactgaccagccgcaagatagagataatgagctacttcgaaccggataaccggggatgggttacaggtgagattggtgcgcctccgcttgatgtgtccggcgtggcatacctgctgtatggaacaggcctcaaagacaaccggcactggctcgaatccaccaggcgaacgcttgaagcgatggtgagcgatgggttactggagaggtaccggagccgtgaggcgcggagtatcgttctgggcggcgagacgaccgccacagtaatccgctatgggctgccgggtactgtttcagtggtacgcgatacgggaggtgcagacggcacgatagaaggcgaatatgtgcgtgtcgtttaa

SEQ ID NO: 194160 - DNA, 612 bp, Klebsiella oxytoca
atgttttatagcagtaggatgaaatcgcatagactatgcacagctattactatggatatacaaggaatttatatgtcgttagctcaaaaaatgaaactacaagatcttaaagcaaaaattgaagaattcagcgctcctaggcgcgagttgttgaataaacaaatcaatgatgctgcaaccactattcagaaagatgttttggaattttttaaatctaaaggatttgcaattacaggccaggttcctaagttgaaagccacttataacggcgggcttgatactttcattgatttctcaaaaatcacaggaagcttctttggttgtgatggtggagttgagttcaaatatgaaaataaagaatttacgcttaattactcgataaaacgtggaaaatccccggagcgtaattcttgggctggtaggcctgaagaaatgctactaaaagaaattgagttctatgagaaagaattattgccgtatttagagtcaactggtgtttcagacctaagcggcgaggtggttttgttctcaatggttaaaaacacaacaggtaaaccaactacgcagaagtatgaaagtgttgagcaagcactgaacagcctcatggattaa

SEQ ID NO: 194161 - DNA, 381 bp, Klebsiella oxytoca
atgactgccataaaaccattcaaacctctggacgagaaatttccgtttgaccgccaactcagtatcgcgaccgcgcctcttgtgctcatcaacctgtttacggtcgtcgagcccaccgacgaagcgggtttcctggacgctttcagggcggctgccggggtcattacgaagcaaccaggcttcatttccatgcaactacatcgggcgatcggcgatagtccgacttacctgaactatgtggtgtgggagtcaactgaggcggtccgcgccgccttcaccgatcccgcgttcctcgcgaaacttccggcatatccctcatccgtcgtggccagcccgcacctgttccagaaggtcgccgtcgccggcttctgcacggcctga

SEQ ID NO: 194162 - DNA, 135 bp, Klebsiella oxytoca
atgatagagttagtaaataaagcaaaaaataaatatttcacatggtggaacaaaaaagaactatcggagcaagtcgttttgattgcccttgttccgattgtctatggtatttggttagtggttacaacctggtaa

SEQ ID NO: 194163 - DNA, 249 bp, Klebsiella oxytoca
atgaaaaatgacaacctgttatcttctgatatctctatcaaaataaaaggaaaggaatatagtgaagttttattgttagcattaatagcattatattctattggctgtgcttgtggagttgcctttctggaacaagataaattcccaatcctctataacgtactgttgggtagtggatgtttaatcctactttgttggcctttgattattgcattgcttatggttatacgattaagattaaaaaaatag

SEQ ID NO: 194164 - DNA, 231 bp, Klebsiella oxytoca
gtgatcaaatcactaaacgattccattttattttcttttgctcctatagcaatgtttaaaccagttaaaattttactatttaaagcggaaaacattaatgaaacgatttctaattcagataaaattctaatgtgtctatatcttctgattgctgtatgttctatcattaaagcccttatttcattaaatgaattatatgataatcttaaaaatccagaaaaaaatagttaa

SEQ ID NO: 194165 - DNA, 333 bp, Klebsiella oxytoca
atggacacaatgcagcaagaggtgttagcactcttccgtgaagagattcccggatatttagacagcaattggaaagaaatccctttagaacttgattctgatttatttgaagctccaggcgatgacctgcatgaagctttagataaatttgaaaaaaaatttaatgtagatttatcacaggttaaatggtcgtattatttcccttgggagaatacaccactgcttacaagatggtttaaattaaaacgggaagatgtagaacgaactcgtaaacctttaactatcaatatgtttgccgaatcagcgaaagctgggaaatggctttatgattga

SEQ ID NO: 194166 - DNA, 225 bp, Klebsiella oxytoca
atgtacgcatatgacgctgacgacccccgtttgagtgatacgggggtaataccagacgatgacggtgccgcattttctgccgaggtagaactggtcattgagggttttgatagttctggatttcatctgcgcatcggtgactcctattattgtgcaaaaaatttagatgatctgatcgctgtttgtatcgatttttttggtggtggtaatgactattctcgttga

SEQ ID NO: 194167 - DNA, 330 bp, Klebsiella oxytoca
atgaaaactaacgaaccaatcccggcattagcgctgtatgacctactgcatatggcagcttccgcgatagaagacttgttggagcataccgaccctaatactaattattattctggtttgtgggcggatgttccaggtaagttgcgtgctgccgccatgctccaggctggaaactctccggtaattccagaggggtacgtgatggtgccgaaggagcctacgagggagattctcgacgagtttgattcaattatcgactatggcgcagaagactctgtagatgcctggcgcagactgctcgcagccgcccagcaggagccaaaaccatga

SEQ ID NO: 194168 - DNA, 150 bp, Klebsiella oxytoca
atgaaaatacgtatcgttttacaagaattaatggaagacggggttttgacaacatactcaaacggtcatgttgagatgctgccataccgaatagatgaaaatgggaaggagtacgttgagatgttccccaatgatattgagcaacattaa

SEQ ID NO: 194169 - DNA, 243 bp, Klebsiella oxytoca
atgactgatatcaccgaactggcgcagagagccagaatcaacgctgaatgtggtgagcatctttccccggcggagaccttggagctggtagaggcgctggagaaggcgcagcagcgcatcgccgatctggagtcacgcaccgtgaagattccatacttgcctgatgattgcgacagaatcgaagcgcactttaagtatcaggtagccattaacgccgctggcatcaaggtggaggctgaatga

SEQ ID NO: 194170 - DNA, 456 bp, Klebsiella oxytoca
atgactatcacactacaggcagtaaacgagctcatcgcttccctggagagcgcaggctggctgtcgatcaaagagacaaaggttatggcgctggcgaaagcgtttaagcagctggctgcggagaatgctcatctaaaaagccgaatgcaacggttgatatacatcatccgaaacgcagataacgattactgcatgtgtggtgatttgatgaaaagtcatgtgaccggcggatgtggatgcccaactggaatgtttgattatcactatgacaaatggcttgaggaagaggatgcagcccccgccaccgatcgcatcgtagccggcattaaggctgatggggtggaggagtttgcagcgcatcttcgcgctaatgataacggggcatcagtttgcaaaatgattgcgctcggagctgatgatttcgccaagcaactgcgcgagagggccgggaaatga

SEQ ID NO: 194171 - DNA, 873 bp, Klebsiella oxytoca
atgaacactgcagaaattctcaacttccccattgccgatatggggatacaggagcaacgcgtggccgatacagacgatggttacacccgtctggctaacgagctttacgaagagcttatcggttcaaacctgactaaaaatcaggccaaggtagctcatgcttattgccggaaaacctatgggttcaacaaaaagatggaccgcattgcagacactcagattgctcagttaacccggcttcctcgccagaaggttaacaccgcaaaaaaagagcttatcagcatgcgcgttctggttgaggaaggcgatcttattggccccaacaaaaatctgcatgagtggattttacctgaggctaaaaagggtccgagctgtcaccgccgcagtgacatgaagtgtcaccacgatagtgacagtcaccataatggtgacactgtccccacgatggtgacaaaaagtgtcaccacggtagtgacaggggtgtcaccaaaacagggacacacaaaagacactaatacaaaagacaataaagacaatagtaataacccccctaaatccccccgggcgcgttcgttcgatgctgccagtgttcaactgcctgaatggctatccgcagtcacctggtcttcatgggttgaataccgtcgtgacctgaaaaagccgatcaagtctcagcagaccgtgacgcaggctatcaatctgctcgaccgctgccgactgaagggttacgcgcctgaagaaattattaaccggagcatcgccaatggctggcagggtctgttcgagcctgacgggcaggctaagcgcagtcgcgatgccggtcaggaagacccccactggaacagcccggaagcgtggagggatttcctgtga

SEQ ID NO: 194172 - DNA, 285 bp, Klebsiella oxytoca
atgaacgcataccgcgcatatgacgtgatcgaagagcgtaagtgggccgaacagacgctcactgaagaaaagcagaagtggattgacgaccgggcgcaggaaattatcaacacgatgccaggagatctgcttcaacttttctatctgtctttacaaaccggccctcaaccgtacgaagggcttcgcagtgatgcggctggcgagatttataacgatttacgtacagctgtagcttacgtccaggcggaatacgactgggatcaccgcaccggctgcccgttttaa

SEQ ID NO: 194173 - DNA, 228 bp, Klebsiella oxytoca
atgagtaacgaagcgatgaaaatggcactagcaaagcagttaactattgccctgcaaaacctcggggcgcctgttgaattgctctgcattgttggtagttacggggatacccagactgacgctgacactcttgaaatgctcgaacaatacaacgatcgcggaacctgcatggatgtgattatcgctcctgagtttacatggaaaccaaattctggcggtgcagcatga

SEQ ID NO: 194174 - DNA, 243 bp, Klebsiella oxytoca
atgcagacaataatccaggtagagacaaatgattgggtttcagaagacctgttgatggcggttacaggcttgaagcgcggcaccattacgcgtgctcgtaaattatcctggctgctggggcgagagtacaagcatatttcttctgacggggatccaaagccccattgcgaatttatgtacaacagaaaagcggtagatgcctggatttatgccatgaaacagccaggggtagtgatcgattag

SEQ ID NO: 194175 - DNA, 924 bp, Klebsiella oxytoca; identical to SEQ ID NO: 169917

SEQ ID NO: 194176 - DNA, 372 bp, Klebsiella oxytoca
atgggtattaaaggcaggggcatgaacaacattcggcgcaacatgaatgcgctagtgagggacattaccgggcggcgcttacctcgcgcaatgacagccgctttgcatgaggccggactcgtagccgcaatctatacgccagttgacaccagcacgctgattaactcgcagtttaaagaggttattactaacgggacgcgcatcactggccgcatcggatattcagcgaattacgcaatctatgtcgcagatccgactatcccgcagaagttcaccctgcccagggccaggaaagagtttttgcagcatggtgttgctgatgcaaaaccgcagatggaggcagctttcctgcgagaattatcaaaacgctga

SEQ ID NO: 194177 - DNA, 2991 bp, Klebsiella oxytoca
atgagtaataattttggcaattattacattgaaattgacgctgatgtcttaccgttcctcaaggggatggacaaggtgcagagcactcttgatgctctttcggctgattcgaaaaatggcagtaaagccttcgataatttgagctcgtccgcatcgagtgccggaacctcatttaatgaacttgctggctacgcccgctcaatggatggctctctaaaatcgctcaacaccaatgtgaacgcgatcaccagggccatgcaaggtgccgggacgagtaccgcgggtgtaggttcggaattcaccagagcggaagcaatacttgagagtcttggcaaccagttggccatcctggatgaggcgcaggaaaatggcgcccgtagtgctgctgtgctagcggcgcagttgcgtgccggctcgaaagccactgatgaagaaaagcagaagattggcgaattgactggtcgtctctacgacatgaagactggcgtcgataccggggcgaaaagtcacggctcctggaaaaacagcatgcagcaggctggttatcaggttcaggattttatcattcaggtgcaaggtgggcagtcggctttggttgcttttgcccagcagggatcgcaattagctggcgcatttggtgcgggcggcgcagtggttggggctgtgattgcccttagctcggttgtcgctggcgcgctgattacgtcgcttaatggcggaaaaaacgccattgattcactgaaagatgctgccgaaacgatggataaggtgatcaccatttcgcaaaatggcgtggccgcactttccgacaaatatgcttatctggcgaaaactaacgccgaagtcgcaacgttgatgcgaaatcaggctctactggaatataacgaggctattaacaaaatacctaaagctatcagtgatgcttcaagctctctgctttcgtttggcgataaggccatatcagcattcgccggcggctttgcttctgtcgaagggttcaatgatcgtctttcagcactcgaaatcaccacggataactactctgaggcaattagtcaggcgtatggagctgggcaggtttttcaggcaacggcgaacagcatcggcaatacagtcggagcggtagcgggaaaattcggtattacagaacagaaagcttttgagctcagcaagcagctttctgacatcgcaaaaaatccatccccggaagcactacagcgattggcgacggaacttcagaaaaccagagagtcaactgatacagccactcctgctttaacggaatttatcggaaagctcgttttattatccaaagagtcggcaactgctaagggaaattataaatccctcaaagatgaaatggataattcaacgtctggacagaagaacctcatcaaacaatctgagcgcagtctgaaactgtcaaaattgcagggggaggctcgtgcacggcttcaggctcagtttgctgcggaggatgccgggtttgacaaaaacgaccctcgcgtaacccgcatgaaagatgaggcggccgcaacttaccgtaacacccaggctcagaaggatctcaagtctcagcagactgctggagcgacagccgcggagtctatcgcccagaagctggcgaatttgaagcagcaggcagagttagccgccggttcaacccaggagcttagccgcgaatcagcgatgctgcgcgccgaacaatcccttggtaaatcagcctcagccgatcagatacagcaggccagagcttacgctgccgccgtttgggatactacggcagcattgaaggcacgcaatgccgtacctgagcttaaagagaacgcggactacacagcccagaaatcgcagcttgagatgattaagggcgccaaagacgcacagggaaatttgattatctcgcagaagcaatacaaccaggcttctgagcaattagagcagcagcaccaggttaatctggcgaaaattcgagccgggcaggttgtgacaccccagcagcaggcccagggggaagttgatccggtacagcggcttgccaaccagcacgcccaggagctggcgcttatccagcagtttgaaacccaaaaaggggcgctcacagctaacggtcttgcgttgatgaacgcagctaatacgcaatatgagcaggcgagaatagccgcgcagtgggagatattccgcaatcaaagcacaacaaatgagttgatggcctcggcggttgatgggttcgccagtcaggcggctaactcgttgacaggcctgattgatggaacacaaagcgcttcggaagcgttcagaaatctagggagcgcgatcgcaaatagtgttgttcaggcgttggtagaggtgggaatccagtatctgaaaaatgctgcgatggcgatggtcgccgatgaaatgacatcaaggtcatctcaaaaggctggcgttcaaacagccgcagcctgggcccctgccgctgccgccgcatctgtagctacttttggcggtgctgctattgccggtattgctggcatggtagcagcgttcgccatcggtgccgctttggccggcaaacgcaaaaatggcggtacggtaggcgctggtggggcgtatcaggttggcgaagggaatatgcctgaactcctgcagaccaaaaacgggttaattatgattcctggtgatcgaggcagagtgttcagcaataaggatgttaccggcagttctccgactatccagaaggcgtctacgggtaaagaatacctaacaacttcatcagcatcatccagtcaatcgggagatagctctaaacggtcgatacaggtaaatatccagctgatagatcagacaaccggcagtcagcacaacatcacgggcactgaagctttccagcaaggtgacgtggtaacagttactggatttctcaatgacgtggataccggcggcccaatgtccacagcgatcgcagatgcgcacgggcttagacggcaggcaaggggcgccttttaa

SEQ ID NO: 194178 - DNA, 327 bp, Klebsiella oxytoca
atggaacaactacaacgactggccgaggctatcgctgaaacctacatccgcgatctgcgccgggaaacaggagataatgtcattaccgttgatggcgtcagcggcaatgttgaaacgcaccttttagccgcggggctggtggataactcagtttcagcagccaaaaaccaatacggggcgacatttgaacgtgaggcatatcaaatgttactgcggttaatttcactcgatggcccggagtatcgtctgactgagcatggtgcttacgtcattaccttcatgacgactaaggctttaaaaaaacagtcttccacgacagtacactga

SEQ ID NO: 194179 - DNA, 171 bp, Klebsiella oxytoca
atggcaacaccatccgtaaaacccgttcttctcagcttggagcagatcgagaaactccggacgctgcaggaaaatgaacggaagaaatcaccgctgggcattgctcccaccatccacgttatcgcgcgtcagttgatggatcgcgctttaagcacacaaatggaggcgtaa

SEQ ID NO: 194180 - DNA, 375 bp, Klebsiella oxytoca
atgagaaaggcgctggcatgttttgcattgctgtttttaattgctggatgcgatgaaagcagcaaaacaatcataactgatggggctgataccgcgataaagatgtttaaatccgaaatgaatgagggtgatcaccctccgtttatttataagaatcttgctttcaaaccggaccaccaaaactcaagcgaagtgttaagtggctgggtttgcggggaggggagcatggtacgcgacacgaaaacctatgatttcaagtttagaggtcatgtcataaaaacaaacggagtttcttatgtaggtgatcttgcggccctactctctgatacagaaatggcagaatatgacattctgtacaataaatactgtaagtaa

SEQ ID NO: 194181 - DNA, 750 bp, Klebsiella oxytoca
atggttaagttaatccctgaaaggcttaaagaaaatgctcttgttaatgttctgtttgagattaggttttcatcagaaaacaatacattttctaacattatgcctgggatattatttactgagctgagtttaaagaattcctttcggacccctcattttgaaatgcctgaaataattaggcaacagaacgcagatttcaaataccttccattagttggttttatatggggggattataatattttgctaggagataatgtgctgttgctttcagttaacagtcggtatcctggttgggagacgttcaaaaagcacatatgcattttgatgaacattgtaaaaaaacacgatttaataagtgttgtagagcgtttttctcttaaatacgttgatataattgaatatccttccgctgaaaatatcggcgaacaattaaatatgtgtattagcttaggtgatgaaaactatctcgacccttacctacacctcagaagtgagaagcacgaaggggacgtagtaattatcattcagctagctggcaatgctcgagcagaaggaccagcaataaaaacaagagaaggttttatgattgatattgactgtataataaacaagcgaaatctaacttttgagaatgttatacaaaattttgaaagcgagcttgactcattacatcataaaaataaaactgttttctttaacttcctaactgataaagccttagctaacttaggagccgtatatgagtga

SEQ ID NO: 194182 - DNA, 576 bp, Klebsiella oxytoca
atgagtgacgttttaactattacaatatcaaacggaattagctcatctaactctgcaggggttgtttttggcaatacgatgcaactcagcaaagaccgtaatataagctaccgtaagaaggcagaaactgttttaagcaagcaatataattctaaaggtgaaggtgaggtttattccattttagaacgatttactacggaagcattaaggtcatttattgatcgtaaaaggagtgatatactaaaatacagcgaaatattcaatctatttgaaaagctcaaagatgtcaatacgttaggtgcggaagaaatagaccgacagactttacgctccgctgacttctttatgaggaattatgtggcagcctttggtttgactgcgccaaaaataaaaatttttgatgatggtgagctttcatttttttggaacgataagtcatgtgctgtagacttaacagtagaaccagatgagacttattctttttatgctaaaaataaaaatgagaggaaaggtataaaaggtaattataatattagtattacccctccagaacaattactgtcaatgcttaagtga

SEQ ID NO: 194183 - DNA, 483 bp, Klebsiella oxytoca
atggtatataattttgaaggtagtgataaaatatgtcgcgttgttttctcaccagaggatgttagttcgagtggtgagtttgagaaatcatctgtaaaaagatcggatttgcaaggaaagggatttagcgtcgacttgaaaaaattgcttgatatacaggagttgatggcaagggtatcaaaacagcaggctaacgtccctgataagaggaaagatatttttattggagtattcttgcttgaaaagcttatgggaatagttgacgacgataatgaagatgttatgtttgaaattatctatgatccagtaaaagatgatgaaaccggggagattataaatccagcgcattgtttgatcttatgttgtaagaaagctgaaaataggcctcattataacgaggcccgattaaaattaaatgaattaatgtcaagcctacagcatatgagccagtttgttgtaaagtgttttcctggggcaatttaa

SEQ ID NO: 194184 - DNA, 333 bp, Klebsiella oxytoca
gtgcttcctgacttccgcaacctgtttatgtattcgcctaacggtaaaaaggacggcatccagatcatcccgctgtcggaggtcgcggcgaaatatgagtttctgaacatcaagaatgcgacccgcgatgacatgatggcagcacaccgcgtaccgccgcagatgatggggattatcccgaacaacactggcggtttcggtgatgtggaaaaggccagtcgcgtgtttgttcgcaatgaattaatccctttgcaaaaaaggttcgaagaattaaatgattggctaagtgacgaagtcattagattccaactctataccttggaagagaattag

SEQ ID NO: 194185 - DNA, 240 bp, Klebsiella oxytoca
atgccgcgtttttacgaaattgaggtcgcctgccgcaatgcgatcgagatacagcctaacggccggcgcatccttactacccggcgatttctgcaggagctggagcggtataactggtactggtcgccacggcaggccaatcagtggatagagggctacgtgacgacattccgggatgtctcaacgcaggagggggacgagcgcacgtttcagttatacaacccgaacggagggctgtaa

SEQ ID NO: 194186 - DNA, 174 bp, Klebsiella oxytoca
atgacacctgaagagtatctttcgccagaatggagcgacagggaaaaggttcacgactggaaaaactatgccaacgatggactgatcgagatatgggataattttacgcaggaacaaaagcggataattgcgaaaaatctacaggaagtagccgataaggaatggtgggaataa

SEQ ID NO: 194187 - DNA, 600 bp, Klebsiella oxytoca
atgagtgttgttgaaacattgagagaactgtccgaagtttggcagttatttggtgatatgcctgatgacactacgttaggtgtcgatttagcggcactctaccttggtataagtgtcaaaactcttgcccgttatcgtcagaacggtgatggaccaaactacatccagtatcaatctgaagacagtaaagccagaaaccagcgggttaattacctattgaaagaccttcgttcctggagagatagccatagagtcagtagcacaatgcacgctgctcaagttcggggattagcatttacatgcctatctgatttcaccgagcctcaacctttctggcgaatcaccaacaatactggctctacaagtaaaataatatcccatgcactcactatccctgatgaaagctttaagcaaattcttttagagcctaatgcagaagttatttggatctctattgaggaagctctctttgtatcatggataaataaagatgaacgttctatttggcacaagatgtttatcttaacactaaataatattgtttctgcatcggcggccgaacaggaaagatatatcttgaaagatatctttgatgattaa

SEQ ID NO: 194188 - DNA, 675 bp, Klebsiella oxytoca
atgaagataaaggaagcagcggctgttttaagaaagaatgagtatgaagcatggatcagacgactcaactggaaatttatggatgaacgtatccagaatgaatttaacaattgcaagcttgatgcttcaagtgtagatgagttagggatgttatatttaggaaaggtgaaagatgattctaaagaatataaaaaatatcttagcactcaatatatcaatgctacacatatagtaacaggcagtagatatatagatattaatcttttggataaggaaaaaggttctcttattcaagggtatgaatcaagtgcacaattatggtactctcaaggaacatctggggatgtcatagtatttgttggcccttataaatccaaactatgtgaaatgaatgagaatgatatcataattggccgttatcgaaacccataccaagtgaatgaattggttattaaaaaacatttttcaattttctttagatattgtacatgcacgtcgtataattctactttaagctttaaagcctatttatataggcaatatcttgtgttcaatgatttaagatttaaagcaagatattggcaaaaaattataaaaatcggagagcgagtgcttatagttgctctatctaccgcagcagtattagtttctctttatgtaggcgggaagctataa

SEQ ID NO: 194189 - DNA, 825 bp, Klebsiella oxytoca
atgtgtgatgcgaccggtctgtcgcaacgtcgtgcctgccggcttacaggtttgtccctgtcgacctgccgttatgaggctcagcgtccggcggctgatgcgtatttatcagggcgcatcactgagctggcactggagcgcaggcgttttggctaccgccgcatctggcagttactgcgccgtgaaggctttcatgttaatcacaagcgtgtgtaccgcctttatcatctgagcgggctgggcgtaaaacgcaggcgacgtcgtaaagggctggctacagaacgtctgccgctgctccgcccggatgcgcctaacctgacctggtcgatggattttgtcatggatgcacttgccagcggccgccggattaagtgcctgacttgtgtggatgatttcacgaaggagtgtctgacgatcaccgctgctttcggtatttcaggtgttcaggtcacgcgtattctggacagcatcgcgctctttcgtggctatccggcgacaataagaaccgatcagggcccggagttcacttgccgcgcactggatcaatgggcttttgagcatggtgttgagttgcgcttaatccagccaggtaagccaacgcagaacggatttattgagagtttcaacggtcgctttcgggatgaatgcctgaatgaacactggttcagcgatattcttcatgcccggaaaatcattaacgactggcggcaggactacaacgagtccagaccccattcatcgctgaattaccagacgccggctgaatttgcagcaagctggagaaatggaaaattagaaggtaaacaaacggacattactaactga

SEQ ID NO: 194190 - DNA, 228 bp, Klebsiella oxytoca
atgtcaaccaatatgtacccttaccatggactgctcttgataatgagcgaggggatggtaatggatgttcaggtaaaacagttagtgatgtgcaaacgggaaataaagggacaatatcactacgtatttcaaaaccatttattggtagctcgactatttcgagtgttcatgttgctgatatatatgtggggcgttctgctacgggggattatggtagtcaacctatag

SEQ ID NO: 194191 - DNA, 558 bp, Klebsiella oxytoca
atgactatcacactacaagtaaacaagctcattcagtcgctggagagtgcgggcgagctgtcgatcagagagcggaagtatctggagttggcgaaagcttaccagcagctggctgcggagaatgtggcgctgaaggctggagcttcgtatttctcttacggctctgagcacaatttcgagtggcacaaaacggctgaggaagctgtcgaggcggctgaagctgcaattgacgactatcgaggggatgcttgcgacggatggagtgaagaggtcgatagcatctgctggggaatcatcatgcaatcttcaacgaaggttggcgaacgcccacgcaacgaagatgaccgttgtgatcccgcaatcgatacggtttgcgattatgcgctgttgccgaatatcgaaacccccgccaccgatctcatcgtagccgggattaaggatgatggggtggaagagtgggtttccagcagaggtggacgctggaatggaacgaccgaagaagcgctgaagttcgccaaacatctgcgggaaggtaaatcagaggaggttaaatcatga

SEQ ID NO: 194192 - DNA, 363 bp, Klebsiella oxytoca
atgagctgcggatatcaaggttatgagtttggtgcacattacccggatagcatttgctgtgatggctacctctgggatgctgacagcggtgacgaaatggggatggataacggcggagatattccttgcccggtctgtaatcgtaaggaatggctggctttctaccgtgatgaaatcattgagtgcggcatggagcaggcagagcgaaaacgcggacctaaaactgtgaaatacggtggcttccctgagccaatacgttttgatgcaaaggctatgcgcagcattcgtcgcttgttgcgccgtggctggtatcagggcaggaaatattacgccaagcagcttcgcgagggggccgacaaatga

SEQ ID NO: 194193 - DNA, 258 bp, Klebsiella oxytoca
atgagcactagacgcaaaattaacaaaatcatcaaggggaaaggcctgtctgctgaagtttcatacgacggaactggagcaagtcgtgatgaatatggttggtggactgtgacattcaatcctgagtctgccgatttcattcgactgaaacttaatgagcctgagtttactggggttatcgaattctgcgaaatcgaggatgggcttgagcaactttcagaaatgccatcaatggcaacccaggagcgtgcagcatga

SEQ ID NO: 194194 - DNA, 291 bp, Klebsiella oxytoca
atgacaactgatatcaccgaactggcgcagagcctgaaagcggcagcaaataaagcaggtgctgatggctggcagacaaagaaaattagcggtgacttttacgttattcgaaaaggtagttacagttcccaatgtggctattgtacttatcaacccattgcagaaataggccataagtcgacaagggattatgtcgctatcgctagccctgctaacatcatcgcgctggtagaggcgctggtgagggctaatttaccggagatgtgcctgaaaaaagacattgcagcatga

SEQ ID NO: 194195 - DNA, 303 bp, Klebsiella oxytoca
gtgagtatggcgaaccttcgcaaagcggcccgaggtcgcgaatgtacagtgcggatccctggttactgcaacggcaacccggaaaccagcgtgttggcgcattaccgcctggcgggtacgtgcggcacaggatgcaagcctgacgatactcaggcggcgatcgcctgcaacgggtgccatgacgtaatcgacggcagaaccaaaaccaccgatttcacctacgacgaattgcgcctgatgcacgcagagggggtaatgcgcaccctggaaatctggcgaaaagagggactcatcaaatcatga

SEQ ID NO: 194196 - DNA, 276 bp, Klebsiella oxytoca
atgagccttgaatttatcagcgggctggtagtcgttctgcttggcttaatcgctggcgcgtttgggttaggccatgcgcgcgggaccagcaaggcggaagccaaagccgagcagcagcgcactgaagaaaacgccgctgctaccgtcgccgcggcagagcgccgggctgatgcaacgaaaggggccagtgatgtacaggaagacgttaagcgtatgggcgatgacgatgttgatcgcgagctgcgcgaaagatttacccgccccggtggtggttga

SEQ ID NO: 194197 - DNA, 240 bp, Klebsiella oxytoca
atgcaaagtatgagtcgcagagggaattgcctggataattcgccgatggaaagagtctttcgcagccttaaaagtgaatggcttccgaaaggtggttatggtgattttagccattcggtacgcgatataaaccagtggattaatggttattacaacgtttatcgacctcacacgaacaacgatggtttaccgccttgcttacatgaagaaaagtggaaacagattatcccggtgtcctga

SEQ ID NO: 194198 - DNA, 318 bp, Klebsiella oxytoca
atgatcaaaactcgtcggactaaacgtaccttttccccggagttcaagcttgaagctatcgaacaggtggttaaataccagcgtgatgtcagagaagtcgcgctggcactcgagctcaaccctgaccatttgcgtaaatggatacggttgtataagcaggaacttcagggtattgagcccgctggtaatgctattacccctgaacaacgcgaaattcagcagcttaaagcgcggataaagcgccttgagatggaaaaagaaatactaaagcaggctgccgtgctgatgagcgaaatccccgggaagccgtcgcgctaa

SEQ ID NO: 194199 - DNA, 408 bp, Klebsiella oxytoca
atggctggacgggattaccgaatagatccggatctgctccgggctatttcatggcaagagtcaaaatgggtggtgaatgccatcgggaaaaacccgggaacaggatatggtgccggactgatgcaaatcgattcgcagcaccatactcaactttcgcaatacggtattaaaccggaacagcttctgacagatgcctgtctgaatatttacaccggtgcgtattatctggcactggcgtttaagaaatggggcgtcagctgggaggcggtcggtgcctacaatgcggggttccgcagaacggacaggcaggccatgcgacgactggtgtatgcgagaaagattgaggccatctacagggccatcaaaacaaataaaaatcccggacaaccccgacctgttaaaaagtaa

SEQ ID NO: 194200 - DNA, 531 bp, Klebsiella oxytoca
atgcacacaattaacgtcaacaccgccactcgtgaatcagacgaacaatttaaaacagacaagtatctgcgctatgcagtaatcgacagtgatgaacgtcaggattttatcccggcactctttgccaccccgtcagcggataatatggccgcgagctggttacgccagcattccgattacgacggcgggttatggtcttactggattgttccgcagggagtcggaggaaatattacgcccaaccgcatccagttcatcaccacgcagaccggatatatcgcgccggaaggtgagcagcgttacaggatgcgcattcctggaaattattttgagggtgaagtcagcgccgatgcagcaggaattattgccacgctgatgattatgaaccggctgtcctggcaggtggctgagatgggaccggaatatgcccgtgtctgtagacatctcgtttcacggcaggatgcgctgaaggtttatctcagtattattcatcatcccgaaagccatttaatctggcgggcgattgattag

SEQ ID NO: 194201 - DNA, 834 bp, Klebsiella oxytoca
atgtcacagctgagttttgccgatgtgttcaatatggccagagagagcgctgacaaaagaccggtcacacaggacatgctgcaggggatcgaatgtgtgccctctgtgcagaagatgatgagtgcgcactatagccggagccgtttcatcagcgtgtttaaatccacgggccgccatctggggcgctgggaagtgttcagtgactttttgtcactcgctgccagtgaactggatatcgcccggataagaacgccggagagcatggagcactgccggaaaatcagtgcgcgatacgaggcgtcagatatcgcgaatatgcaggagatgttttgcctgatggtgtgtgcgctggaggcaaaattccatgatttcctcggtgccattttcatggagcttgagctgggcgataacttccgcgggcagtattttaccccttattcggtccagtgcctgatggcgcggatgctgatgccgggtgtcagggacactatccgccgggaaggcattgctaccgtcagcgacccggcctgcggggctgccgggatgcttattgcgtatgcggagtgtctgcttgaggcggatatcaatccttccatgcacatgtttggcagttgcatcgatatcgacccggtggcggcagatatggccttcatccagctgtcactgctggggattgcggcggaagtggtgacgggtaacacgttaacaatgaagtttaacagggtaaggtataccccggtttattacttcaatgactttgaaaaacggctggcagacctgggccggttcagggcgatgcgggactttttgcgcggaataccggaggccgcgtaa

SEQ ID NO: 194202 - DNA, 147 bp, Klebsiella oxytoca
atgaaatttgaccctcaaatcgtcgcacaggcgaacgagtttgtaaatgccttacgcagtggtaagcgtgcccacgtccccgctatgcgtctggaatactggcagcagttcatggccacggtatacgccggcctcggtctggcgtga

SEQ ID NO: 194203 - DNA, 348 bp, Klebsiella oxytoca
atgtacttacacctgactgaatcttccgccgttccgggaatgcaggctactgctgaagcggaacgcgaatactggctgagtcgccagaaaacggcggtaaaagcccccgctgaaatagacgtccacgccttccatgatgcgctgggcctgatgtacccgctcaactggtcaacgagcgaaagcggcagctgggagacgttcatgctgcaggaaatggtctgcggggacgtgacagagatttacgcccgctacggagccagatattaccggctgcgggatgtgtgcaacctgagccatgagcagataaagacgcgcattaaggaggcactgaaactggcccagaaatga

SEQ ID NO: 194204 - DNA, 324 bp, Klebsiella oxytoca
atggaccgtcgaaatatgaacctccgcactgacggctttgtgcgcaacattcactcccgtaacccgttcgatgttatccgcgccgatgtggtgctggcacgtatcgagaaagaggcggggcgctgctgcggtatgcacttcgaactgtatcaggcgcgtgtgctgggcgatgcgctggattatctggacgccctgccgctgaaagaccgccctgtactcatgggcgcggcggcaaagcgtggttacatcctgacgttttcggaagaagagcacgcgctggaagcaaaagatgtgctgatgagcgaactggcggcaaacgaataa

SEQ ID NO: 194205 - DNA, 219 bp, Klebsiella oxytoca
atgaacacacacaacgtcaacgtcaaaaccgccaccaaagaatcttccgaaagatgggttatggcctgcccggaaccgatcgcagcaaaggtgctggcatttcacggacagagcgccagctatgcatttaatgtcctggctgatttgaaagctgtcggtgcgtcatatgcacgacgaaacattatcgcagatatgtttcgtcgtttaggtgtgaagtaa

SEQ ID NO: 194206 - DNA, 267 bp, Klebsiella oxytoca
atgaaaaaatcacgtttcaccgacagccaaatcatgaccattctgaaacaggctgaagccggaacaccggtccctgagctgtgccgggaacatggcttcagcagcgccagcttctataaatggcggtcaaagtttggcgggatggatgcctctctgatggcgcgtctcaaagaactggaagatgaaaatcggcgtcttaagaaaatgtatgccgaagagcgacttaaagctgaagttattcaggaagctatgtcaaaaaagtggtga

SEQ ID NO: 194207 - DNA, 801 bp, Klebsiella oxytoca
atggccagacacgccgtcagcacgcagcaaatcagtatccgcctggccagccagattttttctgtcagtgaaacgtgctatcgatatctgccacgtctttctgtagaaaatcagcgtattgctggctggctactgcgcattacaggcagccagcggaactggggttttggtttgtgctttttgtacctgcgtaatgtgaaaggttttcgctggaaccataaacgcgtttatcgaatttactgcgaattatcactgaatatgcggatcaaacctaaaaagaggctgaagcgtgataagccagagccgcttgcggtgccggaatacagcaacgaatgctggtcaatggacttcatgcatgatcagctttcagatggccgttcagttcggcttttgaacattattgatgacttcaaccgggaagccctggcaatagaagtggacttctcgctgccgtccagtcgggtaaaacgcacacttgagcagatcattgaatggcgaggtaaacccgccgcaatcagatgtgacaacggcccggaatacacgagccacgaattaataaactgggcggaggataacggaataaaactcaactttattcagccgggaaatccgcaacaaaacgcttatattgagcgctataaccggacagtgcgttatgactggctggggcagtatttattttgttcgctggatgaattacaacgctacgcgacagaatggcagtggttttataatcacgaaaggccgaatatggcactgggtggttatacgccaagacaacatgagctgcgcacagcctaa

SEQ ID NO: 194208 - DNA, 381 bp, Klebsiella oxytoca
ttgccgaacataaaggcgacgctgtgcgaaattatcggcggcgcggtatccggcggtaaaacctcgcatcaggagacgctgcagggcagcgtggacgctatcttcaactgcatgaccaccattattctcagcccggaagcgttcgatgcgccggatatgcagcgcgagaccgaagcgtttatcgactggtgtaaacggtcgccgcacgacccggacgcgccgattctggccccgggcgagtgggaagaggctaaccgccagcagcgtctggcgcaggggataccgctggacgccggcagctggcaggcgatttgcgccgccgccgaagaagtcggtttacccgccgacaccctcgcgcagctgcgccagaagctggcctga

SEQ ID NO: 194209 - DNA, 636 bp, Klebsiella oxytoca; identical to SEQ ID NO: 104002

SEQ ID NO: 194210 - DNA, 861 bp, Klebsiella oxytoca
atgaaaaaagtgcttacctacttttatgaacatcccgtgttcgctgcattaagtacattcagtatttatttattgatagtatttttattaacaactttctttccttggttaagcactcatatactaccgaatacctttgccggcctttataataaacaattctgggaaggggttttagtaaacctaaactcatcagtagttgacttttttgtttttggggtaatcttattctatttccacaaaaagggagagagcaattccattgtatcttcgatgcttgatgaattaagtgacattgctaaatatgacgacatccagctaaacttaaggaaagtaggaatattaaaaagactatcatcacttggtcatgatatatatacactacatcgaatcgcaattggaggcgatggagttgaaattcgtgatgttaagataagaaaatcggatcttactgctttgaatgcgaaaaaagtatatataaacacactttctgtaattgaaacttctttaagatcgtcagatttttcagaaagcaaaataagaaacgcaaggtttgagcattgtaattttagaaatactaattttgaaagaacgacatctgtggggaataaattcaataactgtgattttaaaaatacaaacttcaaaaacagtaactttaaaagttcaatttttgtaggttcgagttttgaaggtgtaaattttgaaggttgcaatttaaatcgtacaaacttaaaaaacgctacaaatatagatataactgaactatgtaaggcgtccgatcttcattatataattgcggaacaaaacataattagtcaaattaaaataatgaggccagatgttaaattttccaaatga

SEQ ID NO: 194211 - DNA, 1677 bp, Klebsiella oxytoca
atggatttgtttcttgttgtagttttgctgttagccttactcgcccccattctggctgtcattttgctcaagaagagcaaacaacataagatcgagatcgaggcacttaatcatcaaaagatagctctttcgaatgaattgagtgaaagccaagaacatttagcgaacgctgttcgagagcactcagaactggaaggaagagctgctcctttgtggcaatatgaagaactgcatagtgctgttctgaatgcagaaaagacgataaaaacagcagactcgattgctaagagcacagtaaatgaagcacaacttaaagcctccagcatcgttttagaagcaaataatcaagcccgactaacgataagtaatgccaacaacgaagcagttgtaataactaaagatgctcgcgatgctcgcttaaaagccaaggaacgattggataacgccaatagtagggccgatgagctaatctccaatgctaacgacaatgcaatgaaaatagtcgctgatgcagagagcagagcaaaagaaatcgctggttctgcatatgaagcgaaagaatttgcagaaacctaccaagctgtagccaagtcaatgaaaaataaaattgaaggttacggtgatgaatggattgttccaaaccgaagcgttctggatgaacttgctgagaattatgaatttactgatgcaggcagagaacttcaaaaagccagagagttaacaaaatctttaatcaaaacgagcaaagcggcaagttgtgactatgtcgaacctaatagacgtaacactgcaataaaatttgtattagatgcgtttaatggaaaagttgatagtacactttctaaaatcaaacataacaattacggtaaactttcccaggaaattaaagacgcatttcaacttgtgaattataacggctcagcatttaggtcggctaagataactgatatatacttacaagcccgactcaacgaactgaaatggggcgttgcagttaatgaaattatgctcgaagaaaaagaagaacaaaggcgcatcaaagagcagttacgcgaagaagagaaagcacgtcgagaatacgaaagagcgataaaagaagccgagaaagaagaaaaagcaattcagcaggctatagacaaggcgactaaagagctaatgcttgcaggtgaagagcaacgactcgctcttgagcagaaactggctgaattacaaattaaattcgaagaggctgaggccaaaaaccaacgagccatttcgatggctcaacaaacacgctcaggccatgtctatgttattagtaatataggttcgttcggtgaggatgtgtacaaaattggtatgacgcgtcgccttgaacctctagaccgtgttcgtgaacttggtgatgccagtgttccattcgcctttgatgtacatgcaatgatctacagtgatgatgcaccatcattagagaatcacttgcataaagtatttaatgaaaaacaggttaacaaggtcaattctcggaaagaattctttaatgtcggcattaaggatattaaatctactgtagccaatatgaatatcgatgcgcattggacgatgtttgccgatgccaaagaatatagagaatctctcgcaattgagaatgaacgcacagcagcgcaggctgcaaatgaagaactcgttgttgcctga

SEQ ID NO: 194212 - DNA, 597 bp, Klebsiella oxytoca
atgtcaacatcaaagtacccaaatgagatcaaaataaatcccaatcagggaggaaaagctgcgattgaacgattggtagaggcgtatggttttacaactcggcaggcattagccgatcacctagatgtctcaaagagcactttggctaacaggtacatgcgggacacgttccctgctgactggataatccagtgcgccctcgaaactggtgtatctctcaattggttaaccactgggcagggtcttaagcaaagctcgaaaacagcgactactgaagaactggcgcagttttccttcactgctggcaaaatggttgaagatggttcttgcgtttttgacgcatcatttcttcctaccaatctttcatccccgattgttgttcgtgatggccgtaccacatacatctgtgatcaaaaattcacggaagtattagatgggcattggttgatcaatatcgatgggacctattccgttagactgattacgagactgccaaaaggcatgattaaaatctctactgcagaaaatagttttgagtgtgctttttcagatatagaagtcattgcatgtataagaagcacaacagttacatactga

SEQ ID NO: 194213 - DNA, 201 bp, Klebsiella oxytoca
atgctgaacaatgaaccctcatttgcgtctcttctcgttaagcaaagcccggcaatgcactgcggccatggctggatcatggggaaagatggtaagcgctggcatccgtgccgctcgcaggatgcacttctagccgaactgtccactatccaacaggggaaaccatggctattgaaggtcctgcagcgactgttccactga

SEQ ID NO: 194214 - DNA, 567 bp, Klebsiella oxytoca
gtgaatgaatctatcattgcagtaattatagcatttttagccgcaatcggcgcaatgattagccttgtgattactaaggaactaaaaacatctgagttccgtcaggcatggatctctgaattaaggcaagctctttcaaacttacttggatattatgaggtattgaaaaaagactcgatagcttcagatgaagatcgtaaatctgcatacagaggaattacagtaattcaatcagaaatttatctcaggctcaatcatagtaacccttcaacagaagagataacgctaagagaagccattaaatcacttaatattaaagtgacttctggaacaccttcatctgaattaaaagatgatatcaataacttcactatggcaagccataatgtattaaaaaaggaatggaaccgagtgaaaagaggtgagctattatacttttcgatgaagtggttatgcattgctgtctttgtaatatgcctgattgctttggctgtatttatttgcaatcattggtcggtaatggttgatgtgttattggggcgtgactttgttatcttgagtttatag

SEQ ID NO: 194215 - DNA, 474 bp, Klebsiella oxytoca
atggcggatattatctatccggatgagtacctgcccatgccacttatggacgggtacggttttaagcccatatcacctttactgcgaacggaaatgacgtccggtcgcgcaaggcagcggcggcgatacacctcaacacccactcaggcatcagtgaaatggatttttcagactgatgcgctggcgcaggtgtttgaggcctttttccgggacgcactgaaagacggacagtcctggttctatctgaggctccagaccccgatcggggtaaagccctataaagccaggtttattgatatttacgaaggtccgacacttgtcgcaccgaaatactggcagtacagcgcaacgctggagttatgggaacgtccgttaccgcctgccgggtggggcaattatccggaatggctcgctggccagtcattgctcgatattgcactgaataaggagtggccagagcatgacgattcttga

SEQ ID NO: 194216 - DNA, 486 bp, Klebsiella oxytoca
atgacgattcttgagcaactttatgccagtagcggctctgaagtcattcacgacacgttgcagatcacggcaggtgatcagaactactggcttacccgtgggtgggacaatatcactgtcacattagaagacgggcagcaggcaacttttgagggatgcgctatcgatattgcgttacctgcaaggaatgccgatggcacacaagacctgaaatttgccatcagtaatgttgacggtgtggtatctgatgcgattgacagaattctggacgaaatgaaatcggcaacactgacttttcggcggtatatctcctctgatttatctgcacctgcggcatcgccttacacccttgatgtgaaatccggatcgtggacggcaactgcggtgcaggtaactgccggatatatgaacatccttaaaacggcctggccgcgtaatcgttataacctggctgaacatcctggtcttcgttacatgtcttcctga

SEQ ID NO: 194217 - DNA, 381 bp, Klebsiella oxytoca
atgttccattctgataaatacctttcggtcaaatggctgaagggcgggcgagtttatcctgagctcgactgtttcggcatcatcaatgaaatccgcggcgatctccttctcccgttatggccggatttttccggcgtgacgaaagatgagggagggctcgatcgtgaggccaggaagtttatgaaatctctcacacgctgtgagccttgtgtcggggccggggtagcttgttattcaggatcaaccgtgacgcatgttggtatcgtagttttactggatggccagttgcaggttgcagaatgtaatccgggaaccaatgtcacctttctacctcttccgcgatttgttcgtcggtttaaccgtgtggagttctggcaatga

SEQ ID NO: 194218 - DNA, 3084 bp, Klebsiella oxytoca
atgacgataaggatttacccttcccggctccccggagaaccgcttgaaactcatgagcacggtaatattacgctgcatcaatggatgttcagaaatgttccagggtacagccaggacagatcgcacccagttgccgttgaattaaatggtcgcacacttcctcccgatgagtggccgctttgccagttgagcccggacagtgatgtcagaatttatcctgttccctatggaaccgggctggaaattgccgtctgggtttctgttgcaatatcagctgccagtgctgtctactcgttgttcttcgggccgaaagtcgacctcggtggttattcatcgggtagcggtcgttcgctggagctaaacccggcaaaagctaacacggcgaaacttggagacccgatacgtgaggtgtttggtcgatgccgtatctatcctgattatctggtgcagccggttacccgttttgaccccgatgatccaacgcgaatgacggtcgaaatgtttctctgtgtcgggcaggggaggttttcgtttacgggaggagataaacgaattggagaaaccccggcagcctcgctgggtaatggtttcagcgataaggtgtaccagccaggagaggacgtatcttctgatccgcgaagtgaaaactggttcaactcgacagaggtaggcggaacatcaagcggaacagggctggatatggcccagacgtcgcctgattccgacgatattattgctgacagcatgactgtttctggtgcatccgtaacgttcacagggctggacacggatgatggtgacgatgacgacgaggatgataactctctgcctgcaagttgggtcgcaggaactatcgttgagattaaagcccccaccaacttccttatctccacctcatcaggttacagcgtatttgccagcaaactactgactgaaatcgcgccggtggttgggatgccagtaacgttgagttttaacagtgttgattacgatctctttattgcagcctgtacgccgggacaggatgccataccgggagagggcggcagtgcggctaaaattcagtccagcgcggcaccgacaacttacgatttctcgctgggcagcacaacgtttacggtgacctggcacggaacaacttataccgtctctcttgttgctgattatgtgaatatgtccggccttctggctgcaattactgagggactgaccggctccggcctggtggcgcaggataatggcggaatcgtactaatcactgaagaggcgagcccgtttgcgggtggagaaatctcatcatcatcgctcccggtagcggtctttggcgatgcgcctgtttataccgcaggcagtgaatcaaccggcggcagcgccgctatcaccgcaaatgtcacgctggcctataacagttcgacgggtacccctttctcagggatgccggagggaacgcagcgcctttccctgtctcatcgtggcagtgagtaccagattgtaactactgacggaacaacggcaacggttgcacgccttgttgatggtgccattgatgcttcatggccagggttctccggcagaacgatgattgactatgaagccacggggcttaatgacacgctgagctggctgggaccgtttcttgcctgccctgaaaatgaagttgtggacgcctttgaggtgaatttctcctttcctaacggcatctgcggttttgataacaagggcaagaaacgcatccggcatgttgagtgggagattcagtatcgggtttatggcaccggctccgggtggatcagcaagcagggcgaatacgcactcaaaaacattaatgggctggggtacacagaaagattttcgctcgactctcccggcctggtcgaagtgcggtgccgtcgccggaacgaacagggcagcaataacgcgcgcgacaatatgtactggcaggctttaagagggaggcttctggcaagacccgtatcctactcaggtgtaacaacctgggcaattaccgttgaaaccggggggaagctggcggcacagtctgacaggcgcgtcagcgtggtcgctacccgcgaatatgacggagggggaaacagaaccattagcggcgcatttcgtcatgtagcaggcagtcttggttttaatgcaaaccagattgacacctctgcgataaatgctcttgaaactgcctggtggacgccaaggggggaatattttgactatgaggcaagtagcgacagtgcttcagcgaaagatattttcgacaaaatcaccgaagcaggcatgagttactttttgctgtcagacgggctcttatctgccgggcgagaaggtatcaaaagctggaccgggatcattaccccccaggatacggtagaggaaatgaagacctcattcagggccccttctgatgatgattatgacggtgttgacgtcacatatattaatccggttacctgggcagaagagatcgttcagtgccggacgactgataatcctgtgcctcgcaaagtggagtcgtactcactgggcattgtaatgacagcagatcgtgcataccgaataggcatgcgcaggctcatgaaatatctgcatcagcgcaggacctatgaatgcacaactgagcttcttggctggtgttaccagtttggtgatcacatcattctttctgatgatattccgacgggtaaaacaatcagctgtctgatagaaggcgtgacattcgatgatgaagttatcacgttaacagtcactgaacttcttgactggagctatgttaatccgcgctgctggattcagtttcagggaggacggccgtcgactcgtttgctaacgccgacacgtgtcgatgacttcacccttactataccgtacaacgacgacctacacccggaagactggacaatggatgacccggatgttgaattaccgcgcctgttattttgtgacagtgagaagggggcccggcacggtatcgttcaggaaatagtcccgtctgatgactgcacctgccaggtcaccgccccggaatacaaagaaattttctacagctacgacgacgctacctaccccggcgacgtcgcttaa

SEQ ID NO: 194219 - DNA, 189 bp, Klebsiella oxytoca
atgttattcaaagagttaattgaagggaatgttatttcccttccggaaggtgatgaatttactgtgacaagcacgccagaaaaagaccctgtgacaggatgcctgtttgttaacggtatattatctgacggttccgaatcacggtattttgcgaccgaatacactctggtaacggtggatgatgattag

SEQ ID NO: 194220 - DNA, 171 bp, Klebsiella oxytoca
atgacaataaactgggagtggagtggtaaacgagcaaaaaatttaggtattgttttgcttatcggagtcgatattcattatctgtttcctgatatgttcgtttacgttagtggccttatgatgttcatacttgggtttaagtgcgaactaggacgaattaaatttaaatga

SEQ ID NO: 194221 - DNA, 843 bp, Klebsiella oxytoca
atgcaaaataagattgttttgttccctaacggcatgattactaacgataaaattcaatcatttagtggaaaagaacctgatgaggtaacacgttgcatactttattgggataaaattgtaattattgataatctgttcattagcatggaagttctcgatcaaacactagaaaaatctcttgcaagcgccggtatcattgaaaaacacatagtccaaataccatcaataaacggcgcgctggcaccagcacttcataagtcgtacactgacaaaatattcgatctattaaataataaaaataataactatgccacatatgggatggaaaactttctaaaaggaggtgatacaagcactattcaaaacgctggggagataataaccctaacgaatgcccttcctttaccagataaaaaaacccctgtagataaaattttaaattttagagaaaaaaggaagggtgagttacgcaaccttatgattcacatgaactctttagagattagagttgcctctgccgaaaatcaagattttgaattaaaaaaatcaataaatgaaattgacagtgcttgcgccaccatagcaaggctttttaatgaaagcaagattaaattcatcccatccaacattgattataatttaaatatgaaggaaattttcaaggttgcatctatgtactatgcaggggcttctgtagtaatgcctcaaaccgctgctcagatagttggagtgacagcaggaatcctaagtgtattttctgttaaagactcaataaaaataaacagaatagacagtggaaacccatttaattacgtgggttatttaagcaaggaatttaaataa

SEQ ID NO: 194222 - DNA, 1005 bp, Klebsiella oxytoca
atgtttacagacagacagtcgctatatcgtgatctcgaaagggagcgcgggtcgaaagttatcacttatgtaaccggtgacagacctggcatggaaacgaaaatccactctgaagtttatgatttctttgtgaatcatctagatgaaattggcgtaacccccaaaatatctttacttctttacactaaaggcggggaaactcttacggcatggagcttagttaacctgctaaggcaattttgtgacgagctcgaggtgattataccctcaaaatgtcttagcgctggaacgattatggctcttggggccaacaaaataatcatgactaaacaggccacgcttggcccaatagaccccagtctaacatcacctctaaaccctattgcgacaattaatgggcaggaaagtatttcaccggtaagcgttgaagatattaaagcatatcttgctctggcaaaggatgagttaggtattcaaaacccagaggactccattaacatacttcttaagttgagcgaaaaggtacaccctttagttctggggagtgtatacagagcgcagacccaaatccagatgctagccagaaggcttctgacacaccaagtatctgaatcagataaaattgaacggattgtgagcttcctttgctctgattctggcagccatgactatactatcagccggagagaagccacaaatgatcttgggctgacaatagaaaaaccttccgaaacactttatgggttgattaattcaatctatcttgatattaagagcgaattggaactaggcaagccttttgatgtcaataccactcttggctctgttcctcagcaacaatacactgctgtcagagccttagtagaatcaaccgagacatgttcttatcagatgcgaactcaagggctgctgcagagggtccaggtatcaccaccgcccatgcaacagtttgctatcaacaatacagttaattacgagggatggaaacgtcatgacgaaccttaa

SEQ ID NO: 194223 - DNA, 1242 bp, Klebsiella oxytoca
atggtgcctaagggttggtcatcagttcaagcacaagacgtatgtaagtcaatttccgttggggttgttataaaacccacacaatattatgtccctgaaggatatggggtaaaagctttccgctctgcaaatgtcagggaaggatttattaacgatagcgattgggtttatttttcgcatgaagggcatgcaattaataaaaaaagccacttaaagactggcgatgttttgattgtccgtacaggttatcccggtacagcatgtgttgttacacctgaatttgaaggctcaaatgctatagatatagttattgctcggccagatatggataaaattattccggaatatctttgcgcctacacaaatagccatattgggaaaagccaggttttagaccttcaaggtggtatggcacaaaaacatttgaatgtaggtgcttatcaggtactgaaaattaatttaccaccgctgtgtgaacaaaaaaaaatcgcccaaatcctgttaacatgggacaatgcaatttcggtgacggaaaagctgctcgccaatagtcagcggcagaaaaaagcgctgatgcagcaattgcttaccgggaataaacggttgctggatgagaatggggtgaggtttagtggggagtggaaaattactaaactaatacaaatgggcaaagttgtatccggtggaacacctgatacaaacatggccatgtattgggaaggcgatattctatggcttaccccaactgatgttactgcattaacgggtaggttcgttagcaatactagtagaaaaattactcctgctggattactaaatagctcagctgttcttttgccaaaaggtagtttgatggtatgtacaagagctaccattggtgctttagcaatttcgacatcggaaatttgtaccaatcaaggttttaaaaacatcattccgaatgaagggtttaatatcgaatttatttattacttgttgcaaatgaacacaaatgagatgatcaaaaaatcatctggctcaacatttttagaactttccaagaaagattttgaaactttaagcttttcttgcccatttattaaagagcaacaaaaaatcgccgccgtgctgtccgctgctgacaccgaaatctccacgctggagaaaaaactcgcctgcctgaaagacgagaaaaaagccctgatgcagcagttactgaccggcaaacgtcgtgttaaggtcgatgaggcagttgccgcatga

SEQ ID NO: 194224 - DNA, 492 bp, Klebsiella oxytoca
atgtattcagtatcaaagtatgttttttataccactctgattctttatgtcctgacattactaactgtcagctatgttggtgtctatttaacttatgtggctattccggtgattgttgtttctggattattaatgaaacttctcggtaaaagaaagagtaaatcaggagaagtatcaaatgttgtagccagggtgctcaatgatacaaatgtcgggctggaacgttttaatgaaggcatgcactggttcaatgagaaaaacaggatcataaatgaaaaaacaaaacctcttaacgaacaaattcatgcaataagaatgaaaatgattgagccggaggtaaagttaaaatatgaaagtgaccctgaaaaaagaaaaacacttaatgctttaattgaaagtatggaaaaagatatcaggattatagaatcccagaaagatgaaattaaaatggcgatagagatagatattgcccgcaagaggattaatgaataa

SEQ ID NO: 194225 - DNA, 1128 bp, Klebsiella oxytoca
ttgcattccgaagcgttggctatcgaatttattgaacaactgaaaggcatctcggttgaggatgatgttgaattcaatttttttgaattgggaggttccggatatctcgaaaacccaacaacggatttgatggctttgtttatgggagcccagaaaatggtgccgccatggttgctaaaagcattgttatgttgcctggatgattccctcgatgttgatgaaattgatttcacctctctggaattaatgagagaggccagaacagaggatgggaaatatcttgatattcttatcagacatgatgaattcatcataggtattgagcataaagttttggctgatacatataatccttttcccagctatgtaagtctcattgatagttacggcggcaacaatcaaaatctatttcgctgtatattaaagcctgacggtaacagtgctaaaggcgtagacggttggcaactgatcaattattcactgctgctggaaaccgccattcgacgtctggggttggagatgatgaatcaagagttcagcaagtggactgttttttatcaggagtttttaagtcatcttaaaaaattgagtgaggttagtatggataaggtatctgataaaaatgtggagtttgtcactgaaaatttctcagctttgataaaatcggttcaactgctggaaatgtaccaaaatgctatcaccgaggaagctaaatcggttgtctcagaggtattgcctgatattcatattgcaacaggtattaataactggaagggttactataaagcaattcatctgatgccgggatgctgggggcaaggtaaaacaggaattacgttagtttatcgcccttcagaggatggacgagatgaagctgagttctacgtatatggatggatacattcagatgattaccctgaagttaatgcactaaaagaagaaataagagttgctttaagtgctggagatttcattccaacagctagccctgaggactatgaagtatcaattactgggaaggggaaagtgcttgaactgagtttttgggggaatacgagaagcaaaaaagatgcactggttcttcttaaggatatgactaagtggatggactcaaaaataagaacataa

SEQ ID NO: 194226 - DNA, 1182 bp, Klebsiella oxytoca
atgatttatcagtgtgatacttgcagtagaacgacttttgaggttaattgtccctggtgtagtggagtttcgcctgtaaaaacgtctgcatggggttcagcatcatcgaccgcacaagcaatagacatacaacgtatgacaccattgaatccatcgttttatcccgaatttcagtatcgttcaaagggtgttctaaaagatctatttgggaaaaagaaagagcaaactcagcttaatcaattgcttgaaaatgttctcgaaaaatactccagtttaaaagatccatattttactaacttcatttacacttccagattctcacataataataaatcggaagcagattactcaacagataatggtacatactccgaattacaacttttccgtgaggtgttggtcagaaaagggttcaatgagcttgagcagttacctgagctattagataaattactccttaccacgtcatttaacgctctttattatggtttcgctaaggaagttaaacggcatattaaatccacacttactaaatccttgaagtcatggattgaggaagcgggtaccacttttagggcagatctttcattgtttctattctatatatggagcaataaaatagagttctcatcagtagagttcaatgaaaaagcggaggctacgcctggtgttcctttagtttcatttgatgaagttaaaaaatacttagctgtgtgcgaacatatttattttgatattctggttgatagattagctacacggctcgaacattttaaccctaacaaattcgtcaccatgtatttagttgatgcaatggacggtttccagtttgaagatttccttgtggaagtattccagactatgggctatgacgtgaaagaaaccaagagaacgcaagatcagggggcagatctcttcgtcactcgatttggtaaggatatggttattcaggcgaaaaattattctggttctgtaggtaactcggcggtgcagcaggtgatctctgctaaaacattctatggttgtgatgaggcgatggttgtgactaattcctacttcacacgctctgcgaaagagttagctgaatcagccttggtacgtctgatcgacagggatgaactgcaaaagtatctggatgattacaatcagaagataatcgaagattttcagtcgaactcataa

SEQ ID NO: 194227 - DNA, 603 bp, Klebsiella oxytoca; identical to SEQ ID NO: 143543

SEQ ID NO: 194228 - DNA, 399 bp, Klebsiella oxytoca
ttggccgaacgcgccgggctggcgacgcgcagtgatgcgggtcacaagtcgatttctcgtgccagccggggatgtgatcgcctctcctggcttaatgccatcatctcggaaaaagcccctttcaacccttatgacgcccgttgcgcctgcaagcacattgaggttacagaggatttcttcgccattctcggcatcccgctaaaacaggtttaccgggaacgcgccaggctgcttaaggccaacccggaagaaatcatatcctccggggatgtccggttaatcgctatcaaggttgagaactggacgcgtaaggccgctgccgggttagccaggatgaaagcgaagcgtgaagtggctcgccagcgcaaacaggaatactactccctaacctttgcctga

SEQ ID NO: 194229 - DNA, 1185 bp, Klebsiella oxytoca
atggcaaggaggcagattctttctctgtcggaaagagaatcattactggcattgccagatgatgagttaacgctgacccgaatggcctatttcagtgagcatgatctggcacttatcagtgctcaccgtaaacctgccagccgttttggttttgccgtccttctttgctacctgaaaaatgtcggctttgctccggataaaaaaatcccaccctctgatgcgctgctgaagcatatcgccagcaggctaaagcttaccggggatctctggcctgcttacctttccggcagggatacgacccggcgtgagcatttaaccgaactgtaccgctatcttggcgtaaaggcgttcaccggcaaaatacagcaggacggtattacgcacctgttgtcgatggcgacgcgcaccgataaaggtattctcctggccgaagagttactggtctggctccggcagaacaacgtgataattcccgcgattgatgtcgtggagcggacctgtgcggaggccatggctggcggagataaaatcgtatttcagaccctgaatgccccgttaactccggcgcaccgggatgccctggatcgtttacttgagtcatcagataatcagccttccaggctgacatggcttctgcaaccgccgggtaaaatcaatggtaagaacgtactgcaacatcttgatcggctcagcagcattgaatcgctggcattacctgaaggtatagatcgtaccattcaccagaaccggttgctgaaactggcgcgggaaggccgaaagatgagtagccgggatttgacccgattttcagcagcccgccgtcatgcgatcctggtctgcgtgctggaagaagccagagccacactgacagacgaagtgattgagctgcatgaacgaatgctgaacagccttttcaacaaagccaaaagaacacaggctgagcgccttcagcagaccggaaagctgatccagtccaaactgaggcagtacatcgatgttggtcaggcgctgtctgatgcccgcgactccggtggcgatccatggctcgcaatagaaaacatactcccgtggcctgaatttgtcgccagtctggaggaaacacgccatctcgccagaaaaaataattttgacccgctgcatattattactgagaaatacagcacattacggggctttgttgaataa

SEQ ID NO: 194230 - DNA, 324 bp, Klebsiella oxytoca
atgtccgccctgcgcctgaatatcaatatctccccgcgacgcaaaccacttcgccccattctgactccagagactgagttgtttacccgccgccagtgtgaagtccttctgcgcccccatatccagctgctgacctgcaatcagcgtcagattctcctgcgccgacagcagcatatcgtcaccgcttgccagcgccacaccctgcggggccgttcccagcagtacttccttctgaagctggtctatcttctgttgcagcaacgtctgctgacgtccaacatccgcagccagcgcctgtgcctgctgtgcgctggcagccagtga

SEQ ID NO: 194231 - DNA, 717 bp, Klebsiella oxytoca; identical to SEQ ID NO: 180312

SEQ ID NO: 194232 - DNA, 474 bp, Klebsiella oxytoca
atggcggatattatctatccggatgagtacctgcctatgccgctgatggacgggtacgggtttaagcccatatcacccttattgcgaacggagatgacgtccggtcgtgctcagcagcgaaggcgatatacctcaacacccacccaggcatcggttaaatggatttttaaaactgatgctctggcgcaggtgtttgaggcgtttttcagggatgcgcttaaagatggccagtcctggttctatctgaaactccagactcccatcggggtaaagccctataaagccaggttcgtggatatttacgaagggccgacgctggtcgcgccaaaatactggcagtacagcgcaacgctggaattatgggagcgcccgttaccgccttcaggctgggtaaattacccggaatggctggcgggccagtcgttactggatattgcgctaaacagagagtggccgaagcatgacaattcttga

SEQ ID NO: 194233 - DNA, 306 bp, Klebsiella oxytoca
atgacttcacaagatcgccagcaattctggcagcaacatattgatgcctggcaagcatcggatgcatccggtgcggctttttgtaagcagcgtgatttgaattacgcgcagtttaattattggcgtaaaaagtttcgggcagaggctgttgaaaagcctgctggttttgctcaagtgacacaactagcagccccgctcaatgattctaataatgaactaggccttcatttgccgagtggcatcagtttttcggggatcaatcatagcaatttggatgtcgtcttagcgctgctgaggcagttgtag

SEQ ID NO: 194234 - DNA, 1656 bp, Klebsiella oxytoca
gtggtgattacacctgcgggtattgaccggcagtattatgaattttgtgcgctcagcgagcttaagggagcgttgcgctccggggacatctgggttaaaggctcacgccgctacaaaaactttgatgattacctcattcccgaaaaggactttgacaaactcacaccggcgctgcccctgcccgtatctgctgattatcatgagtacattaccagccgtaagactctgcttcagtccagacttgaagaggtcaatgccatggctgcccttggtgagctgcccgatgtcgaaatatctgacaggggcgtaaaagtctctccgctggataactgcgttccggcacaggtttcaccgctggcagaactggtttacagcatgctaccgcgacctaaaatcacggaaattctcgacgaggtaaactgctggacgacgtttacccgtcatttttcgcatataaaaaatgacattacccgtcccgatacccgccagctcctcaccaccattcttgcggatggcatcaatcttggcctgaccaaaatggcagaagcctgccccgggagcaccaaatcatcactcgaagatattcaggcatggtatacccgcgacgaaacctattcagccgcgcttgctgagctggtaaatgcgcagggaaaaagaccactggcggcattctggggagacggaacaacgtcatcatcagatggacagaatttcagaacaggcagctcaggccgctacgcagggcaggttaacccgaaatatgggcaagaacctggacgtcagttttatacccatatttcggatcaatacagcccgttttacacctgcataataagtcgggtcagggattcaacccatgttctcgatggtttgctgtatcacgaaagcgacctggaaatcagggagcattacaccgatacagctggtttcaccgatcatgtctttgccctgatgcatctgctaggctttgcgttctgtccgcggatcagggatctccacgacaaaaagctgtttatcaaagggaaagcagaccaatacccggcgcttcagtcactgatatcaacaaccagcctgaatctgaaagagatcgaaattcactggcgtgaagtgctgcgcctggcaacctcgataaagcagggaaccgtgacggcatccctgatgcttaaaaagcttgccagctaccccaagcaaaacggacttgccaaagcactgagggaaattggccgtattgaacgaacgctgtttatgctcgactggttccgcgatccggcacttcgtcggcgggtacaggcgggactgaataaaggagaagcccgtaacgcgctggcgcgcgcggtattcctgcaccgtctgggtgaaatcagggatcgtaaaccggaaaatcagagctaccgcgccagcggactgacgctgctgacggcagctatctcgctgtggaataccatctatatggaaagagcggtcgatgccctgaagcgtaaagggatgaagatcaacgagcgactgctatcgcatttgtccccgctaggctgggaacacatcaatcttacaggcgattatatctggaaaagcaaccggataccggcttccggtaagtttcgtcggctgcggccagctaaagtaggaaggtcaaaaaacgaccttaacgtacaataa

SEQ ID NO: 194235 - DNA, 597 bp, Klebsiella oxytoca
atgccatcagatctaaatgattttaattttattttcgatcaaaaagaaaacaataaacaagttttatacgatgcagtttttaatgacttatatatcccattacttaggttagacaatttactacgcccttattgtgtattgaatcatgacctatcccatttcaacaaatacatggaagagttgaataaatatgagatacaaaaatcaataattgataatgagactgaattcaatgtggaatctccaataaccaacagtgaatatgctaatcccttctatatcagttctgtttttgaaaaacacacatcttgtagctccaaagattcgacaggaatccaaatagttgatgtcttaatatcaaactttaatagagcattaaaaggcaatttcgataatcctatacagattgcaaaagccataggtaagctaacaattaattcttatattaaaggtgtatatcctatagaattaatttacttaagtgaaaagttaacactgagtaaagacgaactgagtttaattagtatggtagaagatatgtcatataagctttttggctttaagaaagatcccgacaacatatacaagggcatctga

SEQ ID NO: 194236 - DNA, 366 bp, Klebsiella oxytoca
atggataatacattcaattatataaataaaagcaaattatcagagaatttgctcagaacacattgtgttagcgtcaggctaaataatgaagaattgcatcttctcaacaccaagcgtggcgaaacaagcaagggggaatggcttcgattagcttcacttgacaagtttccaccagtagttccccctataaatttagaagcatggaaatcattgtctgaaatctctcagaagctgaacacccttataggtcatcttgaaaacaaaagcagtggtggtgagcttaccaaaacagagatctttgtggttaagcgccaaatttctgagcttcgcttctgtcttacatcctccaagagatctatgagttag

SEQ ID NO: 194237 - DNA, 1197 bp, Klebsiella oxytoca
atgaaagggatgcaaaaaatcaaaagagggaaaacctttaacgggctaatttcttatttattaaaacctgcttcgcaccacaaatcagttccatatgtgatcggtggcaatgtcatagaaagcttcgcagaagcactaagtgcagagttcaatgctacgaagatcctacgccccgatgtcaataaacccgtatggcacaattctctgcgtttgcctcttggcgaacagctcaccacagaacaatggaagctgttggctgacgactatatgaagtgtatgggcttctctgagacgcatctacgagcttacgtcctacatgatgatagagaaggtcagcatatccatatagtagcaagccgcatcgatgcaacatccgggaagctctacttagggaaaaatgagaaccttatcagcacccgtataatacagcagcttgaacttgactattcactgaccagaacaaaagggccggaggctgaagcatcattaacctcgccctctcctaaaccgaagcgcaaaaaaactcgtaatgaaacgatgcgggaaaaaagaactggtgagctatgctctaaaacagtcatacaggaagctatagatacactcataaccagcaagatttccgaagaagagtttatgcagcagcttgcagatcagaagataaaagctgttcctaacagagcgtcaacaggaaggatgaatggtttttcgtttgagtataacaacgtttcattcaaagcttcgcagcttggtaaaaagtattcatggaaaaatttagagccgttcatcaccattgatctccctaccgtagatgacagaaaagcttccattgccttcaatgcaaccagctcagaagaaattatcatgatagtgaaagctgatgctgtaagtttttttggtggtattgatgcagaaaataccctacttcctttacctgtcttgcctgtagaagatgatatctatcatgagaaagttaagcccaataacaagagttatatcgacatagcaatgaggtggttagaaaccattccttttatagacacgatagtcaacaccctcaaaaaactacgtaatccattcttgtatgtttccaaacagccttccaagattttttcggctgcccaccttcctatagacacaccacctctttctgctgctgaaaaaactacaaaaacaaacgtttttaggtcaagaatttag

SEQ ID NO: 194238 - DNA, 255 bp, Klebsiella oxytoca
atgtcgcagtggaatattgcctctttttcaaaagaggagcaggacaaagttgccgtcgataaggtggccgctgctgttgcctggcaggaacgcatgaacaagcccgtcatgccggaacttgttgaacgggaacagcctgaacacctgcgcgaatatttccgtgaacggctctgcgtacatcgactgaacagtcagcagctgctgcgcgcaaatgcgcccgaatataataaaccgggcgatgatcagcagaattga

SEQ ID NO: 194239 - DNA, 543 bp, Klebsiella oxytoca
atggcagcacgtggcgttaacaaagtcattctggttggacatctgggacaggatccggaagtgcgttacatgcccaacgggggcgcagtggccaatctgacgctggccacgtctgaaacatggcgtgacaagcagacgggagagatgcgcgaaaacaccgagtggcaccgtgttgtcatgttcggcaagctcgcggaagtggcgggcgaatacctgcgtaaaggcgcgcaggtctacattgagggccagctgcgcacccgcaactggcaggacgatgccggagtcacgcgctacgtcaccgaggtactggtcgggcagaacagcaccctgcagatgctcggcggccgccgtgaagccggtgtgcctgagagcgccacgcagtcgcagagtcctgccaccccggcacaacctgctcaggccgcgactaaatccccgaaagcaaagggcggtaagaaaggtcgtcaggacgccgccccgtctcagcaaccgcctcagccactcccggatgatttcccaccaatggatgatgacgcgcccttttaa

SEQ ID NO: 194240 - DNA, 150 bp, Klebsiella oxytoca
atgggtcccctggtcatcttcaatcgccacattctgatactgcgcggcgacaatctgagcctgctcgcgggtaaacgtgccatccggcagagattcaagcggggacaaaacgttatggtccatatgtttctccttctctgccccgcctga

SEQ ID NO: 194241 - DNA, 279 bp, Klebsiella oxytoca
atgagcggtaagcgttatcccgaagagtttaaaactgaagcagttaaacaggttgttgatcgcggttattctgttgccagcgttgcaacacgtctcgatatcaccacccacagcctttatgcctggataaagaagtacggtccggattcttccactaataaagaacagtcagatgctcaggccgagatccgccgtctccagaaagagctgaaacgggttaccgacgaacgggacatattaaaaaaagctgcggcgtacttcgcaaagctgtccgactga

SEQ ID NO: 194242 - DNA, 264 bp, Klebsiella oxytoca; identical to SEQ ID NO: 127147

SEQ ID NO: 194243 - DNA, 549 bp, Klebsiella oxytoca
atgttgttaaaaataaatgatttgctacacctaataaaaatgcaaaaaaaaggatatattatgacaagtataggtattaataagtttattctaacatcaggagagcgatattgcatcattatggataacgaaaataaagcccctcttttttatcctaatttatacttaacaattcagttaaggaataggggatgttctgtgttaacaatggaagcgacagccttaacattgtcgctattttatagatttttacgagagaatgatatatcaattgatgaacgtattttacataatagattcatatcgaattctgaaattgatcgcttgttcattttcttaacaaaaaaacgttcaaggcgcatacgttcacaaagtatatcaaagttaacattatatcacaggttaaataccatcgctggttatttatcttggttatcagaaacgctgtatagatatgatacaccagaaattaatatattaaattcagagaaaatggttcgttctatcaaagaaaggaagccaataatacctaagaggcaagatagataa

SEQ ID NO: 194244 - DNA, 207 bp, Klebsiella oxytoca
atggaaagagcggtcgatgccctgaagcgcaaaggggtgaagatcaacgagcaactgctgtcgcatttgtccccgttaggctgggaacacatcaatctgacaggcgattatatatggaaaagcaaccggataccggcttccggtaagtttcgtcggctgagaccagctaaagtcgaaaggtcaaaaaatagccttaacgtacaataa

SEQ ID NO: 194245 - DNA, 348 bp, Klebsiella oxytoca
atgacagaggatgatctctatgacctgctgtcgccgctggcagacgggcgggtttatccgtatgtggtgccgcttggcagcgacgatttacccgctgcggccgctccttacatcattttctcgataccgacagatgttgccggggatgtgttctgtgggcaggccgaatcgacgctgcacattcaggtagacgtgtgggccaaaacgaacgatgaggccagggcgttgcggcttgaggcccttgcccggcttgaagtgctttctcctaccgaggtgacaaaaatccccggctacgacaccacaactcacctgcatcgggcaacgcttgaaataaccgtcattgcctga

SEQ ID NO: 194246 - DNA, 492 bp, Klebsiella oxytoca
atggctgatacgttccagaatgaggtgcccaaggcacgcattaatttaaagctggctctgcacacaggaggcgcgcagaagaaagtcgagctgccgctgaaactcctcaccatcggtgatttcagtaatggcaaagaagaccggccattatcggaaagagcaaaaatcaacgtcaataaaaataacttcaacagcgtactttcggaattcagcccggaaatcagcctcacggtacagaacacgctggccggcgatagcgccgaagaaaatattcagctccgcttcgccgatatgaaagatttcgaaccggagcaggtggcccgccagatcccccagctccgcgccatgctggcgatgcggaatttattacgcgacctcaaatccaacctgcttgataacgccactttcagaaaagagctcgagaaaatcctgaaagatccggcgctgacgcaggaattacgcgacgaaatgagcgcgctggccccgaaataa

SEQ ID NO: 194247 - DNA, 213 bp, Klebsiella oxytoca
gtgccagaactgaccccttcagaacgtgcgttccgcacgatgcgggcagatgttacactcttcattgatattctgctggataccgacctacagtacgttttcaccgtcgaagataccgaacaggttgaagcaatttatggccctgtccattcccggttgctgaaacaggcgcttgatctcattcgtgatgcggatgatgccaaagcaaagtaa

SEQ ID NO: 194248 - DNA, 306 bp, Klebsiella oxytoca
gtgcgctggattgatgggtttatggttaattccgtcagcaatgaaaacgctggttatctggcgaatacgcgcgcggatggggccagccatattttcctggcgctgtcgactaacgacaataatactctggacaagagcaataaaattgtcccggctgacccgcagcaaaaccgggtgcctctggtcgaaaaggcggtggatggcgggatatttacttattacattggctacgttacgccagcgccggaaaaagcgaccagcggtccgttgaccagctgggcgacctgggagttagtttataattga

SEQ ID NO: 194249 - DNA, 495 bp, Klebsiella oxytoca
atgccgggcttcatgtttttaagcaaaagtggccagcgcgtcgatgcacgggattaccataacaggacaaaccattccgagggcgctaaattgggcagagacgttttgcagggattttggagaaggaaaaattggataaaaaaccgggcgctgcgcccggtcctgttacgtgtcaaccgcgctactcactcagtccgcggttttccagcatcggctcaatctgcggatcgtgtccgcgccactggcgataaagttctgctaaatcagtactattgccgcgagacaatatcgcctcgcggaagcgctggccgttttcacgggttaactatattagatttcaattacttgcccattctcatcaaccttgtaatatcttcccgcctcaataccctcctccccctcataaatcactttaatacgattacgctcaccatcgtgccacaccaccgaggcaacaccgcccttaccgatagtgaaagactcaagaatacgtga

SEQ ID NO: 194250 - DNA, 543 bp, Klebsiella oxytoca
atgagagttttaacttatgccattcttggcttacttaaccgcacggcgatgaccggctacgacatcagtaaggcgtttaaccacgagctggcaaagttctggcacgccaaacatagccagatctacggcgagcttaagagcatgtataacgacgggctggtgacttacgatattgagattagcggcgatattctggaaaagaagaagtacagcattaccgatagcgggcgggatgagctccttcggtggctgcataaggacgagccgatagagaaaacggcgaaagatgtttttcgggttcgtatgtatttttcccactatctggacttggccacgcgcatccatctgctggaaaaccagcgcatacagcatcttgagcgattgaatattttacaaaaaacgatggaacaatatccgcaggttccgcctcttgaaagcgacaggtttggcgattttattgtgcttgaaggggcaatatgtcgtcaggagagcgtcctgcgctggattgataaatgcattggctattgccgtagcggcaagtaa

SEQ ID NO: 194251 - DNA, 1242 bp, Klebsiella oxytoca
atggattactcaaggaaaagatggcggatcctgatagccagctgttttatcaacctatgtgtggggtctatgtacgcctggagcatttttgccgcgccaatggcggattacctctcccagctacacaacaccagcataacctcagccaacctggctatcgtctttgttatctgtaactccgttggccctattacgatgatcgctggcggaaaaataaacgatacgctcggccccaggctggttatttttatcggcggattgatgtttggtggtgggatgatcctctgcggcttcgcttcagaaatcagccacctgatcttggcatacgggatcttaaccgggctgggcttaggcatggtgtacggtgcaacgatcggtacctccattaagtttttcccggataaacgcggttttgtcggcggcgtcaccaccgcgctgtttggtatcagctccgtcattattccccctattgccgcattaattaccgcgcaggccggaattctttccgcctttaaaatcatcggactcgcattcgccgttattgtctgcgcctgcgcttttgttatcgacaaatgtccaaacggttttattccggacggctggcaaccgccacaacaggcgcgaaccggggcgccgtcagggaataaaaactggcgccaaatgctgtccagcctcaatttttatctgatgcttatcatgctgacctgcggcgcggtcgccgggctgatgtgtatttcgctggcctccccgctggcaaaacttatggttgggatgtccaccggcgcagcaaccctggccgtttccatccttgcgcttttcaacgtgctgggtcgcatactggcaggcagtatttcggacaaaattggccgaattaacaccctgatgctggcctgtattctctcgattccaggcctttacgccctctattgcacaggtattggcgacgatgcgctgttttacaccggcatctccgctatcggcctctgtttcggcgcgtttatgggcgtcttccccggttttacggccgatcagttcggcgcccagcataacagcgtgaacttcggcatcatgttctgcggctttgctatcgccggatacgtcgggccaaccatcatgacctcaacgtttgccgcaacgcgcggttaccacagcgcctttccgatcggtatcgcattcagcgttgccgcgctgctgctcgccctcatcttccgcctgataaataaaaacgctcagcttaaataa

SEQ ID NO: 194252 - DNA, 1956 bp, Klebsiella oxytoca
atgactatcacccgaaaatatccccatctctgccagccaattaaaatcggcaatgtctatttccgaaaccgtatgtttggcgcgccaatgggagggaccgatattaccgctgactgcaccattggtccggcttccacggcattttatgaaaaccgtgcgaagggcggcgtcgctaatgtcaccgtcagcgaactggtggtacacccgaaaaccgaaggttcgcatatgtttcatctggatctgcaaactcccggttcgctggccagctttacctacaccgccgatgccatccgccgccatggcgcaatcgccagcgttgagctatcgcactcaggtcaatatgcgggaacctatctaacggataaaaataagaaagaaggattgtatcaatggggaccgagccagggtacacgccccgacggccgggcagttcatgaactgacgcctgagctaatccacgagatcgtcgaggcctatggtgaaaaggctgcgctggctaaaagagccggatttgagatggtgatggtacacggcgggcacggctggcttatcaatcagtttctttcgccgtggtttaaccatcgtaccgattgctatggcggttcacgggaaaaccgggtccgcttcgccattgaagtcctgcaaagcgtacgccgcgcggtaggtaaagacttccctattgaatttcggatgagcggctcggagctcttcgagggcggatatgatttacaggaaggcatcgagatagccaaactgctggaaagtcacattgatattcttcacgtctccgccgggacctatcagcgcgggtttggcgtaacgcacccttcaatgtttttaccgcacggcagcaacgtctatttagccgccgaaataaaaaaacatgtccaggttcccgtggctaccgtcggcggattaaacgatccgcaaatgatggaagagatcatcgcttcaggtaaggcggatattgtggaaatggcccgcgccctgcttgcagatcccgagctaccgaaaaaagtcatgaccaaccaggacgaaacgattattcgctgcctgcgctgctttacctgtatggcagaacgcgcggaaacctcaacccgccgctgcaccgttaatccgcttattggccgggagcgcgatggacttgaaattcagccagcgccgcagaaaaagcgtgttctggtggttggggctggccctggcggactacaggcagcctggacggcagcaagacgcgggcacgacgttatcctctgtgagaaaaataatgaggtcggcggaattcttattggtgagcaggccattcccttcaaatatgaaatgtatcagctgggcgtgacactgggtaaactttgcgccgatgcgggcgtcgatattcgcttaaatactgcggtcacccccgcgctggcaaacgcgctaaccccggatgcgttgattatcgccgctggctctgagcccaacgttccgccaatcaaaggtatccataacgacaacgtagtgctgatcaataattatcaccttcatcatcagacgcttcccgatgaagttattgttctcggcggcggtctggccggttgtgaagtggcgattcatcttgcccgtcagggtaaacaagtcaaactggtggagatgaatgactcgctctcacccgatgccaatatccgccaccgtccgctgctactggaagaaatcgctaaatccgggattgccgttttctgccagtaccgggcgcaagaaatcaccgacgacggggtgatatgcatagacagtagcggcagcaacgtaaagattgccgggaaaggcgtgatttgcgccctgggacagcgcgcgcgccatgaaacaattgaacagctgcgcgattgcgctccgtgggttgctcaggtgggagattgcgtaaaagtatcgacaattactaccgcgatttatcaaggccaccatgcagcaatggatatttga

SEQ ID NO: 194253 - DNA, 1902 bp, Klebsiella oxytoca; identical to SEQ ID NO: 183162

SEQ ID NO: 194254 - DNA, 636 bp, Klebsiella oxytoca
atgcgctacagggttgtgcggtctgcgggctgtgtagcccggctaaggcgtttacgccgcaacccggggataccccgggatttatacatcgacgcggttgccccccggctcgcgctgcgcttagccgggctacggggtgtgcagtctgcgggcggtagcccgggtaaggcgtttacgccgcaacccggggataccccgggatatatatatcgacgcggtttccccccggctcgcgctgcgcttagccgggctacggggttgtgcggtctgcgggcggtagcccgggtaaggcgtttacgccgcaacccggggatactccgggatttatacatcgacgcggtttccccccggctcgcgctgcgcttagccgggctacggggttgtgcggtctgcgggctgtgtagcccgggtaaggcgtttacgccgcaacccggggataccccgggattcatatatcgacgcggtttctccccggctcgtgctgcgcttagccgggctacggggttgtgcggtctgcgggcggtagcccggctaaggcgtttacgccgccagccgggaatacttcccccatcttacgcttcgtcgtgctcttcccacgccagcgcgcgttttaccgctttcttccagccgctgtag

SEQ ID NO: 194255 - DNA, 168 bp, Klebsiella oxytoca
atgtctatcgaaaataattttattaaacatatagttgcaacaaaagaaagaattaacgaatggccagagtggaaaaaaaacctcttgggaggtgatgatttatcttccaagtcaattaaggttttaaataatcttgctatacaacaagataaaaagaataaaaagtaa

SEQ ID NO: 194256 - DNA, 1521 bp, Klebsiella oxytoca
atgaaaatcacaaaaataacagaattgattaaagatgctcctcaggttttgaaaggctctgaagatgataagttttctacgaaacctttagaagaaatggtaattgggttagtttgctctgttggtacagacctggaagcgatcacaaaaaaaataagagatagattgtccttatatcagtttgaatgttctgaggtccggatttcatcggatgtgatcgctcagctttctggttttgggaattacatagataactatcaaagaattgatgatttaatgaccaaggggaataagctaagagaagatagtgaatgtaattatgtgttagccctcggagcaataactaaaattaatgaaataagggcaaggaatgaatgtttaaagataaagaaaaaagggattgcgtatattattaattcaatcaagcatcctgaagaagtttataaatttagagaggtctatggctctgggtttttacttttcgggattttttcagatgaaaatcgtagattggataatttgactcgtaataaaggaattccagaggataaagcaagtttattgattgccagggatgaggatgaggaatctggacatgggcagcataccagagatacattccacttagccgatttcttcttaaaccaagatggaagagatgataagcttaataatgatataaaaagagtctttgacttgctcttcggtaatccttttattactccaacgtttgatgaatatgcaatgtatatggctttttcttcagctttgaggtctgccgacttatctagacaagttggagctgtattagctaaaaactacgctattatgtcaactggggctaatgatgttcctaagtttggtggggggttatattggccatactttaatacagaaaacgaaagttacgaggattattcagatggaagggactatgtaagaggttttgattcaaatgcaaaacaaaaaaaagaaattatggatgatattcttaagcaaataaatggaaaatcgcgtgataaattagaaaaaatcctcaagaacagccttattcaagatatcacggaatatggtcgtgtagtccatgcagaaatggaagcgattttggcatgtgccagaacaaatattagcactcaagatgcttatatatattgcacaacttttccatgccacaattgtgctaagcatattatagcttcgggaattaaaagggtggtttacatagagccatatcccaaaagtaaggcttatgaatttcattcagagtcaataactaatgatgagagagaacatgaaaaggtacttttcgaaccgtttattggaatagggcctagagtttattttaatctattttccattgttaatgggagtggaaataaaattaaaaggaaagatagttatgggaatgttatgaaatggagcgagtctaatgcaacattgagaacattaatgttacctatttcttacttggaaagagaacagatttctgttaatttgttcgcaaggatcataggagtttaa

SEQ ID NO: 194257 - DNA, 663 bp, Klebsiella oxytoca
atgaaacttttgcctttactggcagctttacccctgctctgcgcaagcgttgtttccgctaactcactgatgtccgtcggctactttaacggcggcggcgacgtcactgccggtccaggcggcgatattgataaactggacgtacgccagattacccatctcaactactcgtttggtctggtttacaacgatgaaaaagacgaaaccaacgccgccctgaaagatccgagcaagctgcatcaaatttggctgtcgccgaaagtgcaggctgatttacagaaaatccccagcttgcgccagcagaacccgaacctgaaagtcttgctttccgtcggcggctggggagcgcgcggattctccggcgcggcggcgacgaaggaaacccgggcggtgtttattcagtcggcgcaggcgattattgaaaaatacggtctcgatgggatcgatctggactgggagtatccggtcaacggcgcgtggggactggtcgccagccaaccggccgatcgcgataattttaccgccctgctgaaagagctgcgcgcggcggtcggtaataaaaaactggtgaccatcgccgtaggcgccatcgctcgactacatcaacctgatgacctacgacctggcctacggtacccagtacttcaattccaacctgtatga

SEQ ID NO: 194258 - DNA, 258 bp, Klebsiella oxytoca
atgtttacaatagagaaagaagttgcggttaaacaggtgacggctgatggtattgcggttggcactgcgatgctcaaagttaccctgacatacaccatcgagaggatcgagcttgaaggggcgaacggtatcgctttttacactgttacgtctggcgcgaatgctgagggagtaagaaattacatcccatttacctattcagggagcggcgatccgctgcctgaggccgaggcagcgctaaagttaacagttgaatga

SEQ ID NO: 194259 - DNA, 462 bp, Klebsiella oxytoca
atgatctggatgggcggcgcgggcgcaacgctgtcgctggtgatagcgatgctgattttcgcccgcagcaaaaatatgcgcgaagttgcccgcctcggcgccggcgcctccatttttaatatcaacgaacccatcctcttcggcctgccggtgatcatgaacccgattatgctgattccgtttaacctcgtgccgctggtgctggtcacggtgcagtacgcggcgatgaagatcggcgcggtggccgtcaccaccggcgtctttatcccctggacgctgccgccggtgatcagcggttttatcgtcaccgggcatcttagcggcagcgtgatgcagatcctcaatttgctgattggcgccatgctgtacctgcccttcatgcgcatcgtcgataagcagtatcgcgcggcggaagtcaccgcccgtgctgaaacggacaacacgcttgcaaaacaggagtaa

SEQ ID NO: 194260 - DNA, 1158 bp, Klebsiella oxytoca
atgcaagattttatctatcataatccggtaaaaattctttttggtcgcgatcaaatttctgcgttagcacaagaagtcccgcagggtaaaaaggtcatgattgtctatggcgggggcagcgttataaaacacggtatattgaaacgcgtaaaagagtccctgacaaacaccctggtttatgagtttggcggtgtagaagcaaacccacattatgaaaccctgatgaaagccgttgagattgtcagagcagaaaaaattgattttcttctggccgtgggcggcggttcagtgatcgacgggactaaatttattgccgccgcagccctctacgaaaatgatccatgggagatcgtcaagagttatggcggcgtggtgaaacaagctctcccttttggatgcgtgctgaccctggcggccacgggttcagagatgaataacacggcggtgattaatcgggtgaccacccaggataaactctttttcacctccccttacgttatgccgaaattttcagtgctcgaaccggaaatgacttacacgctgcctgaacaacaaaccgcaaacggggttgttgatgcctttgtccacgttcttgagcaatacatcacttacccggttaacgctaaggtgcaggatcgcctggcggaaggactgctgagcacgctgaaagaagaaggaccagtagcccttaaaaatccccaaaactacgacgccagagctaacatcatgtgggctgcgacgatggccctgaatggaatgttgagcgcaggtgtcccaactgactgggcctctcacatgattggccaggaaattactgcattatacggaatcgaccacgcccgtaccctcgctatcgttatgcctgcactatggcgcttgtgcaaaaaggaaaaagcagaaaagctggctcagtacggtgcgcgtgtctggaatattcctgagtctgatagcgaaaaaatggccgatgaggctatcaatgccaccgtggaattttttgaactgatgggcgttaaaacccgactttctgattatggtctgggcgcggaagatatttcagccgttatcggcaagttaaaagaacatgggcatatcgcattaggtgaacatggaaaaattactgctgaagtggcggaaacaatactgaatatggcactttaa

SEQ ID NO: 194261 - DNA, 2439 bp, Klebsiella oxytoca
atgaacatacgttatccggtacggaaagccgacggacgggactataagaactatgacgagctgctgaccgatatccgcaaaaatgcccacggttggtggttacttggcgtgaatcgttactggcacggggggatccacatcgggacgtcatcgtctccggcctcggtactgaatcaggacacgccggaaaaatccgtgccgctccagttcatgatggacggcgaggtggtggcatggcgggttaaccacgattacgcgaatatcgagtgttatcaggaacgccccctccgccagtccggcacctttgtgctggtcaggtctgtgtacaagcccgacgagcaggatgaatcctcctggctgacgctgtaccagctttacatgcacatcgcgccattgtcagaatttccgaaacgcccgctttaccgggtcacgcagaaaggccacggcgtgcggatgcgtaaacattcccgccatgatgacagccgcgaaatcgcgccggacgtgctggcaaacaaacacggccacgccagaacgctcgttcagggcaacacgcttgccgtactgcaacagaaatcgtttttactggaacgacggccggagccgtttgctctggtgcagcgtcttcaggatggtaaacccgccggagaacttttctgggtctcgatgcgcccggaatatctggagcctgacggcgaatgttacgtgtgtctgcctgactggatgcacagtgcgctgaatcacggcgtgtttgatgatgtggtggtgccgcctgtgccgctgaaagtgatggtgaaagcaggggatgcggtcggattcctcggcgctcaggatctggctgacgaagataactatccgcagattattaccacggactataaagcccatatcgagctgctgagccttgatgagcatgtgccggatgtggtggcaaacgtgaaggggattaaaacgggcaaacagttcattaagctgaagctgaaacgcccgctgtacctgcgaaacggggagggcgaggaaagtacctttgagcagatgagcgccattacccgagctgatgccgggaaaattattccgcgtgatgccgcgtacccgtttacggataaaaccggggtcacgtactttcagatccgcccgcatacgtggatgcaccaggacgatgtggagcagctcagccagcatgatttagccgggctaaactttcactgtattgatgcagaacacacaaccgactttacccgcacgctggatgaacgctggctgattgacgccctgaaaagcatcagttcgcactttgatggtgaaaaagggccacaaagttcacaggccaaaatgttttatgacagcctgatccgtaatgctgaaaacagaagaccgcccagcccgtatcccgataaatctcaggatgaattactgttcggtgcattgcataccaaccagatgaacatcccggaatatgcgcgacgcctgatagtgaaacacgacagcgactggcacagtacccgcgatgatacacgctggtcatcggtatttaaggtcagggatgaaagcccgtttgtgaagatggccaacgggggatttctggatgcgacgcgctggatggataaggttccgccgttcgccagtcagcggtcagtatggcatttccatccccttgaattcttggaagcgattaacccaaaaggaaattgtgcatgtggcagggatatcactttagatgaattgtgtgatattgcaccaaaagccgataaagacgttttggctcagtatttaccagcatttaatgatggtttccgcgaatttggcattatttcttgtagagaaaaagctcatttcctggctcaatgctgccatgaaagcagcggtttaacacttactaaagaaattggaggaactagagccagttatgccccctggtatggacgaggattaattcaattaacatggcaagatgtatatacaaagtatggtacatatgttggtgaggattttgaatcagatgacgctgccagaaataaaatagcacaatatccacattgtgttaggtctgccttttggttttattgcgtgaataaaaatgtatccaaacatgccaagagtgatgactttaacatggttacagcacttatcaatggtggattcaatggatataatgaccggcttaagtattttaatagagctgtgagtgtttttaaagctgaacatcttaatgttcttaagaaagaggatggcttctcttttgaagatagcgaaatatataactatcgagtatatgcgtatagttggggccgataccacgatccgttaagaaatgaaagcggtaccgataaggataagatggaggcgctgaaagcctacagaagggcggtaaaactctacgaaaggcgtggggactcagggaaagtgactgatataaaagccaaaatcaacgcgcttggttaa

SEQ ID NO: 194262 - DNA, 933 bp, Klebsiella oxytoca
atgctcgatcaggaaaccatccgcacgtttattcaggtcgctgagaccggaagtttttcccgcgcggccagcacgctgcataaaacgccagcggcgattagctatcgcatcaaaacgctggaagagcaggtggggacgcagctcttcttacgtacgacccgttcggtgagcctgacgctggccgggcagcatctgcttgagcactgccgacagtggcttaactggctcgacgtgatgcctgatgaactccagcaaatcaatgccggcgtagaaaggcaggtcaatatcgttatcaataacctgttgtatcaaccgcaaaccgccgcagatctgctgacctggctgcatcagcagtttccctttacccgttttcagatttcccgccaggtttatatgggcgtctgggattcgctgttatatgacgatttccaactggcgattggcgtcaccggctcggaatcgctgtcgaacaatatctccttattaccgctcggtgatattcgctggcagtttgtggtggcgcagaaccatccgcttgccaaccaccccgccgcggtgttgtccgacgatatgctgcgtcgctatccagcgatcaatatcgaggatacgtcgcggacgttaacccgccgcgtcgcctggctgctcaatgggcaaaaagagattaaggtgccggacctcagcaccaagctggcctgtcatctcagcggcctgggagtgggttttttaccggaacggatgtgtcgttcctatctggagtccggggcgctggtggcccgcgcggtcgctaatggccgccagccttcgccgctctctgttgcgtggaaaaacgccggtagcggcaaagtggtcagtgaaatcgcccggaagtttaaacacaaagacgtgttagtcagcggatttttgcggatggtggatcgtcctgcgcaagcgtga

SEQ ID NO: 194263 - DNA, 834 bp, Klebsiella oxytoca
atgaaaacgatcaactcacttgcctgcacgggccttgaacgtctggcggacggcgtgtggcaacgccatagccaattttcacaggcgatcaatttttgccacgccgatggctccctactgacgttatttcgctatggcaaaggaataggtccgacgggcattctgctgagcagcgcgcagttcgcgcggctgggtcatctgacgcggctggtcaaacaaggggcgttactgtggggggcgggcgtgctgattcgtccgcgccggacgctcaaattacctctccacaccggcaatgcgttccctctcgatctttctgcttattcccacttaagcgggctgtgcggcgcgctcaatcagccactggcggacatgccgttttattcatcgttagtcagcgagcttgagcgttggtactgcggcgagcgtccggactggcgctggcttatcggcaatgggccgggattaacccccagcggcgatgatatgcttgccgggatgctggcggcactgcacggcgcggggttttcctgccgccttaaactatttatccccccggcggatcaacttgtatctctgacaacttcggtaagctgtagctacctgaatagcgccagacggggcgagttttcgctgccggtcgttaaagtgatgcgcgggctgcagtcgacaagcgacccgcagcgggctattcagcgtttgttggcggtaggccatacttcaggcgctgatacgctactaggaattgcattcgcgcagcactggttacagaaagtggactcaaggagaatgcatgctcgatcaggaaaccatccgcacgtttattcaggtcgctga

SEQ ID NO: 194264 - DNA, 1263 bp, Klebsiella oxytoca
atgtactcatctattgcacaggctaacgaagccattatcgaacgaatgaaagccgcgcgcccgcattgggttgccgtacgccctgcgaaagacgcggtggctgaattatcttctggacgtaaattactgcacgccgggccgccgatcgcctggcaggagatgaccgggccgatgcgcggagcctgtatcggcgcgtcgttgtttgaagggtgggcggcgagcgaagaagaagccgtgcgcctgctggagcagggcgaggtggaattcatcccttgtcatcacgtgggcgcggtaggaccgatgggagggatcacctcggcgaatatgccggtgctggtggtgcgcgatgtggttcatggcaatcaatcgtgctgcaaccttaacgaagggatcggtaaagtgatgcgcttcggggcctacggcgaggacgtgcagacgcgtctgcgctggatgcgcgataccctcgcgccggtgctgcaggaagcgctgtcgcgcatggaaaacggcatcgacctgacggcaatgatggcgcaggcaattaccatgggggatgagttccaccagcgtaatatcgccgcttcatcgctgctgctgcgtacgctgtcgccggtgattgccggtctggatcggccgaatgcggagatcgtcgcggtgctgcagtttttgagcgtgaccgatcagttcttccttaacctggcgatggcctacagcaaagcggtgatggatgcggcggcggaaatcaaagccggttcagtagtcaccgcgatgacccgcaacggtcgagagttcggcattcgcgttagcggcaccggcgaccgctggtttaccgcgccggtcaatacgccgcaggggttgttcttcaccggctacagtcaggccgacgccaacccggatatcggcgatagcgcgattaccgaaacgctggggatcggcggggcggcgatgattgccgccccgggcgtcacacgctttgtcggcgcaggcgggatgggcgccgcgctggagacctcggaagagatgtctgaaatttacctcaccaacaacccgctgttccagatcccctcctgggatttcaagggcgcctgtctgggactggatgttcgtcgggtcgtggagaccggcataacgccgcttatcaataccgggatcgcccatcgcgaagcgggtattggtcaggtcggggcggggaccgtccgggcgccgctgttgtgctttgaaaaagcgctggaagcgctggcggaactgcaccatctcaccgcctga

SEQ ID NO: 194265 - DNA, 1662 bp, Klebsiella oxytoca
atgatttacgcttttattaaaaagggaagctttcaggactccgtgagcctgatgattatttcccgcaaattaagtgaacgcccggaagtggatcaggtttcggtgatgatgggaaccccggcgaataaatcgatgctggaatcgaccggtttctggcacccggatttcagcgaagccacgccgaatgatatttgcgtggcggtacgcacccatgaagcgcagccggaaatcctcgatttaatccgtgagcagttagagaaagaattgatcgctatcgccaatgcgtcgggaagctctacgcaactgattaaggcgcggcgctgggagagcgcttgccagaaactgccggacgctaacctgctgttggtgtcggtggctggcgagtacgccgccggagtggcgaaagaggggctgctggcaaacaaaaacgtaatgctgttctccgataacatctcgctggggcaagaggtggaactgaaaacgctggcccgcgagaaggggctcatcgtgatgggaccggactgtggaacggcgatgattgccggcagcccgctggccttcgccaacgttttgccgcagggcgggattggcgtgattggcgcgtcaggaaccgggatccaggaaatcacctcgcaggtggcgttgcaccagcagggaattagccacgctatcggccttggcgggcgcgatctcagcgctgaagtcggcggcatcagcgccctgaccgcgctggagatgctggcggctgacagcgcgacgcaggttattgcctttgtttcgaaaccgccgtcgccgcaggttcgttctcgcattattgcagcaatgcaaaaacagcataaaccggtggtagcgctgttccttggcagccgcgccgagcagcgccgcgagggcaatgtctggctggcgaactcgctggcggatgccgcgcagctggcggtcctgctgatgcgcgtggcgcagcagcggcagagccagccgcaggttgcgggcaaggggatttatggtttgtatgccggcggcacccttgctgccgaggccgcgatgctgctctccgctagcctggggcttccggtcagcaacacccacgccgacggcgtgatgctggaagccgacgggcatcgcattgtcgatctcggcgacgatagctacaccctcggcagaccgcatccgatgatcgaccccaccacccgtagcattgaaatcgagaagctggcggccatgccggaagtcggcgtgctgctgctggatgtggtgttgggctacggcgcctgtgcggatcctgctggcgccgtggtggaagccgtcgagcaagttcgcggcaaacgcgccgcgccgctggtcgtcatcgccaccatgaccggtactgatgccgacccgcagggacggagcgggcagatcgccatcttgcgcgaggccgggattgcggtggtggataccctcgaagaggcggcgctgctggcggttagcctgacgcagcatcaaccaccttgcgaatcggcagcgcacaacccgctgctcgacggcgttcaggttatcaatgccggattgcgcagcttcgcgctggatctgcaaagcagcggcacgcgggtggtgcattatcagtgggcgcctgttgccggcggcaacgcccgtctcgccagtttactcaagcagttacattaa

SEQ ID NO: 194266 - DNA, 1224 bp, Klebsiella oxytoca
atgtcaggaacatatgaggtcaccgaggtgacgaaaagaaaaggaataccggcctggtgggtcacggtatttcttttctggttgggctgggtatttatgtatgccgatcgcacggtgttaaatccggtgatgggggaactggaaaaagagtttggtttaagcggcacgcaattaggcatactcaactctgttttttatttttcttacgctttgctgcaggtcccggcgggaattctcggcgacaaaattggtaagaaaaaagtgctggtgccggggtttattctgttcggcgtatttactgccgtcaccggttgggtaaaaagctggtatatgctgctgtttgcccgcgcgatcaccggcgctggcgagggaacgtattatggcccgcagtacggtttgtcttctgagcagatcccgaaaaaattccgttcgctgggtagcgcgatcatcaatagcggtatggccttcggtattgcccttggcctgatgacgtcgagctggctggtttacgatctgggctattcatggcggatgccgttctacgccatggcggtaccatcggtgctggtcgggattgccatctggttattcgtgaaagagaaaaagcgtaccgccgacgttgacggtaagccggtacaaaaaggcaaatttagcgatctgctgaaaaaccgtaatttaattctgacttatatcatggtgttctgcagtttgttcggattcttcgtgattctgacctggcttccttattatctgcaaaacgaacgcggcattgccggtagtgaaactggatttatttcatcgctggtcgcgtggatttccattcccggtgcgctgctgttctctggtctgtcggataaattaggccgtcgtaaaccgttaattctgttcctcgtgccggtggcgatcgccagcatgctgtcaattatttggatgccgagcatgaccggggtcatcgccgcgctgtgcgtgtatggcctggtcggcaaactggcgctggatccggtgctggtggcgctggtcgccgatagcgtcgatgaaaccaattacagcaccgcatttggtttatttaattttatcggcatgagctcatcgattctggcgccaattattgcaggcgcagcgcgtgatattaccggcagtctggcatcgagtttttatgtttccgccgggctgctggttgttggtctggtcgccatgctgtttttaaaagaaaaacgcacataa

SEQ ID NO: 194267 - DNA, 906 bp, Klebsiella oxytoca
atgaaaaagaaaattgtcattgcgctgggcggtaatgcgttactgcagcgcggggaagtgctcagcgcggaaaaccagcagcgtagtattcaactctttgcccggatggcggccgaattagcccgtgattatcagttggtgatcgtacacggcaatggcccgcaggttggattgctggcgctgcaaaacgccgcctatagcgagtcccccacctggccgctggatattctggtggcggaaagccaggggatgattggctgcgctatcgcccaggagctgatgcaatacgctggcgatacaccggttagcaccctgatgacccgcgtggaggtagcggctaatgatgacgcctttgccgcccccggcaaatatatcggcccggtgtatccgccgcagcagcaggcagagttggaaaaacgctatggttggcagatgaaagcggacggcggctatatccgccgggtggttccgtcgccgaagccgctgagtattgttgatagcgcggcgatccagacgctgatgaatgccggtcatctggttatttgctgcggcggcggcgggatcccggtggtcgccgagacgcacggctaccggggggtggaagcagttatcgataaagatctgacggcggcggcgcttgccagcgcgattaatgccgaccatctgctgattctgacagatgccgatgccgtgtatgccgattggggtacgccgcaggcccgcccgctgcatcatgccactgttgctacgctcgcgccgtttgccgcgccggacggcgcaatgggcccgaaagcggaagcggtgattcagtttgtcgagcataccgggaatcgcgcgtttatcggcgcgttaaaggatgcgccgcagatactggctggcaagaaaggcacctgcgtgacccgctaa

SEQ ID NO: 194268 - DNA, 1275 bp, Klebsiella oxytoca
atgcgcttaactgatattgctgtaaaaaacgccaagccttccgacaagcagatcaagctatcagatggtaaggggctttatctgctggtgcatcccaacggttccaaatactggcaagcggcttatcgcttcgatggtaagcaaaaggtcttctcaattggcacctacccgtctgtatcgctctcagaagctcgtacaagcctcttagagatgaaatctctgttagctaatggagttgacccgttgcagcaaaaaaaggctgtaaaagctgaggagcgcggagattttacgtttgaggcagtggcgcgggactggcacaaaaaaatgtctgtcagtgagcgctggatacctcagcatagtgaacggattttaaacagccttattaatcatcttttccctgctatcggctcaaaaaatattaccaagttgactacgcgcgatctgttgcttccgcttcgtaaaattgagggtaaaggccagcacgaaacggcttcacgcctgaaacaacgtattacagctatcatgcgttatgctgttcaagaagatatgattaacaataatcccgctaatgaacttggcggcacgttaatcacacctaaaagaacgcattacccagcgcttgaacttgagcaaatacccgatctacttgctcgtattgacgcttataatgggcgtagattaacggtattagctttaaagctcactatgctggtattcatccgctcaagtgaattgcggtttgctcgttggcctgaaatagatttcaaaaatgctttatgggttattccaccagaaagagacgagatcgagaatgtcagattttctgagagaggatctaaaatgcggataccgcattatgtgccgttaagtcatcaggccattgaaatattaaaagagctaaaagatattagttatgatattagcaatggtgagggtttgatatttatcggttgtcatgattatcgtaaacctatgagcgagaataccgttaataaagcattgcggcttatgggctatgacacacaaaaagatatatgcggccacggtttccgcacgatggcttgtagttctcttgttgagtcaggcatatggactgaagacgcaattgaaagacaaatgagccacaaagagcaaaataatgttcgtgcagcttatattcacaaagcaaagcatattacacaacgtaggcttatgcttcaatggtgggctgattatttagacgcaaacaaagaaaggcatattatgccgtttgattttgccagaataaataactaa

SEQ ID NO: 194269 - DNA, 1482 bp, Klebsiella oxytoca
atgaaagggaatgtagccaaaacagggagatcatttaaaaatagagttggttatatattaaaagatgatcacacctttatttgtagcaatatggcaagtgattataataacgttagtgatttaactgatgaatttaaaactgtaagcagctttagacaagatataaaaaaaccagtctttcatgcgtttttatctcttccaaaaggtgatcatttaacggatgaacaatggcaagagatagcaaaagactatttgaaagaaatgaatattgatattgaaaaacatcaatatatttgtgtgcgtcataacgatacagataaagaacatatccatgttgtagccaaccgcataggtttagacggttctgtatggcatggtcagcactcagcatttaacacaatagcagcttgtgaacgtcttgagataaagcacgacttaaccataactaagagcttgcaggggcaaaaatcagacgtattagcaccaaccaagaacgagatcgagcaagccctacgttcaggtgagaaaccatctcgtatcgtgctacagaacgcattacaggcggctatggtaggaaaaccagatcttgagacattcatagacagactgcaggctgtaggcatcgaggcggcctttaacgttgcaagcactggcaacgtcgccggggtgtcgtttggtatcaaaaaaaatgaaaaaaatatttatttcaaaggctcccagttaggtaaaaaatacagttggaacacaattaaaggcaaggtgaaatatgacaaagatagagatgatgaactcattagaagattcgcagcaagaaaaacagatgacgaaaatagtattagacgatcacctattgaaccaaatatctatgacagtagagccgttgacggaatcaatgatgatattatccgaatcagtcagcacagcattaaatcagacacaacagacattaaccagagtgaacaactcattagaagcaacaacaaccgctttaaactcagcgaaaaatataatagaccaacaggcccaaaagttagaagaacaacacaaaaagctgcacaggtactcaacagagttaaaaaacaatacaataaagaatcaatcaaggcttataataaaagtggcttcaatcgtgggagttctaaatttagcggcggttctatcagtaggatacttgatcatgcagaaacagcaaacgcagccaccaataaatttagactcaagagcggtagccgtttcaatagtagagcaactaagatcgaagaaataagaaaacgtttaggtattaaaaaaacagttattcagccaaagaaaatagttaaagaagaaataaagaaaaagcctttgggattgagtatggatgaaaatagatttaaatcgaagctaaaagaagctcttaaaaaagaaaaaccaaagaacgaaacaacaccactacagcaggaagacaatcagcatttaaaacctcttggttttaaaccgctataa

SEQ ID NO: 194270 - DNA, 378 bp, Klebsiella oxytoca
atgccaacaacagacagaaaacgaggacgtataaatttaaatgctgacgaacgccgagacatatcaatacagttcagagtaaacaaagcagagtttgaatatttaaaatcattagttaaagcctccggccttgagagggggcattacattagaaaagagattttaaactctgaaccagttattaaaaggaaaatgcctgaagtaaaccagaagacctatatacaactttcagctataggcaataacataaatcaggctgttaaaaaattaaatggcaatgagtattttgataaaaatgaagttgataagcttaattttaatataaagcaaaccagcagaaggataatagaaataaataaagacttggggtatatatga

SEQ ID NO: 194271 - DNA, 294 bp, Klebsiella oxytoca
atgaatgtagaaaacttaatgaatagtatgactatagaatataagctcgaaatacttgcaagaattttttattatatagaacaaaacaaagatataccatttggtgaaataaatatcgatgagcgggatttatgttattttgtagcaaatagatacattacagaaaataaagctgatgaacttattgaagcattgattattgaaaatgataacgactacataagagcaacagatgattacattattatgaggaataaaaaatgccaacaacagacagaaaacgaggacgtataa

SEQ ID NO: 194272 - DNA, 123 bp, Klebsiella oxytoca
atgctgaacttaattttatttattctgatttgttcaataaagacggaggaaaaatattatgatgattatgtctgtagcaatggtaatactttgtattatgttgggaggttttatgatccgtag

SEQ ID NO: 194273 - DNA, 393 bp, Klebsiella oxytoca
atgcatgaagattttgaaagtaggttgtctgtatatacagataaagattacttattagaaagtgatgcttttaatttaaatgatgaacaatataaaaaagcattaaagatgtattttgatttaagatatattttcaataatgataatctaaaagccattgatgcattaactagtattttatatcaaagatgctttttttacatacaagcgaacgcagagttaaatgttaatatagatagtctttttgatgtatatactgattattttgtagagcaaggaataatcaagaggatatatgattttatatgtaataacaatactgaggaacaatatgctgaacttaattttatttattctgatttgttcaataaagacggaggaaaaatattatga

SEQ ID NO: 194274 - DNA, 126 bp, Klebsiella oxytoca
atgcactggatgtcaagcaactgtattatacggtgctccgccgggctggtgcgtatttttaatagtattcagcaccttaatattatcagttttgatcggtatgagttcaggaataatggctggtaa

SEQ ID NO: 194275 - DNA, 870 bp, Klebsiella oxytoca
atgatattgaatcaaaatatttataatatagaaaaatacaaaagtcaaatacaagaatatgctttatgctgtgatgattttaatgatggtgtgtatcgaaaccctaaagaaaaggcattactgaagaaatatattggatttaataatcgttctttcgttaacggtcttgtattcgatgtagaccacgaatacggagcaatatcgtgggatttagtaggtttaccgaagccaaatattattattcaaaatacaaataatggtcatgcacatcttctgtatgcgttaaaaagtcctgtattgaaaactgatgcagcgaaaataaaaccgttgaaatttgcggcgtatgttcaggcgggactaactgaaagattaaaagcagataaggcatatactgatatattgatgagaaacccactaaataaaaacgaatcaagaacaatatgtaatgatataccagaatatgggcttgattatttatctgatttcgtccgcgaagatttttcaactcaaaataaaaagaagaatcgaagtgatatatatggattaggtcgcaacgttaatttatttgaagatttaagacaaatagcatataaagatgttttgagatataaatcaaataaatcatataatgaatttttcaatgatatgttttcaaaagctattgtattaaataactttagcaatgctactgatccactttctcacaatgaaataaaacagatctgtcaaagtatatgtaagtggacttggatgaatttttcgaaagaaaaattttctgagatacaatctaatcgtggaatgaaaaataaaggaaagaaaaaaatcacaaatttaagaacaaaactagataagatatgggagatattatga

SEQ ID NO: 194276 - DNA, 258 bp, Klebsiella oxytoca
atgattattaacggaaaaaagataaaagcaaaagatttcgcaaaaatggctggcgtgtctcgtaaaacgatagtgaaatattatgctatgcctcgtgaacagtatgaaaaagaagcagcagaaaaaagacaacttgcttttgaattgagatcatctggtcttaaatggcgtgaggtagctgaaaaaatggatactaccttagatagtgctatggcttattatcgtagatatttagcattacaagaaaaacaaatatag

SEQ ID NO: 194277 - DNA, 204 bp, Klebsiella oxytoca
atgaaagaaaaaacaaaactaatccgcatctctgaggtaatcgatcgcacaggattttgcagagcttggatttatcgactgattaaaaataatagtttcccggctcccgtaaaaacaggtgaacgatctatcgcatttattgaaagtgaaatcgatgcgtggattgaagaaaagattttttattcacgtaatcaagcagcgtaa

SEQ ID NO: 194278 - DNA, 879 bp, Klebsiella oxytoca
gtgaaactgaaaatgcaggatttgaggctgtttaatctcgtgtttgagagcgatcctggctggatactggatttctctaaccgcaccttgtctgctttttttgatgaagaactgaacattgatattgatgatgaacgttatcaggaagagggtacgtcaaaagccaaacgagttagatgcttgctgaaacaggctgatcgtgagaccgctctgcgggttcttggcgctctctggcagtataaaactgaatccatgcctgaacaggctgaacaaagtcgtaatgactatcttgcactgatttcccgcttagaaaacgctgacaccgatgaagccaaaggcgtaaagcctgtccaggcatggcatggtgttgattggccttcacttatcgctgaaatgaacgagatgaaatctctgccgccacatccacgtggttttcggtttgaagcctggcttgctgaactgttcagtatctttaagcttgctccccgttcgtctttccgaaatacaggcgaacagattgacggaagtttccgactgaatgatgaattttacctgatggaggcaaagtggcatcagaaaagaacgtcggctgccgatctccatgtatttgaaggaaagctcagtaccaaggcaacctggacacgcggcgtttttatcagctggatggggtttacgcctgaaggtctgacggcttttggtaaagggaagcgtgttatctgtgtcagtggttatgatctttaccactcactgagtcatgggatccctttacccgaccttctggacgctaaaacccggcacgcggctgaaacgggagagccctatgctgagttcgaccggctatatgcactgaagaacaaacagttcggcacgctgaaataa

SEQ ID NO: 194279 - DNA, 903 bp, Klebsiella oxytoca
atgatatttgatcgcctccccccattgcagactctgcgtgcttttgaagctacagcccgcctttccagcatgacactggcagcagcagagttgcacgtaacgcatggcgcgataagccggcaaatccggaagcttgaggagcatctgggattaaaactatttttgaggctgacccgacagataatcctgactcaggaaggggctgaatatcatcgtactgttacccgccttctgagtgagttaatgatggaatctgatcggctgcgtgggaggaaccatgcaaaaagtatacgtgtcagtacaacagtttcatttgctagcaaatggttggcaccgcgtctgagccgcttcaggcagagatatcctgaatttgatattcagctggatgtcactgacagtaacgtggatctcaatgatggtcaggtagatgcagccattcgttatggtcttggccattaccgcgacgtttcgtatgagcgtatcttcgatgaaacagttacccccgtttgtagcccgggttttcttaaagaacataatggcctggcagaaattaaggaactttcaaactgcgttcttcttcatgaatacagaatgctggcgaactgggaggcatggtttgaaatggccggagaaaaaaatttttgctgccatcatggccccttatggacccttggcagcatggcgactgaggccgctatacgtggcgaaggtgtggctctgggacgcagtgttctggttgcagatgatgtagctgctggaaggcttgttgtcccgtttccgcaatacaaacttaaggctgagcggggatacgatttagtttatcgctcggataatcaggattcatttaaaatacgaattctgagacagtggctcactgaagaaatgagtttgctggaagattga

SEQ ID NO: 194280 - DNA, 327 bp, Klebsiella oxytoca
atggaaagcttgtttgtttacggaaccctgggtcctggccgaactaatgctcatgttcttgaaaagattggggggacatggcaggaaggccacgttggtggttctttattagataaaggttggggtgcagagatgggatatccggggatcgtattagatgattccggtaatcgtgtacagggctttatattcatgtcagagaatttgcatcttcactggcacatactcgatgagttcgagggttttgagtatgaacgggtacaagtagaggtgactacatcttccggacagactgtaaaatcatgcatctacatgctcaaagcataa

SEQ ID NO: 194281 - DNA, 753 bp, Klebsiella oxytoca
atgagcattgaagattcaaaccaaggtccaggatggcatgaccatgatactccatatggtaccatccatagttatgatggcgatgaccatacttataatgaaggagggagcggtggtgcagcaggaaatcaacacactgggttaacagctaatacatgggtcgacatctcttccacaaaagattataacggtagatatatgtccatgtgtgttaacaatctgaaggatcacgaaggctccatcaatacaatgtatcgtgacagtgaaggtaacattaccgttggcattgggcattttttaggttcagctgcaatggctcaagctttaccattcaataaaacaaaagttgtccgtttgcacggcgatgatatggaaagtgaaatcgctgtatcaaaagctgatatagcttctgcatttaattattttaaagaaaaccccaaagcaattcctagtattcatctttcaaatgctgatgtcattggtttgtgtatcaaagatgttcaaacaactgaaacagggttgcgtggcctttaccctaattatgatagtttctccgacccacggaaaactgcactggtagatatgggttttaaccttggagtacctaaactgaaatcgaaatttcccaagtttaatgctgccgtaaaccgtggcgattgggagactgctgcggttgagtctcatcgagatttgaagcaaaggggtgatagtcgaaacaaagatacagctaaccagttgcgatacaatcgttag

SEQ ID NO: 194282 - DNA, 507 bp, Klebsiella oxytoca
atgttgcgatctttaacttttagctttttgtgtttctgctgtatcagtgaagcatcagcaaatgttaacgttttaattgctcctaagtctacgtcgtatgaaacaaacacatcaactgagattaaaaaataccttagtgaactagaacatggaaagataaataatctcgactcaaacccagaagacgtaaatcatgctattaatgcttaccttaataagattcaaaaaaaagcatctttattttttaaccatgatgaacttgaaagatacaatgggacagtttgtaaaatatcaatcactactggaaacacaccatcatcgtcacctattataactcaagtatttaccatcgaccagttagctgacaatgataaagaaccctgtcggaaaataaataaaaatctaagttcaattgtcactcacgatagtcaattccaatatccaagaatagtaaaagactatggtgatctgtctattgacatgatatttaacatcaacaacaaataa

SEQ ID NO: 194283 - DNA, 306 bp, Klebsiella oxytoca
gtggttctggcctgtaccctggtgtgccagacctatggaacgggtaatggcctggggtacacctccgatattaccttcaacatcggtggacaggaggtaacccgccgtatcttcgttgacgccggtaacatcacagccggcaccacggcctttgaattgcggtttgccgcgcgtctggacgctgactacaacaatgtcggcttctttatcaaggctacaggtcgtaatgccgcaattgattacacctgcacagtcgagaacatcaccgcaaccgcattccgaacggacagcagttcatttagctaa

SEQ ID NO: 194284 - DNA, 192 bp, Klebsiella oxytoca
atgacaatcataaaaacccataccggtaccgtgatcaccaaagacggtccgaaggttaaaaaactgcatcagacagagcggatgtgggtcgttggcaaaaacgagttttaccacaaagcgaccggatgccgtcattttgcagaaaatacgcgccgccggctgctgctcggcaccatcaagcctatcgagtga

SEQ ID NO: 194285 - DNA, 231 bp, Klebsiella oxytoca
atgaatcttgataacgagatcatttcaaacgcagacctcgaacgaattactggatacaagatcccctcaaagcaatcacagtgtttacgtgatgccgggattttctttgttgaagggcgagacggaagaccacgcactacctgggcgcatttcaataatcctttagctcagagattacgacagaacaacgtcgataattcgctgcagcccaactttggagcacttgattaa

SEQ ID NO: 194286 - DNA, 1035 bp, Klebsiella oxytoca
atgccacgtccaagaaaaaataaagacgatgcctggatgccaccgagggtttacctcgggagatcagcatatgaatatcatcctaaaggaggcggcaacattcgcctctgcgacaaaaccagtacacaagctcaggtatggagtgcatgggaagcgctaatgaacgatcgcccggacgactccatgctggaaggacttatcgaacgcttctttaaatctggtgaatttttcgagctggctctggaaacccaaaaggactatagaaagtactcaaaaaaaattattgatgtatttgggaaaatgccgccggacgctatcaaacctgaacatgtccggcgttacatggacaagcggggaataaaaagcaggacacaagctaacagagaaaaagctttcatgtctcgcgtgtatcgctgggcttatgaacgcgggttcgttaaagggaaccctacaaagggtgtccgccagtataaagaagttagccgagatcgctacataactaatgaggaataccaggcgctgtactctgtagcgccagacattgtgaaagtcgcaatggaactcgcttacctctgctgtgcaagacaaaacgatgtactggagatgaaaaaaagccaatttatggaagaaggcatcctgataaagcaaagtaaaacgtctgttgctcagataaaagcatggagcccgcgcttgaacgctgcacttgagttggcaaaaaatttacctcttaacgctggcatgagcagtctgtatgtcatccaccagccagcaggcggaaaatacacacgggacggctttaacagtcgctggagaaaggcaaaaattgaggcgcaggaacagtaccctcacctttcctttgacttcacgttccacgatctaaaagcaaaagggatatctgacctccagggcaatctgtacgagaaacaggcaatatcagggcataagaacgttgagcaaactgcccggtatgacagaaaaattgcggtagttccggttgtagatggacaggtggaaaggaaaaatattatgaagtga

SEQ ID NO: 194287 - DNA, 153 bp, Klebsiella oxytoca
atggcggatgtggatacagatagtcaggattccgaccggtacaccaccttaccctggcattactacacagtgaaccccgtgggggtaaggcatgcgaatgaagaatttgccggatgtagcggcgggaacgtcgtatataacatccaccgttag

SEQ ID NO: 194288 - DNA, 267 bp, Klebsiella oxytoca
atgccagtaacaaaaaccatttcagcaaaaacacgctcattttatccagatatagggctgactgttgattctgaagaacagaatattgaggtgacatacaccgtaatttcagtgacgattaacgctgacctctctgccacggccagagtgagaacgcagattacaggctatgacgataccagtgaaatttcggtacagtttacctattcaggtagcggcaacccgattactgaagcagaagcagcattaaaagaatcactttcctga

SEQ ID NO: 194289 - DNA, 327 bp, Klebsiella oxytoca
atggggatcagcctccctgcaagaacggtaaatacctcacttttgaaaccacgcctgtattcacagatagcgcgtcgtgcggttggggtaaggatcacgctgcttaatacaaaccccactaatcagtggacgggcacaggtactcttcaggttacgttgaatgaccaggttgttgtcggttcgggtaacttcacgcagggcagtgaggaccctatccagttgttcacacagatggaggttaaggagggcagcaacacgattcaggtgaataccagcaacaacgatttgctgtatgcggcctgccagattgaattactgataccgtaa

SEQ ID NO: 194290 - DNA, 540 bp, Klebsiella oxytoca
atgagggcttttttatggcagtacgaaaactcgactccggaaaatggatttgctaatgctaccccgccggacgcagtgggcgtcgtgtgcgtaagcagtttgccaccaaaggagaggcactggcttttgaacgccatactatggacgaggcagaggctaactaagccctggctgggtgaatcggtagaccgtcgaactctgaaagacgtaattgaactctggttcaaactgcatagcaaatccctgaccgctggcgagcatgtttacgataagctggtcctgatggtcaatgcactcggaaacccaattgctactgatctcagctcgaaattgttcgcgcattaccgggacaaacgccttacgggtgaaatctatttcagtgagaagtggaggaaaggtgccagcccggtaacaatcaacctcgaacaaagctatctgagtggcgtttttagcgagctggcacgactcggagaatgggcggcaccgaacccgctggagaacatgcgtaagttcacgattgccgaaaaagaaatggcctag

SEQ ID NO: 194291 - DNA, 327 bp, Klebsiella oxytoca
atggggatcagcctccccgcgagaacggtaaatacctcgctactgaaaccacgcctgtattcgcagatatcgcgtcgtgcggttggggtaagaatcacgctgcttaatacaagccccactaatcagtggacgggcacaggtaccctgcaggttacgttgaatgaccaggttgttgtcggttcgggtaacttcacgcagggcagtgaggaccctatccagttgttcacacagatggaggttagggagggaagcaatacgattcaggtgaataccagcaataacgatttgctgtatgcggcctgccagattgaattactgataccgtaa

SEQ ID NO: 194292 - DNA, 204 bp, Klebsiella oxytoca
atgagccttagccttgatatggtccacggtcttagctgctaccgcacgaccgttgcgcagacagttctgacacaggtgattgtcacgcttaaggatgcgggctcgcttaatatcccactggctgccatagcctcgctcatgcctgctcttgccctgctgatgctgctgccagccttcattacgatgcttctcgcagtagcctga

SEQ ID NO: 194293 - DNA, 936 bp, Klebsiella oxytoca
atgagcaacgacatcacaatcacttctcaacctggcgctaccgtcggcactgcggcggcaatattcagtccggaaggtatcaaccagttagtgcgctttgctgagctgatgtcccagagccgggttacggttccggcgcatcttgcagggaagccggcagactgtatggctgtagcaatgcaggctgcgcagtggggaatgaatcctttcgctgtggcgcaaaaaacccacgtcattaacggcgcgctgggttatgaagcgcaactggttaacgcagccattaccgcaatggcgccaacaaaggatcgcgttcactttgaatggttcggcccatgggagaacgtgatcggaaagttcatcgaaaaaacaaacgacaaagggaaaaagtatcttgcagctggatggtcagcaacagatgaaaaaggatgcggggtaaaggtttgggcaacgctgaaaggtgaaagtgagcctcgagtcctggacctgttacttacccaggctcaggttcgtaactcaactttatgggggagcgatccaaagcaacagttggcctatctcggtgttaagcgctgggctcgcctttactgccctgatgtaattctcggagtttacacgcctgacgagttacaggagaccgcgccgcgcgtagagcgtgacatcacgccaccagcaagaaacgctgccgggatgaattcgctcatcaacgctaagcctgatcagcaaccggaagaacgggccaaaaagtctgatgaccgcgatccggatgaaatgctgacagccttcactgatgcagcaatgaactacaacaccattgccgatctggataaggcatacaaatacgtcgctaaaaatctggctaacgatgaagagcgtctgtcgaaagcaaccgacgtctacaccatccgccgcgatgaactgaacgaaatcccgatgtaa

SEQ ID NO: 194294 - DNA, 822 bp, Klebsiella oxytoca
atgaacccaggtatctatttcgacatcagcaacgaggattaccacgccggcgacggcgtgagtaagtcgcagctggatatggttgcaaagaaccctgccctgctgaaatgggtcaaggcagcgccggaagatgaagagaaaaagtccgcgctggacatgggtacagccctgcactgcctgctgctggagccggatgaattcgataagcgcttcatcattgcaccagcattcaaccgccggactacccagggtaaagcagacgaagaagcatttctgaaagatgtatccaggcagggaatgacggtaatgaccgccgaggaaggccgaaaacttggcctgatgcgcgaaagcgccatggctcacccggcggcgcgctggatgctggaagccccgggttactgcgaagcatcgatgtactggaatgacgatgagaccggcgagctatgccggatccgcccggataagtggctcaacgagcacaacgtgatcgtcgacgtgaagaaagtagccgacatggaccgattcgccagacacatcgaggaattccgttaccacgtccagaacgctatgtactgcgaaggcgcgcaaaaagtgacaggagaagtacacggattctttttcctggccgtcagcgaaagcatcgactgcggtcgctatccggtgcgcgtgtttgaacttgatgcacctgatgttgataccggaatggcgctgttccgccgggatctgaatacctatcaccagtgtcgcctgtcagatgaatggggcggcgtggaaattattaaacgccctgaatgggcacgcaaacaggatctgtacgtatga

SEQ ID NO: 194295 - DNA, 978 bp, Klebsiella oxytoca
atgagcgaatcaaaagagttggttttggtaacactgccagcagcggcagaacttgaggcggcattcattagcgatgactacatcaatcgccttatttctgacatacgtcagaaagcgacgtcagtcgttggtgacgtaaatacggttaaaggtcgtggcgtttatatcagcatggcttcaaccgtccgccgcacaaaaacggtaattgatgatgccgggaaagcactggttgcagaaatgaaaaagcgcccagcactggtagatgcgagccgtaaaaaggttcgtgacgcgcttgacgaactggctgttgaaattcgtagcccagcaactcaatgggaagaagaaaaggcccgtctggatgctgaagaggctgcaaaaaaagcagctgaagagttggcagcaaaagtcgagctcgatcacgagatggcgctgttgatgaataaagatatcgaccgcaatcgtgccgaaaaagcagcagaggcagagcgccagcgcatagcacacgaagaagagattaagcgtcaggctgaagaaaaagcgaaacgtgaagcggcagaactggcgcaacgtgaaatagacgcgatagctgccagagagcgcgaggcgattctggcgaaggagcgcgccgaacgtgagcagaaggaagccacagaaaaggctgagcgtgaagcaagagccgcagcagaaaaagcagaagccgacaaacaggcagctatcgaggcagaacgtcgcaaggctcaggaagaagccgatcgaatccgccgtgaagccgaagaaaaagagtcggctcgcctggctgagcagaaacgcattgcagaagaagaagcgcggcgcgcagctgataaagaacatcgccgcacaatcaatcgtcaggcaattgctgatcttattgaaagcgggcttacgcaggaaatggcggagaaagcattgatcgccatagccagcgggaaagtatctgcggtccagatcaaatactga

SEQ ID NO: 194296 - DNA, 210 bp, Klebsiella oxytoca
atgaaaatcattactcgtgtcgatgcggcaagggccggattgaaacgctactacaccggcaagcaatgcaagcacggccatgacagtgagcgctgggtttataacgggcattgtgtcgaatgcactctcgagaccaaccgtcgtcgccatgctgagataaaacggctaatgcatgaggcctcaagaggtaatgctgtggaggtgatctga

SEQ ID NO: 194297 - DNA, 792 bp, Klebsiella oxytoca
atggcccgcattcgcaccattaaacccgagttctggaccgatgaagatatggcagaagtatcggaaccggcctgtctgctggctattggtctgctcaactacgcagatgatgaaggctatttcaatgcaaacccaaagcttataaaagcagcggtttttcctattcgtgaaccatccattcctattaccgtactaatacgggagctttccaactgtggttatttatccatattttccacacctgacggcaagcattttggtctgataaataacttcctcaaacaccaggttgtaaacaaggcaaaagaaagcaaaatcaaagcgttaaacctattaccgtacaactacggtactgagcaggtattagtacctttaggaatggatcagggatcagggatcagggaaagtaaaacccctctctctgcgcgtgaagaagaagaagatttaacacctccgcaagaaccgccggcaccggtagatgttccagggcttaaccaaccaattggtaaatttccaatgaatcagtcctggaggccttcggaagattttgtcatgcgtgccagattgtgggggcatgcgctaccagctgatggttacaaagaaactgacctcgccgaatttgttacttattgggctgctgaagggaaagtgatgcagcacgttcaatgggagcagaagttcgctcgtattttgatgcagaaactatccaaatcagcagtgcggaaaggtgatgtctccgatggaaacttaccgcactggaacagtccagaggcatgggaggaattcctgtga

SEQ ID NO: 194298 - DNA, 783 bp, Klebsiella oxytoca
gtgaataacgtatttaccgcaatcaacaaccgcgacggggcagcgctgtccagaatggcaggatcagaccagcagcattcaggtgatagcgtggtgaatatcaccgccgaacgccttgtcgatgccctgtttaagcagctcaagcagctattcccggcagcagaacagaccaacctgaagacaccagcgcaggagaccgccgcaaagcagcagtggattgccgcattcgctgagggaggggtccgcaccagagagcaggtatcggcggggatgcgccacgcccgcgccagcgcttccccgttctggccatcgccaggacagttcatcaagtggtgcaaagacagcaagatggtgttgggtatcagcatcgatgatgtgatgggagaatttcaccgttactcacgtgagaagagtttgcagcctggcggccctgagcggttcccgtggcgtcacccggttatgtactggattgtgtgcgatacccggcgggctatgtatcagcgtcagctgagtgaggcagaagtcgaaaagcacgcgcgaaagcttctcgatgaatgggctgaaaaagtagcatcagggcagcagatacccgatccggtactgagcatacaggagaagccggaaccgataagcacaccacctgacaccggcggtaatgcctaccatccaccctggcgaagttttggatgtatgcctaacgcagcgacgctcggaggcataaccccggcccagtggctgatggaggaataccggcgagggaaggcagcaggactggtcaggtaa

SEQ ID NO: 194299 - DNA, 333 bp, Klebsiella oxytoca
atgaacatcgaaacagtaaacgagctcattcagtcgctggagagtgcgggcgagctgtcgatcaaagagacaaaggttatggcgctggcgaaagcttaccagcagctggctgcggagaatgtggcgctgaaaaatccagataactggctatcacagagtgattacggctatgaggcgtcagaagtggctgcgggttacggtgcatctgaggatgaagtgctgcgtgccggaatgatcgcgattattaatcgaatcgcaacccccgccaccgatcgcatcgtagccgggattaattcacacttgaagcagctgcgcatgggatccgacaaatga

SEQ ID NO: 194300 - DNA, 735 bp, Klebsiella oxytoca
atgacaactgatatcaccgaactggcgcagagcctgaaagcgtcagcagagaaggccactccggggaactggagagcatttaaataccacgacgggcgctgtggtattggcggaggccatcacgatgagattatggtgtgtgaacacataagcaaaaggcgtccacatgacgcagaatttatcgctatggctaaccctgccaacgtcctcgcgctggtagaggcgctggagaaggcgcaggccactgaggctcactacaatcgtggatggaacgaggcgcatgagcaggaggaaagggcagaggcagcacagaagcgcatcgctgagctggactcagagcttgagcgggagagggaaaaatcacggcgcgtgatgtctcgcatcgccgagctggagtcccgcaccgtcaccgtggctgctgctgatgtgctggcagaacgccagaggcagatttcagcggagggatggacaccatctcacgacgacacgcacaaaaataacgaaatggctttcgctgctgcctgttatgcgttccattctgccgccgcatcatgggatctggaagattgcggcacggagtacgacagccatcctgcgccgaagaactggccgtgggagccggaatggtggaagccgaaatcagcgcgcgctgacctggttcgcgctggagcgctaattctggcagagctcgaacgcatcgaccgcgccgctggcatcagggtagaggctgagtga

SEQ ID NO: 194301 - DNA, 219 bp, Klebsiella oxytoca
atgccgttccatcctggcttttggtaccgcaacggctgcgagatgttttttgcatgccagcgctcttttggttgcatcctcgtctcttccgaggtgtcacaccgtatcgcctggatggtggatccattgtcagtgcataccgttcactggcttgcacattccggctacccgctcgggggtaggaatatcaaggaaccccgccggaccgcttcggcataa

SEQ ID NO: 194302 - DNA, 2814 bp, Klebsiella oxytoca
atgccagttgtaccaacagtcgccgggcgtcaggttgaaagccgcggcgtgcagaccggaggttttcaggtcgtcgctcaaccaaacgccggcgatgcgctgctgagcgcaggaagccaggcgcttgacgtgttcggccaggctaaacagcgcgctgatgtcgctatggctcaggatgcatcgctgcaactgacacagaccgcaagcgatctgatgaccaacccgcagaatggcctgcttaacctgcagggtaaaaatgccctcggcaaggggcaggaatacacccagctctttgacgcaaaggctcaggagctggcgatgcagttgccggagtcggcgcgccagggattcctgcagcaggctcagcagcagcgcatccagtttacgtctcaggctggccggcatgagatagggcagctcaatgcgtatgaagaggggcagttccaggcgacgcttaccatcggcgccaaaaccgcttcggcgatgtacggcgataacgccaactatgtgctggctaatcagcaggcgtttcagcaaatagaaagcttcggcgctgcacatgggtggagccctgagcagatccaggccaaaaaggtggaattcaaagagaaggtagctgatggcgcgctttctcagtggtcagcaaataacgcgatcggattcattcagagcaacggtgagctgagcgatacggccgccggttcaaggcgggctactgttaacccttatggtggtgagccatcatctacgaaaggaatggttacccaggggaacattaacttattcaaccgaccatctgtaaaaaacgaagatggtactatcagcacggtaagaactatttccataggcactgatgcaggtgaagtcctgataccaacggtcagtgatgacggtaaattactttcagatgatgaagcaatcgcgctatatgaaaaaacaggaaagcaccttggaatatttgataatcctgatgatgcgactgcatatgctgaaaagttgcacgagcagcaagatcagtattatgtgaaaggtgatagcggcgatgccaggggtatccgcaacaataacccaggaaacctcgaagccagctcatcaaacccatgggtagggcagactggtagtgatggccggtttgcaaaattcgagactccggagcacgggatccgcgcgctggggcgcaacctcatatcctaccagcggcaggggattgatactgttggcgagatcattaaccgctgggcgccgccgtctgacaataacgacacggccgcatacatcaaagcggtttgtgcgcagttaggcgtaacggcaaaccagcctcttgatgcttccaatcctgatacgctgcaggcgctctgtgccgctatcattaaacatgaaaatggcacgcaaccatacagccctgaccagctatcaaccggcgtcagcgcagctcttgggctgtcacagttgccaaccagcaataaacgttacaccggcaatgcagcattcgacgctgccacgccggaagcgcaggccacttttctgcgccaggctgaccagatccgtcggcagcagcaggccgaatacagaacggctatcgatagccaggttcgcgacgccaccgcggcttacatgcgaggtgttgagttcccaaacccgccaggggaagctgattttattgctgcctacggcgtgcgggagggaaaccagcgttacaccgaattcaggaatacgcagattgccgggcagtacattggctcattccgcaacatgcctaccagcagtatcacggcatacgtcaaccagttgaagccgacgccggaacagaccggtgagggctatgcatcacgggctgaattattcgaccaggtatcagccgccgctaaccaggtgatcaaacagcgtcaggccgatcctattcagttttctctgtcttccggccagagtaagcctatagacatgaccaaccaaaataactttggccagagcattgcgctgcgcgcatctcaggcagccgaactggcaaaatcatacggcacgccgttaacttttttttcaaaagatgaggccagccagatcgggactttcttccgcgatgctccagtttcacagcagtctgcataccttgatatgatcagacaaagcaccggtggagggcaggtctatatggctgcgctgcaacaaataagtaccaacgccccttctgccgcagtcgccggtatcctgatggacaagcctggcggcgtggttgctgagaaaaactggttcaatcctgacgtgtctgtgtcgccctctaccgcatcgcaaaccattctggctggtgccgcagcacgcaaaggatcgaaagaagccaaaggcattaccatgccgaaagaaaacgatatgcggctcgagttcagcaataccgttaaagatgcatttgccggtgacgcacagggcgcatctatggcgtatgacgttgcgaaagactactacgccggagtaatggcgcagaagggcaatctctctggcgagctggattctgacgtctgggagcaggcgataaacgtcgctactggcggcgtgcatgactataacggcatgggtaatgtcctgctgccgtggggcatgtcttctgagcagttcgataaagaggttaatcaggcatgggaaacgcaggttaccggtgctggcgttaaggctccgcctgggcagtacggcctgcaaagctacggcgacagccagtatctcgtgaaacttggtaccggataccttctgaaacaggacggaacaccggtagttatcgatctcacgcagcagcgtcagcgcttctctggagatatccctcaatga

SEQ ID NO: 194303 - DNA, 1806 bp, Klebsiella oxytoca
atgagttacttcggacttaacccggtaaaccagaatcagcagctggaccaggccgcatcaaacccagtaggcagccctaaaaacgatgttgggtttttcgatggatcagtcagcggtgccgcatcaggtctttattccggccttgttgcaaagcctgaccagcttttgtgggctggtgttgatgccgttgtatcacccatcgctcagtttgttaatgacaatacatcgtttcgtgacacgtcacctgaatacatcgcccgacagagagagcttgctgcatcacaggttaaacgcctgacgccggatgccgccactaccggcaccgccggacaggtgctgtatggtcttttcgatatgggatcgcaggcagtagtaagtacgctggcagccggtcctgctggcgccgctgctgctgtgaccagcttgcaggggttctccgagtttgagcgactgcgcggcgaaggcgtagattacagcaccgcccaggaagtggcgctggtacacggccttacagctggtgccggtacagtcataccgatgagcatcggcctgcgtgctggtggcgcactggctgaaggtgtcggcgctcagttatcacgatcggcgcttgggaatgctgctggtaccgttgtgcgagctacgcctgatatcgcttatgcggcaggcacgaacgtcgcctttggtatggctatgcgcggcagcaccgcctccattctgcgcaataatggctatgaggatatggcctcgcagtatgacgttttcgataagcaggcgatggcgatcgatgcagttctcggactggcattcggcggtgtaggccggttcgtaaactcgcgtggggaaaatgttcgcccgcctgattttatgcctgccgacgtcgatgcagctctggcggccaatgctgctcatcatgctgagtttgatatcgctccagggattccggttaatgtgctgtcacgcgatgcgcatgcccaggcactacggcaggcgatgcaggatgtcagtgcaggccgatcggttgatgtggcgagcattgttgagccggcggcattcaccagcataccggcacggcgcagcattatatcgcaggcactggatgagatgctttctcaggcagatgagggtgcaacatccagagctattgaaatgcggacgcttgaggatcaggctgcgcaaattcttccgcgtggcgaccgcaaggtttaccagtcagaaatagccaacagcgaacgcattatcactaacctcactgagcagcgtaaccagatactggcagagcaacccgcgggaagcggcaaagcgctgtcccgtgcccgagccgataagcaggcaaggctgagagatgtcgatcagcggatcagtgaagcacaggggaggctggaattctctcgtaacgcactggccccgcatgagcccggtggtgaattcttcgaggcaagagcagagatcgcccgcaggcagcaagcagaggcagagcttgatgctcaggctctttcatttttccgcacggcagaagtgcgctccgccgatgaagtcgcaccgctggagcctaacgcggctctccgggacatagaaaacacgccatcgccaagaatggcagagaatcagcaggacattgatgtgatggctgctgaagagtcactggcattatcgccagatatgatgatcaccgttcttgatgatgacggcaatccacagtccagaagcgcgcgtgaggtgcttgatgatgctgcacgtgaaaatgagcaggcagtgcgggactccagactttttgatgtcgctgttgcgtgtttcttaagaggataa

SEQ ID NO: 194304 - DNA, 2475 bp, Klebsiella oxytoca
atgcgtcaggaatgtattaacgccgtgcagcaggccgcaagccgccgactcacgcagcaggaaatcaagaatattgaagaccgtatttaccggaacatgcggcaactggcccgcaatgatccggcttcgtggcgggcgatgactgacgccgaacggctgcgccgagccgggcagttagcagcgaacgaactcactaacgaagctgcgctgaagaagcgccgcgtggcactcaccatcgcagccaggcagcggctcgacgccttcataaagacctaccaggggaaagacggcaagcttgaggcgcttaaccggaccatcgcctttcacgctgacgggaaatcaaatttcctgtcggtagaatcacgcggcaaagccacacgcgactatgcactaagccagattcaggaagcatttgaagcggtagacccgagattcttccacctgtttgaggacgaggccagcgtgcgcgatctggtttacgagatgcgcgggcaggacactggcaacgtcagggctaagaagggcgcaaaagcatgggctggcgttactgaactgctgcgccagcgcttcaatgacgctggtggtgatatcggctacctggaaaattggggcatccctcagcaccactcaatggagaaagtcggcagggttccgcaggataaatgggttagcgacgtcatcggcaaactggatcgcaagtactacatcaaagatgacggacagttgatgagcgatgctgagttgaaaaccttcctgggcgaggcatacaacaccatagccaccggcgggctgaacaaattaagcgatactggaatgcgcacttccggcgcgcgctctaatcgcggtaatgcatcccgtcagatccacttcaaagacgcagactcctaccttgagtatcagcgagaatatggcgatcgctctctgtgggaagtaatggtcgggcaccttgaaggtatcagcaaagatatcgcgctggttgaaacatacggcccgaaccccgatcacgttttccgctctatcctggacgaggttacggctgaacaggccactgccaaccctgagcgcactggcaggattaagcgcctggccaacagtaccgagaacctttacaactttatcgccgggaagacgcagccgatcgctaatccgcacatcgcacgatggtcggacaacatccgaaactggatggtggcgagccgacttggttccgcgctgctggcttcattctctgacctgggcacgatgtatatgtcggcgaaggtagcgaacatcccgatgaaccgactatttatgaaccagcttgaggccatgaacccggcgaaccgcacggagcttgcccgcgcccgtcgcgctgggctggctatggaatcgttgctcggcagcgttaaccgctgggcgatggacaatatgggaccgtcggtttcccgctgggcggcaacggcggtaatgcgcgccagcggcctgacagcatggaccgatgctcacaagcgtgcctacggcgtgacgatgatgggcagccttggcgaagtggtcagccgggcgccggatctgagaagccttgatgacagcgatttccgcatactgaagagcaagggcattactgagcaggacttcagcgtatggaaactggcgcaacaggaagactggggtaacggaaacactacgatgctcacgccggaaagtattatgcggatccctgatgctgctgttatgcacttaggactgccggagcgagtcaggtttgaggccatgcgccggctgttggcagcagtatctgaagaagtcgacatggcagtcattacgcctggcgcgcgtgagcagctgcttaccggtggcgggttgcagcgcggcacatggaaaggtgagttaacccgctcggttttcctgtttaaatcgttcccgatatctgttgttttgcggcactggacgcgtgcaatggggatgccttccgctggtggccgggctgcctatatcgccgcattcctcgccagcaccacgatgctgggcgcgctatctcagcaacttaacgacctggcatccgggcgtaacccacgggagatgaccggaaaagatgctggtaaattctggctcggtgcactactgaaaggtggtggccttggcctgtatggtgattttcttctttctgaccatacccgttatggcggcggtgcgctggcttcaatgctggggcctgtggccggactggttgatgacgtggttaagctggctcagggtatcccgcttaatgccgttgaaggaaagccggagcagacaggtggtgatctggttaaactcggcaaggggcttatccccggtgccaacctatggtatgcaaaagcagctcttgaccatatgatatttaatcagctgcaggaatacttctcgcctggctatctgcgcaagatggagcagcgttcgaagaaagaattcaatcaaacatactggtggcgaccgcaggacgtaacgccggaataa

SEQ ID NO: 194305 - DNA, 297 bp, Klebsiella oxytoca
atgcaagctattggctttatcgtttacatcgtggtggggctcttccaacttgcagcaatcatggctggactagaatcgtggtggggcttgcactggataatagcggcaccgattgcattcatcgtcagctatataccactggttggatctatcgtgggaatggttggagccatggacgtatggcgctgggagtggtggcaggctggtctacttttctttggtggtctaatctttgctatcgcctgcggaggaatgtcttcgttcttcgaatggctatccttcaggaaaagagtgtga

SEQ ID NO: 194306 - DNA, 387 bp, Klebsiella oxytoca
atggttaagaaaatcacattactgggcttgtctgctctttttgtttcacacgttgcttttgctgataattcgagcaactggatttccgttgcatctaatgacaccactgaatattcagctaaaaaaggtactttcaaaaacatcaaaggcgagtcatctatccttatgatgttcgataacaaaagcgataagacaatcaaatactacaaagtcagcatcaaaaatgcggattgtgacaatggcttcggaaagctgagtttcttcggtatggatgggagattagattttcagggcgactacgtagccgatggaaacagtgttggcgctggtatgggtgattttatttgtgctgtgagggttgcagcagctaacgcacaaaaaggctaa

SEQ ID NO: 194307 - DNA, 918 bp, Klebsiella oxytoca
gtgagagagagaagaacaattcagagccttacttctctcaaccctgagtgggagcatactcttgatatgtcacaattaatacgcaactgtgaaaagctagcaactgaaggtatattaatggagttatcttcagggcatactatttttgaacggtgctattatgcacaaaacttcagtgaaatagatgctaaatatgggaagtatgattttatagctgacggatttgaaaaaatcatagaacgtcttagcccttccgttttccctgttgttgttgaaaaaagtgatggctcacatgaccttggtactagctttgttgttgggaataaccataccatattcacagccagacatgttatcgaagacatgaagagtatcaggatacttagagctggcggggagtcattaccaatacataaaatctttgtatctaatgatgaacgcgttgatattgctttagttgccacaaccattccgaatgaagaaaatattcaaccacttaaggtttcaagcaaagtctcggttctggatgaaatcttatcaatagggttcccccctatccctggatttgattctttaaaattatatgacgtttcacatataaattcatttgtccgactcgcaaaggggcgaattgtaggctctggtcactcttacttggattcacaagatttcctattattcaatgctagggttaagggtggaaatagcggcggccctataattaataaacacggccttgttactggtatgcttgtgcaaataccaatatcatctgaggacagttcaaaaattgataaccttggctatggtattgctgtgaccggacaaagccttctggatgctctttcattttttgaaaacggccgcgaattaagactcactaatttagggggtggtgaatattccactctacagtaa

SEQ ID NO: 194308 - DNA, 4293 bp, Klebsiella oxytoca
atgaaaaaaattaacccgttatttatctccggttgcctgtttttttcgctacctgcgatatcggccagccagctggaagccaaacccggcgtgtttgagcaggcgaggacgggtatcgatgcggcgattgaacgtgagcagctgatcccgctcgaccgggagaaaggcctgttcacctcaaacatccatgtcctggatgaattgtccgttaaagcgctgagccaggaggttcagcgccagaatcatgtctccgtcacgccggatacctctgttgtgcgtcagtcgcctttcagcgatgccgtcagtgtgctggctcaggacctgccgacaatggggattgtctccggccagggcggcgcggctggccagcgtgagcgggtagctgagttaaccctgatggcacgggagcaagggcgggacgtgcacattgttgctgctgacaaccgttcgcgtgagtttctgtctgcggatgcgcgtctggcgggagaaacggtgaccgggaaatctgccctgcaggacggaaccgcgtttatcccgggcgggacgctcatcgtggaccaggcggagaagctgagcctgaaagagactatttctatgctggatggcgccatgcggcataacgtgcaggtcctgctctccgacagcgggaagcgcagcggcaccggcagcgcgctgacggtgctgaaagagagcggggtgaatacgtatcgctggcagggcggaaagcaggcgacggcggacatcatcagtgagccggacaaaggcgcacgttacagccgcctggcgcaggagttttccgtcagcgtacgcgaagggcaggaaagcgtggcgcaaatcagcgggacgcgtgagcagggcgtactcaacggcatcatccgcgacaccctgaaaaacgagggcgtgctggggacgaaggagatggccgtcaccgccctgaccccggtctggctggacagtaaaagccgcggcgtgcgggactattaccgggaaggaatggtggtggagcggtgggacccgaacgcccggaagcatgaccgctttgtgatcgatcgggtgaccgccagcagcaatatgctgacgctcagggacaaagagggggaacgtctggatatgaaggtttctgccgtcgacagccagtggacgctgtttcgggccgataagctaccggtagcggaaggtgaacgtctggcggtgctggggaaaattcctgagacgcggttgaaagggggcgagggtgtcacggtactgaaagcggaggccgggcatctgacagtgcagcgccccgggcagaaaaccacccagaccctggctgtgggcgccggaccgttcgacggtatcaaggtcgggcacggttgggtggaaagccccggcaggtcggtcagcgagacggcgaccgtctttgcctcggtgacgcagcgagagctggataatgccacgctgaaccagctggcgcagagcggaagccatatccggctttactccgcacaggatgcggaccgcactacagagaagctggcgcgtcataccgccttcagcgtggtctcagagcagctgaaggcccgttccggcgagacagaactggatgcggccattgcgcagcaaaaagcaggccttcactccccggcagaacaggccattcacctttccattcccttactggaaagcaacaacctgaccttcacgcgtccgcagctgctgtccacagcaatggaattcgacgggggaggtaaggtcccgatggcggatattgaccggtccattcaggcgcagattaaggccggcagtctgctgagtgtgccggtggcgcccggtcacggcaacgacctgctgatttcccgccagacctgggacgcagaaaagagtgtgctgacccgggtactcgaagggaaagcggcgatgcagccgctgatggaccgcgtgccggccagcctgatgacggacctgacctccggacaacgtgcggcgacccgcatgatcctggagacctctgaccgcttcacggtcgttcagggctatgccggggtggggaaaacgacccagttccgggcggtgacgggcgccatcgaccttctgccggaagagacccgcccgcgcgttatcggtctcggtccgacacaccgtgcggtcggggaaatgcagagcgccggcgtggatgcgcagaccaccgcctcgttcctgcacgacacgcagctcctgcagcgtaatggccagacaccggatttcagcaacaccctgttcctgctcgacgagagctcgatggtggggctggccgacacggcaaaagccctgtcgctgatagccgccggcggcggccgggccgttctgagcggggacaccgaccagttgcagtccattgcacccggccagccattcagactgatgcagcagcgcagcgccgcggatgtggccatcatgaaagaaatcgtgcgccaggtaccggaactgcgaccggcggtctacagcctcattgaccgcgacgtgaacagcgcgctggcaacaattgagcaggtcacgccggagcaagtgccgagaaaagaaggcgcctgggcgccgggcagttctgtggtggaattcacgcgggcacaggagaaggcgattcaggaggcactgaagaaaggcgaaagcgtgccggcaggtcagcccgcgacgctctacgaggctctggtgaaggactacgctggtcgcaccccggaggcacagtcgcagacgctggtgatcacccatctgaataaggaccggcgggcgctgaacggtctgatccatgacgctcggcgggagaacggggaaaccggcaaagaggaaatcaccctgccggtgctggtcacgagtaacatccgtgacggtgaactgcgcagactgtcgacctggacggctcacaaggaggcggtggcgctggttgataacgtataccaccgtatcagcaaagtggataaggataatcagctgatcaccctgacagacagtgaaggaaaggagcgatttatctcaccccgggaggcatcggcagaaggcgtgacgctctatcgccgggaagatatcaccgtgtctgagggggaccgaatgcgcttcagcaaaagtgacccggagcgcggctatgtggccaacagcgtgtgggaggtaaaatccgtctcaggtgacagtgtcacgttgtcggacggcaaaacctcccggacactgaacccgaaggccgacgaggcgcaacgccatattgatctggcgtatgccattaccgctcacggggcccagggggccagtgaaccgtttgccatcgcgctggagggcgtggcggagggccgaaaagcgatggccagcttcgaatccgcctatgtcgggttatcgcgtatgaaacagcatgttcaggtctataccgacagccgggagggctggataaaagcaattaatgcctcgccctcgaaagcgacggcgcacgatattcttgcgccgcgtaatgaccgggcggtacacactgcggagcagctgttcagccgtgcgcgaccgatgaatgaaaccgcggcaggccgcgcggcgctgcagcagtccggccttgcgaaggggatatcgcccggaaaattcatttcgcccggaaaacagtatccgcagccccacgtggcgctgccggtgtatgacaagaacgggaaagaagccgggatctggctcagttcgctgacggacagcgacggccgcctgcaggtgatggggggcgagggacgggtgatgggcaatgaagatgcccgctttgtggcgctgcaggggagccggaacggcgagagcctgctggccgggaatatgggagagggcgtcagggtcgcccgcgataaccctgacagcggcgtggtagtgcgccttgctggcgatgaccgcccctggaatccgggcgccatcaccggcggacgcgtctgggcagatccgataccggtagtttcaccggaggcggcaggaactgacattccgcttccgccagaagtgctggcacagcgggccgcggaagaggcgcagcgtcagaatatggagaaacaggcggaacagactgcccgggaagtggccggggacgggcgtaaagccggcgaatctgaagaccgggtaaaagaggtcatcggagacgtcattcgcggtctggagcgcgaaaaaccgggtgaagagaagatgaccctgcccgacgatccacagacccggaaacaggaagcggccgttcagcaggtggctcaggagagccttcagcgggagcgcctgcagcagatggagcgcgatatggttcgtgatctcaatcgtgagaaaacgctcgggggcgactga

SEQ ID NO: 194309 - DNA, 261 bp, Klebsiella oxytoca; identical to SEQ ID NO: 191074

SEQ ID NO: 194310 - DNA, 483 bp, Klebsiella oxytoca
atgaatgaattagagtatgaaaaaattttttcctttaacaaatcgagcgataaatataaaatagagttaacaaaagcaataaaattcctattatccaagcaaagagttatcgaagctaagcatcatttttttgaattggaaaaaataaacccaaatcacaaaattgttatggaactgggttttgaactaggtatcaaaacctttgacagggaaatgtctgttaaataccataatttacttaatgagaataaaaaatatagccaacatgagcttgctctcaagaggataatttaccacttgtcaataaatgataaaaaaaatgcgtcttcagatgcagcctctcttttggatgatatgagtttagataaagacaggctgcttaagttatataatctaatacattatgaattaaatgaagagtgtcttttgattaaggctgatgatgttttaaaaaagaaaaatcttcgaattattaaggggtga

SEQ ID NO: 194311 - DNA, 1035 bp, Klebsiella oxytoca
atgatgacttcatttttcttaattactagaccgcttgattctcaaagttataattacattaatactgaaatattcggtgacgtagagataagaagcgcaaatcatgatcttgatgttgaaagacatctattaaagaaggctgaaggtagtccattcgctggaagtttaaacactagtgattatgacttttcaaatagaatgtctaccatcgtggaggcggaggatgaaattgaagccattcaattggctaatgataagttcgttactgtcttggatttgaaagccaatgaattatctcttgccaacattaatttatctaaagtcggatttgttaggaacttgtctacaggcgctataaaagcatttttaattcgtggcttatttaaatcagcagttttcgttagaaacctttctgatattcaacgttggagcacaattaatttaatgctggacaaagatggtaatactgaaaaaaaagaagaattgtccgaaaggtttataaaggctattcactggtcccaccatgctagtgatgaagaaaataaacagttaaaagtaatatttaactatttttgcttagaggctttattcaaagaaaatgagaatgacaatataactagcatggtccgatgctttttaggttttcctggcgggaaatgctatagagatgttgacaaaactattattgacaaactacaggagaacaatgattatttagccttggctaaagatattccaaaatatttagatgacattcgcaagttcaggaatgatagtgtacacgcaggatttagatcaatagacataagcaataaaaaacttaaactctatgacactttattaaatttggcaaaaagtcgttgtctcagtgctgtaaaagcatccattgttaataacaatattaaaagtctatcggaatttaaaaatgaagctggtattatttttaataaaacagtgctgatagatgatattttaggcactgttgttttctcactgaataatgactacaatcatgatattttcatcgttagttag

SEQ ID NO: 194312 - DNA, 477 bp, Klebsiella oxytoca
ttgtttttagaaataattggtggtttagcaagtgtcgcatccatctcgggcatcacagctaaagagttgattccatttatatctgatccggataagaaactgtttgagaaatatttcagttaccttgaaggtaaaaaggttttatttgcaccattcgattcagaggtttcccacgcagtaatcaaaagtttagaatcaatcaaagagaaaacagagcagctaagattagacataaaatccaagcaagcgcaacatttaatattagatttaatccacactctaagccaaaatttaatgttattatataagcatcaaaattcgacagatgaagtacttttttataaatctttgcaaaaagtacgagttaaatttgcaagagtattatctttactatgttttacgtatgaggtcgatttatcaaatcaacaaactgatttagcaagattggtgttggaacatgcttaccgagtaagataa

SEQ ID NO: 194313 - DNA, 786 bp, Klebsiella oxytoca
atgtccctgctacatcagattcaagagtctgtggttcaagatggatcaagcttgggtccaatactgctcaaactccgactcttggcagcaagattaggaagtaacgatttagaagaatgggtcaaacatgagacggaaggctatcctcaggatgcaatgcttcccgattacagaatagtaggagtaacttataaaggcacgttttctggcccttttagctctggtataaaaaatgcgcctatcccaccaatattaataaaaacgtttgcaaatgatagttggaataactactccgtcagagaaagcattgctgctgttgacgaacttgttaaagttagtgtaaatggtggttctttggggattaatgcgtcaaattcaatccttcttctacaagggaatatatataaaagttatgcttgtaatgatatctctggaaatatttcagtagtatcgctatcagaaattgcacaagccgttcgtaatagagttcttgaattaacaattgaatttgaaaaatcaattcccgcagcagcacacatcaattttggtactcaaggtatggataaagataatgcatcaaaagcacaacaaataacacaacaaataatctatggtaacgttggtaatgccatctctggtggcagcgaatcaactattaacgtaaatatacaatcacacgataaagaatcggtagcaaaccatctgaaaaattcaggtatttctgtagaagatgctcgtgatttcttactgattgtagcgtctgaaacaccatcaagttctgaataa

SEQ ID NO: 194314 - DNA, 321 bp, Klebsiella oxytoca
atgaaagtctctctgaaggtacaatcccgcatactgccgttatgtttactggccatgacgatccagatagcgggtcctgcagctgcagcggtaaggctcatcacggtatcacaggcccaggatgcggcgaaaatgacgcccccacgaagcgaacacatcacctcaggttccggagagaagcaaacacatacagcggagctgcgtacatcgctgcagaaggaggacagactcctcagggctgaagagcagggcataatcgaccagggtgccagaaccgctatccatatccgggaacaggaggtacagcgagacatccggtaa

SEQ ID NO: 194315 - DNA, 915 bp, Klebsiella oxytoca
atgagaacacactatgataacctcaaagtgtcgaaagatgctcctgtggaggtaatacaagctgcttaccggacgctggcaaagaaatatcacccggatataaacaaaaataatcccgaagctgtcaggataatgcaaataattaatgcatcatacgaagtattaattgaccctttgaaaagaaaagaacatgatcgctggattattaaagaaacctggagagaaaaggctgaagccacaatagcacgaaattcggaagcaaatgttaatgtccaggcatcagttaaaacaacagcagaaagaaaaaagaaatcattaatgacaatattaggtgtcgttttttaccctttgttttctatgctgaaaactgtttccggcctgtgtgtgatagggattattgcgtacgcaattattcataacatcaatgaaagagatgcttctttagataaaacagatactggaagcaactcatctgcattaaaaccagaacgtgtaaataataataacggaatttgtgattcatctgtgcaacaacgactatggcctactatcccaactgttttatctgaaaaagacaggcgaaatggtttgtcctcgcttaggttggataacactcaaaataacgaagggttacgagtccggttaaccctcgataatgcatacatcaaaactgattttgtacgtgaagtattcgttcccgcaggtagtcaaattactctggaacaagtcccatcaggaacatatcgggtaaaaacacaaagtgttaaaaatggatgtgtacaagtttctgaaccaatcaatatgattgaaagacaaacttcaacgggaacagagtacagtgataattctttaactttttatcccgtaataaatggtaatacacatttcttatatttgccggcttcacagttttaa

SEQ ID NO: 194316 - DNA, 159 bp, Klebsiella oxytoca
atgaagtctattagcaccattcttctgacagttgtgttactcgctgcgattgtattcggaggtgtttcactcaaggcccaaagcctgaaggtgagcaagttcgaagctcaaggtcttgagttaaactttcaaggtgtagttccgcgcactaagcaataa

SEQ ID NO: 194317 - DNA, 1062 bp, Klebsiella oxytoca
atgcaacgtctgaacgtccgaaacatccccgatgagatctacaggcagtttgagcaggaagccgcccgccaggagcgcagcaccgaggcgcatgcccgttttgtgatcgcacagtccgtgcagcgcgaagccgcgctcaccggcgccgatcgctaccgccgggagctgagcgcccggctaaggcagctattgcctgtggtcaacgaggcggcctcacgccccggtcccaactatcagccaccgatggacgcggcctccctggcagagcgcctcggagaggccaatccgctggctgtaatgaactggttctctggtgatgatgtgccggattttgagcaggccgaccgtctggccacctacctgggctgttctgcacgctggctgaaatttggcgagggacgcccgttcgcgttcggttcgccgcggcgtctcaacggtcacggcagcgcgtatgacgatgcgcgcgccctgctgacgccggacgccgccggtaatccggtctataagatcagcatcatccgcgatgactccccggaggggcatatcctcatcctgcgtgagttccgcaacagcctgcgggcggagattttctggaccaacctgaacctcagcgagcacgtcggcaacggtggttttcacgatctgtgtgattttttcgtcatgctggagcagctgtacattttctataccaataacgacctgttcgtgaagagttacgatattgcccggggacgtctgcagtacgagtttgaggaaaacaactgtcacccactgctgatcacaaaacgctgcggtcgggaaaatatctggtgggaggatatctggcacgaggaaatgctgggtcagcgtaatccggaacgcaacggcgggtatttctggccggacgatcgggagattatcaatcgtgtcatggcgcacctgaaggagaggaaacgtctgatgaataaggaagacctcgagatgctgacgcgttattctttcgggatggacgaacaacgttcccgttacaagctcgccgatcacgccggtacgacagaacaggagtctgacaatgaaagatga

SEQ ID NO: 194318 - DNA, 198 bp, Klebsiella oxytoca
atggccagcacagagaagatatttaccctctcctatgacgaactgcttgagcacaccaaaaaagtggtcaccgatttcaggcatctcagcacgccgccggacatcctggatatctggagcaacaatggagtcatcgtgctctggcattcacttgtcgaggcaatggggtgcccgagaaggactatctcagtgacttaa

SEQ ID NO: 194319 - DNA, 1053 bp, Klebsiella oxytoca
atggcaacgttgcccaaaaacgtgatgcaacacaggaaggtattgaaagaaaccggtttggcgtttgccaaatcgataccgcttgttggacctcatattgaggcagctgaaaaaatgttcacgttgttctcagagataaatgctacgacttgtcgtgatcgattcaaccgttacattatgggcattggtgaaatttgcgacgacgagatcgatatctcaagagaacacttttcggcgttagtcaaaaagctcgttcttgatgatgaagacaagaaaacagaatactacatccgattgacggtaagcctagcccgcagtagccttaacgacgatgagcggctacttttcattcatgtattaagtgaactaacctgctctgatatcgattatgcacgcaagctctatattgcgacgaatgctaccatcaagggttttaaaacatcagcatcagctcaagccagcatcacatcacaaaaaaaagcactgtccctgcgctccctcaataagctcatttcttcaggactggtttacgaggatagaacaggtgaaatcaaggccaatccgggctacaaactaacaagcgatttagagcgtcttttggggttcattttccataatgacgatctacaacctacggccttgtccattgaatcgaaagaagaatatgacgtcattattattgacagcgacaagatttaccgaggctcatacccaaacattctctatcgtcaacttcgggctgctggagttaaagtttgcatagagaaaagtgaagactgtattgccgacaagctagcaaagttcttcatttcagtacaacaaggtagcgggttgaacggtcttggtgagtggataaattacggcgagatttgcgtcctcaagcacctagataaaagcactaatcgcttttatgaaagtgagttcagagagacagtcgaccgcgaacatttttcacctagagacgacgattcgtcattcgatgcaagtaagttaaatactgctctaaataaggtggctgcgtttgttctgggacgactatctctttctatctaa

SEQ ID NO: 194320 - DNA, 783 bp, Klebsiella oxytoca
atgctattgtacaaatacataccagaaggaagtctaaaactattttttgatcatgacgcaatcagctttaaatttactccagttggtcatttcaatgatcctttcgaaacatatggggtatcgttggcatcagaggacgtagactcgttaatgcatttgaccttgcgttcaaaaataaactctgaacttgccagtctatgcttatccgaatcgccattagaagtcttaatgtggtctcactacgcacaacatcatagaggttacgtagtgggcatcgatacagatttagcaggttttaacgatgaatctctttgtttaataacagcgaatgagggaaatatcgactaccgagaggatagagacaaaacaagaatcattgtttcagataaagattttaaaaacaaagacataattaagaagattttattaagaaaaagtctgcattggaaatatgagaaagaagttagagtggtaatcgaaagtgaaaaactgctccccattgagaatgaagaagacaagttctatttatacaaagcaccagggataaatagcattaaagagatttatataggcattaataatgatgaatatgaatttaccgtaacagacaatcaaaatttaagaaatgccatattgaaaaataacataaaaatccaaaagtgcaattttaaaaaaggaacctgggacttggattcgatggactacgacatgaaggatattacaaacattgagttcaatgtccttgcgggagtaatatctgcttttgaaaaaaatgaagtataa

SEQ ID NO: 194321 - DNA, 750 bp, Klebsiella oxytoca
atggctcctacactagatagcgcatactcaaaagacctaagcgagtttcctcaccctggggagactcgcgttgctcgtttcggctttcttatcaacgaagcctctctctataaaatctccgaaatccaaatcatcgagccagaagacgacatttgcctttatgtctctatggagcgagtaggtgcgtatgaccagagccagctgagcgagtttatcctagatcgagccgatgaaggtgctactgaagaagaaatcatcaaagagttgctccgctcagggcttttggacgatagcaaaaattcgatcgcaggcagaatagctctgcgtgaatatagctttgttgaaaatgacactgaagttgaaagttatcaggtagctggagttgaaactgtcagagcgcttcgtcagcgaggactgtgccacagtacctatcttttccttcttcattggtacgagcatttggtttgcgatgacaaccaaaccattcccggcgctaagatctgggctggccctctaatgcgtaccggcgatgtccgtatttacaacgccaaaacagaaacgttcgaggacgtgctgggtgaatatggtatgggtaagaacactggttttttaccatggaaccgtggcctactgctcgaccccgaattgagctcatggttacccaataaagtgcagatcaatgtacaaaagttcattgttctaatcatctcgcgctcttcaagaacaccagtcggctggttcgaacagtaa

SEQ ID NO: 194322 - DNA, 393 bp, Klebsiella oxytoca
atgcacaacgcactgaacgcttctcgttctatacagacaatccgtgattgtacgagtgttattgagactcacgtgcttgctaagcacaagattgaagtccgtaaactcaacaatgacgcggttgagctcaaagacacacgcttcatcgttacctttaaggacgacgttgagatggcgcgtgccagcgtaaaaccgttagcggaagctatcttcctgaacggccgtgttcgttttgtcgtaaaacctgataagcagtacccggaactgttgcgcgatttaaaagaattttctgaggtcatcgaacattctattcgccgctttgtattaggacatggtagcattgacagtcatgtaaaggctgatagatctgctaccaaatggctcctacactag

SEQ ID NO: 194323 - DNA, 1437 bp, Klebsiella oxytoca
atggcaatgtacgaagttggcaccgttacaggtgcagcaaaccagacaaaggttactggtatttccaccaagtggtctgagactgcacttggtattcaagagggttcgattcttgtcatttatcgcaatggaagtgccgatctgtatgccatcaaatctgttaataatgacactcaactgactttgacgagaaacatcacaacagctttttctggtgcgaaatatggaattattacatcagaaacagccagtacatcgtcttttgcgaaccagctagccagcgcattcactctttggcgtaacgttgtccagggatggtctaccgcactgactggaagtggcgatattacgatgacagatcctctaacaggtgcatctgtgactgttcctgctatttcaggaatggcgaaagcgtctgatcttgcggctctcagcaactcgctgaaagacgcagcgaagactacagcggcaaacacatggacacaggcgcagacgtggaacgcagcatctacgtttaaaaataaccttactgttagcggtacttttacagtaaacgggaatctcaacggcaagcagcttgctggcggccacatagagttgacagaggcgaccccttatatcgactttcaccacggcaactcgacaacggactacacacatcgaattattaccgaagatggggcgttggctgtttatccgggtttgcgcatccgtggtggactcgggatttatggcgtcgccacacaatacggtgatctttacggtaatgcgtttataggtcggttaaataccgaccctacggcgaacgtcggcgacgttctccaggcaccgagatttacttcccggttcagctcgcgaggcgctgatactaacgttgacggcggacaggcggctatgtggttcgaagagcaggtagggacaaaccacagactaattctttctgttggtggattttcgcaaccaatacagtattggcaattcctagccgacggcaatatctacggaagccagcgcggtagtgtgcagtttctggggacgtctgacgctcgcctgaagcacgatatcacgcctactgatggacagcagtcagtagaccgcataaaggcgctggagctggtgacgttcgtctataacgacgacgaacagaaccgcgtccgccgggggatcatcgcgcagcaggccgaggaagtagacgagcaatacgtgaaacacgttaatatttcgtacctggatggtaataagcaggttaacagtgagcgccttcagctcgacaacaacgtgttaatgatggacacgctggcggcggtgaaggtactgattaagcgagttgaagcgctggagaataaaattaactcatcagaagggagcgacgccataaatacaaaccagaataccttcgatacaggcgtggccatgagtagtgagcaattaaattaa

SEQ ID NO: 194324 - DNA, 318 bp, Klebsiella oxytoca
atgttgaaaatcactgaagcctacaagacagctgttatcagcactgcgcacgttaccgcggaagactccgaacagttgccgattgcctgttttgacccaatcaccgatcgcggactgaactgggtacacggcacagaatatggttggattgttcgtgccggaatgcgtgaaaatagctgggcagatgaactgcgtacattcaacatctccgaagcggcgatcgccaatatcaagatgatactggatgccggttacgacgtggttcactttgatcgtgatgccgagctggttgatggaatgccagcatgggactggtaa

SEQ ID NO: 194325 - DNA, 729 bp, Klebsiella oxytoca
atgagcaatcgtagaattgaaaatccgataactagcacaaacaaacatggcgaaaccatccagtcgcacccggcattcggtcttgtcaaaaccagccgggtacatacaaccggcattcgtctattcgattcggagctgaaacaccaagaatacattgagatcggtgtatacgaagctgaaatgacgatggatcgcgagcatccgacccctagaagaagcacctataagcgcagaccgatcgtagaaattcgactcagccaggcccagtgggcagcaatggtcagcagcttcggcgttggcgatggggtgccttgcacaatttcttaccgcagttcaggtgatgcagaacgtctccctgatattgcagaacagaagagcattcgtgacaagttcgagtctcaaattcaggcaacggcatctaaagaaattgaacggatcatggacgaagttgctcgtttaggagagctggttaagaagggcagagctgggaagcgtgagctggaggatgtgtatgcatctttgcgcgcagctacggccaatttgccagctaatctttctttctccaccagactgatgcaggagtcgatggataaaatcgtatcgtcaggcaaggcggaaattgaggcatacgtatctggcgcagctatgagagctgggatgtccgacgtgatcgaagggccagacgacctacagattgacattaaaagtttgctggagaagggagaataa

SEQ ID NO: 194326 - DNA, 204 bp, Klebsiella oxytoca
atgattaaaggttatctgatggcggttctgactgtgttatcagtcgcttttgtttacggattgctggtcccttcgcttgtttcggctaaaagcgatgtggctctgttaatcggcctttttatggcttttgggttcccagttataggtctcatcgcaggacgccggtatatcaactcactcaaaaaatctcaggagaataagtaa

SEQ ID NO: 194327 - DNA, 924 bp, Klebsiella oxytoca
atgaaaatcccaaagacaagcactaagacacaaaaagaggcgatgatttatccaaaatccagcgcctacggacacgctggagagtatttgttcgcctactggatatcacgatactttggctggccttgtcgactattgagtgttgacatggggattgatgctcaggttgaaatgtttgctgatgacaccaaatcaacaggggcttttatttctgttcaggttaaaactacttcaagacagatggtagaaaatttaagtgttagagttagtcttgataaccttggctattggaaatctcgacatgagccggttgttattgtgcttataagtcttaataaaaccaatgttaacgatgagcctaaaatatactggcgacatttagatagcgaaagtcttgagaactattctgagaaggcacgaaaaaataaggattcaaaaactaatattatctttgaatcgcaaaagcaccttcttcgttcaaggcacaagcaggactggtcgaagctatggatgaccgagcttgacaaggaagtcgttaagatggcaacctgttcaaaacatgaactaatgaaagtcattaacgaaatagacgaagaaattgaagaatctggttttccagaagaggattttagattccctgttgcctgggagacatatcctcattccttgaataatttacttaatgactatgatgattttttaagacttaaaactgataataaattacttgtcatgcaataccccgtagttcagcaatatatggaactatgtgatcttcatttagatcgactgctagattatttctcaaatttggcatatcattttagaagtgattgttctatgtttaaagaagaaatggaaagctgtttccccgtcaatgtacaaattcaaaagatcataagaaataacatatataactattga

SEQ ID NO: 194328 - DNA, 411 bp, Klebsiella oxytoca
atgaaggtagaatggaatcgtgaaagttacactaaatttttagagccgaccttcagaattaaaccagacctgaaggttagtttgcttgaggattttaagaccttaaaacgaggcttcttcccagacatttttggcaagaacgaaccttacactgctccaaatgctattgtcacatcgcgtgtataccacctccatctcctgttcacaaagcaagagcgaaatagccaccgaaaaaggttcagttgcacgagcaatcgggctctcgtttacacgcaacacgccaaatacccggacgtatatagcttgctggctatattccccgacaatgcccataaattagctaatgacaacgacataatgaacgagatagccaaatacgcggcagtcttccagaaattaacaaacccgtag

SEQ ID NO: 194329 - DNA, 618 bp, Klebsiella oxytoca
atgcatttagaaaattgcttggaagatttgagagtcgttagcaacacccttgctactgtgacctctagtgtttcacgctttttaaatgataagcctaagtctaaagccaaaacttctgggcgaatcgttttagaggtgcgtgcgtacaaacggtttagaggtacgcttactcctacagcaaagtatacgggctttactgaacgggattatgttaagaccgaaggcatacccgtacaagagcatgacgtggcgtcagagctggttgattttgaaaaaaaattgactttgcttacggctaaacatgttcaaattgctcgcattctctgtgggttaaccgctgaacaaatcctggaacactacagtgaaagcgattacgagggcttgcagaatgtcgtcggtgttatccgtagcctggagtttgttgttaacaaattcaccaacgaagcggctcagcctcatccttatctgaaaaaactcagccatgtcattaccgagtatcgacttgccgtgtctgacgtactgatgattcttgatcagtgttttaacgaggttaatgttatcgaatctcagacaggcctcatcgatgaggatgtctttgccaacttctctcttcattaa

SEQ ID NO: 194330 - DNA, 1590 bp, Klebsiella oxytoca
atgacgataccagccaaaattgatacaactaatttactcactatactgggagtgatcgctgccgtatgggcaataattactcctaccagcagacttcgatttcggttttgtatggcttggtgggacctactaatcattgggctgattttcatactagctaattatttggtttttgcacctgcgttaagacagattggactgtattacagtttcgggccgtggatatggggattggatagttcgagtgcagtgtatctattgtttctcttggctgcctcatatcttttccttcggctaaaatcgccaacatttgttcgaggtaaaataacattgttccttgagctgattgagagtttacatcttacaaaaaaatatgacgagttagtattgttagttggacctcagttagatgaaatcatctcccttgctaagggtaaccccccccttattgtacaatggattgataaactatatggcggttccgaacggaatgcgttaatgaatggagaagaacccaaagaacaaaattttttaacgaaaggtctatactccctactaaatcctttgcgtgaaaagctattatcaaattatgaagccagtgaaaaagcccgcgaggttttgcttaatatactaacttctcctgatcttacaagatatctttcgcttgcatatcctcatttttgtttgaggcttattggcgctgatgaggtcgttcgttctgatttcattgatagattaatggattcactacttgactcacctggtagtcgtctttatgtagaacttaaaaataaccaaaatacctgtactggaggacgtcttgcgatacctgaaaccaaccgtttgcttcactttttctttgccgactcagtgtatgctagtaaaagtggaatatatagagctataggtgaggctgtatgctggcgtttggatgaagacagtaaattatcagaaatacttaacaagccccttggatcttaccttgagaaaaagagatttagttgtcctattaattctggcataacaatgttcgaagttatggtgcatcaaggtattcatcaaagattgcaagatcatctttggttacattattttaaacacttcgctgaaaaaatattgtatcaaatgaaagttcagagtgttgacgcaatcgcagaatatcaaacgccatatcactatcttctctgccgcctatttagtattgctatagattgggcggaacaaagttcatatataaaaacacataataatgttgcgggagataataggtatatatctaaagaagcgacaaaagtactaggctctatgttagaacatataattcctagtctaaaattgaagggatactcaaaagtatcaatattgcaaatggttgttacctgctacaccagacttgaagaaaggcagattaatgatgtcggggaggcattattgatacacgcaacaatgggggaatttaactctacaagcttaacatatcgtaggaaacttctatctatatttaaacgaatggacccttacttacagggaaatgcaaaaaagtttagagaaaaaatagaattggctgttcaaattaaacttcataggtaa

SEQ ID NO: 194331 - DNA, 681 bp, Klebsiella oxytoca
gtgactcggattctgacagtgactcggattctgacagtgactcggattccgacagcgactccgattctgacagtgattccgactccgacagtgattcggattccgacagcgactctgactccgacagtgactcagattctgacagtgactctgactccgacagtgactcagattctgacagtgactcggattccgacagcgattcggactctgacagtgattccgactccgacagcgactcggactctgacagtgattccgactccgacagcgactcggactccgacagcgactccgactccgacagtgattcggattccgacagcgactctgactccgacagtgattcggactcagacagcgactccgattccgacagcgactccgattccgacagcgactcggattctgacagcgactcggattctgacagcgactcagattctgacagtgactctgactcggattcagacagcgattcggattctgatagcgactccgacagcgactcggactccgacagcgattctgattcggacagcgattccgattctgacagtgattccgattctgactctgacagtgactcggactctgacagcgactcggattccgacagcgatatcgaggccatccccgatagcaacagcccggacgttgtcgcgctggaaggtaacctga

SEQ ID NO: 194332 - DNA, 360 bp, Klebsiella oxytoca
ttgtcgaagaacatcacgctaacaacgcatgatatcagcgaaccctggtgggggctcaggcgcagtgtctccccgtgttttggtgcccgtctggtccaggagggaaaccacctgcattacctggctgaccgtgcgaattttaacggacagttctgcgatgcggatttgcgccatcttgaccagggtttcccggtactgatgaaacagctggagttaatgctcaccagcggtgaactgaatcctcgttatcagcactgcgtcacgctgtatgcaaaaggtctgacctgcgaggccgatacgctcggttcgcacggctatgtttatatcgcgatttatcccattcccgtcaccacagaataa

SEQ ID NO: 194333 - DNA, 222 bp, Klebsiella oxytoca; identical to SEQ ID NO: 192451

SEQ ID NO: 194334 - DNA, 327 bp, Klebsiella oxytoca
atggggatcagcctccccgcgagaacggtaaatacctcactactgaaaccacgcctgtattcacagatagcgcgtcgtgcggttggggtaagaatcacgctgcttaatgcaagtcccactaaccagtggacgggcacaggtacccttcaggttacgttgaatgaccaggttgttgtcggttcgggtaacttcacgcagggcagtgaggaccctatccagttgttcacacagatggaggttaaggagggcagcaatacgattcaggtgaataccagcaataacgatctgttatatgcggcctgccagattgaattactgataccgtaa

SEQ ID NO: 194335 - DNA, 630 bp, Klebsiella oxytoca
atggacattaacgagtttcagaaagctgccggcgttagcctggcgctggccacacgctggcatccgcacatcgtggcggccatgaaagagtttggcatcagcaagcctgagcatcaggcgatgtttattgcccagtccgggcatgaaagcggcggtttcagccgcctggtagaaagctttaactacagcatttccggtcttgctggctttgttcgcgccggacgactgactcaggaccaggcaaacacgctcggccgccgccagggtgaaccgtcattgccgctggtgcgccagcgcgctatcgccaatctggtgtacagcaaacgcatggggaataacggacctggtgacggttataacttccgcgggcgcggacttatccagatcactggcctgacgaattaccgcgactgcggcaatgggttaaaggtcgatctggtaacgcaaccagagctgctggcgcaggacagttatgcagcgcgcagcgcggcgtggttcttcgcaacaaagggttgtctcaaatataccggcgacctggcgcgcgtgacccagattatcaacggcggccagaatggtattgacgatcgccgtgtgcggtatctgactgctaaaaaggcgcttgtgtcatga

SEQ ID NO: 194336 - DNA, 903 bp, Klebsiella oxytoca
gtgcaactcaacaacacgtttcagtctgtagctcttgagtggcacggtacaaaggtgagtcggtggtcagaaggctatgcctccgatatcatcgaagcattcaataaagatattttcccctatatcggccagcagccggtaaatgaaatcaaaccgctggttttgcttaatgttctgcgtcgaatggaaagccgtggcgcgacagagaaggccaagaaggttcgccagcgctgcagtgaagtctttcgttacgccacagttaccggtcgtgcggaatacaatcctgctgcagatctaaccagcgcgatgtcagggcatgaatcgaagcattaccccttcctgacggttgaagagttacccgacctccttaaagccctatccagctatactggaagcccgttagttgttcttgccgcccggctgctgatactcacgggggttcgtactggcgagctccgaggtgctttctggagtgaatttgatcttgagaaagcagtgtgggaaatccctgcagagcgtatgaagatgaaacggcctcatctggtgcccctttctacccaagcgctggaaatcgtacagcaactcaaagtgatgtctgggcaatatccactggtgtttcctggaaggaatgccccccgtaaaacgatgagcgaagcgagtataggatttggatatacggggaaggttactggacatggttttaggcacatgatgagtacgattttgcatgaagaagggttcaatacagcatggattgaaacccagcttgcgcatgttgataaaaatgcgattcgtggcacgtataaccatgcacagtatctggagggacggagagatatgatgcaatggtacgcggattacatcgataatattagtaaatttaaactaatcataggattataa

SEQ ID NO: 194337 - DNA, 918 bp, Klebsiella oxytoca
atggaagtttactcatcattttctaatgttataaactttaaacgttcaaatattcctatccaaggaatatataagagatatgctattttatttgataaaataatattcaataggtacggatgtccaataggagaccatgatttatttacaagtctacctgaatatatttcaacttttgtaagtgatgaagaagatttcaagcagaaactaaatctttctaaaaataaaaaattccaagatttatttatcgatttatgggatttatccgaaaaccctgaaaaattaaattatgaagccagtgaatatgtttcagaacatcaaagtgagatgatttctaaattctcatggggacgaaccctcatagacaaagagatgggaattcataaccatgatagggagtataaggcagcaagtatagtttggggagatattagctccgatctggggtttaattttctattaaaaaataaatataaaagccttcatattaactttgcccccgtagttgcatcagcggttaactcagcccaacatacatccaatatagaaaatcttttcacaactgatctaatcatcccaaactttgaagaactaacttgggatcaaattctggaattaagagaagataaatacattaaggcgtttaggaaaaaatatttctccattgagatgaatgacaaaaacatcgatttagaacttaatttcgatttagattcagccttatgggatttggctttacaaattaaacctaacattacaaaatccagcatggaagcagtattaagcaatcttccactccctaccgtcgtaaatccattcggaatttattatggggcgagagaaataataaaaaattataaaaataaaagaaaccactcttgggtatatttcattcaatcggcgaaaaacaaaacgtaa

SEQ ID NO: 194338 - DNA, 1071 bp, Klebsiella oxytoca
atgaacaatgagttaatcttggctgtagcaggttcaagaaaaacacaaggaatcattgatcattgtgcgagaatagatggtcaaaaaagagtattagttttaacatttactcaattcaaccaaaatgaaattcgcaatcggttatctcgttgtacaggaaacaactcatatattgaagtgcttgggtggtacacttttttactccgacattttgccaaaccgttcctcccctataaattccctggacaaaggattttgggatttaactttgatggaaggccatacatgatggcaaggggtatcaacagatttttagataaaaactaccatgcttacgcttgtgagctagctcgactaagtgcagaactgattactgcaagccaaggggcattaatttttagacttgagtctatttatgatgaaatacttattgatgaagttcaggatttgagcggctacgatttagacatattagatgctttgttagcaacggctatcaatttgaaaatggttggagacatgcggcaagctgttctatcaaccaatccaagaggaagtaagcataaaaaatatcaaaatactaatatgctttcttggtttttggaaagagaagagaaaggaataataaagataattgaacgttttacaacctggagatgccatcatttaatatctgattacgccgatactattttttcacctgaatggggttttcctaaaacaaaatctgaaaaccacactgttacatatcatgatggggtttttcttgtaatgaaggagcatgttgaagattacatcaaagcatttaaaccacaatgcttgagaaactcaaaaagcagcggtaaggtctataatttcgattttattaatttcaaagcatctaaaggttcaacttttgaacgaatcctaataattccaacctcaggaattgaggcctttattcaaaaaaatgagtatcttgaaagtacagccgccgcaacattttacgttgcagttacaagagctcagcaaagcgttgcaatcgttattgggaaaccaggtcaatcaaacttaccgatatggaaaccataa

SEQ ID NO: 194339 - DNA, 1605 bp, Klebsiella oxytoca
gtgataaaaaagattaaaatctcaggttacagaatctacaagcaattgattttagagccaaatccaaagcttaacctgatagttgggggaaatgaggttggaaaatcaaccctaatggaagcaatagccttagcgctaacaggcagaatcaacggaaaaggagctaatgatgaattaaatccgtattggtttaatacagagctagtcgctgattttgttgaaagaagacaaagaggtgaaaacattagtctacctgagattaaaattgagctcttttttgataatacgccagaattacaaaatctatgtggagctattaatagcgaccatccaacaaatgcatgccctggtgtattattccatgtactgcccaatagtgactataatgaggagatagagcaatggcttataaaccctagtaaaattttacctgtggaattctaccgaatagaatggcgatcttttgctgatgagaagttactcaatagacctaggcaattaacgactgccatcatagattccaaaactgttagatcttccacatcaatagattatcatttaaggcagataattaatgatcatctcgatccaatagaaagggcaaaaatatccttatcatacaggcaagttaaagcatctatggctggaggtgtacttagtgagatcaacgaaagaataagtacattaaatgcctcattacatgataaaatcatcattttggatatggatcaaagtagtcgaacctcttgggagggcgttgtatccccccatgtaaatgaggtccctttttctatgtctgggcaaggacaacaagctgccatcaaaatttctttgtctatgggacgtcacgctgaaaagacaaaatttgtgatgatagaagaaccagagaaccatctttcacataccagtttatcaacactactttctcgaatcgaaaagttatccagtactagtcagcaattgttcattacaacgcatagtactttcgttttaaatagactcgggctagattcattaattttaattggcaatgaatctgtaagcagaatcgatggtctatctccagctactgtagcttactttcagaaactacctggttacgacacactcagaatggtcctagcaaagaaagtggtattggtcgaaggcccatctgacgaaataattttcgaacgttttttcaaagacacataccaattacgacctatggaggtcggtgttgatgttataagcatgaggggactttcactatcaaaatgtttggagttatgtgcggctcttgataggcctgtagcctctctccgagataacgatggagtttctccagaggatcttgcgcttccagtccaagagtggctgaaaaaagaccgaagagagctatttattgggagtgtagttactgggacaactttagagccacaacttatccaccacaatggtgaaaaattacttcgcgaagtattaaacatagaagatagagctgaacttctaacatggatgagcagagaaaaaactgagggtgctttgagaatttcgacttcaaaaaaggcactcacaccacctaaatacatgagcgatgcgataaggtttatttatgaacaatga

SEQ ID NO: 194340 - DNA, 645 bp, Klebsiella oxytoca
atgtcaggaggacatataaaattcttacagaatatctcgccttacctgttttttaccggcaagggtggtgtaggaaaaacttctatttcctgcgcgacggctatccgccttgctgaacatggtaagcgggttttgctggtcagtaccgatccggcttccaatgtcggccaggtattcgatcaggctatcggtaataccattcgccctgtgacggcagttcctgggctttctgctctggagattgacccgcaggaagccgcccagcaataccgcgccagaatcgttgatcatatcaaaggtcttctgcctgatgacgttgttaacagtatcagcgagcagctttcaggagcctgtaccactgagattgcggcgtttgatgagttcaccggcttattgacagacgcttccctgctgacccgtttcgatcacatcatttatgatacagcgccgacgggccacacgattcacattctccagcttcccggtgcctggagttgcttaattgaaagcaatccagatggtgcttcctgtcttggcccaatggccgggctggaaaagcagcgtgagcagtatgctcatgcggtagcgttaatgctgaagcaggatccccgccctgaaagacggggatataagggggtccgctaa

SEQ ID NO: 194341 - DNA, 681 bp, Klebsiella oxytoca
atgtatcatccccggtcgcgcttgcgcttaccggggctacagctctgcgcggtctggtcgcccggaccaggcgcgtcaagcgccgcctccgggaaaatccccggtcgcgctcacgtttaccggggctacagctctgcacggtctggtcgcccggaccaggcgcgtcaagcgccgcctccgggaaaatccccggtcgcgctcacgtttaccggggctacagttctgcacggtctggtcgcccggaccaggcgcgtcaagcgccgcctccgggaaaatccccggtcgcgctcacgtttaccggggctacagctctgcacggtctggtcgcccggaccaggcgcgtcaagcgccgcctccgggaaaatccccggtcgcgctcacgtttaccggggctacagctctgcacggtctggtcgcccggaccaggcgcgtcaagcgccgcctccgggaaaatccccggtcgcgctcacgtttaccggggctacagttctgcgcggtctggtcgcccggacaggcgcgtcaagcgccgcctccggggaaatccccggtcgcgctcacgcttaccggggctacggctctgcgcggtctggtcgcccggacaggcgcgtcaagcgccgcctccggggaaatccccggtcgcgctcacgcttaccggggctacagttctgcgcggtctggtag

SEQ ID NO: 194342 - DNA, 558 bp, Klebsiella oxytoca
atggcatcacgtgggattaacaaagtcattctggtcggacatctgggacaggacccggacgtgcgttacatgcccaatgggggcgcggtggcaaacctgacgctggccacgtctgaaacatggcgtgacaaacagagcggagaactgcgcgaaaacaccgaatggcaccgtgttgtcatgttcggcaagctcgcggaagtggcgggcgaatacctgcgtaaaggcgcacagatctatatcgagggccagctgcgtacccgaaactggcaggacgatgccggaaccacacgctatgtcaccgaggtactggtcggccagaacggcaccatgcagatgctgggcggccgccgtgagggcagtccgtctgagaataccgcgccgcagcagcccgtgcagccgcagagtcctgccgccccggcacaacctgctgaagccccggctaaatcccgtaaagcgaagggcggtactaaaggccgtcagagtgccgctccggcttcgcaaccacctcagccgctcccggaggattacctgccaatggatgacgacgcgcccttttaa

SEQ ID NO: 194343 - DNA, 390 bp, Klebsiella oxytoca
atgctgaaaaatatcattactgttttgacactggccatcccggttctgttgtccggatgccagcaggcgtcttccggatatgagccgtctgagcctgaaataaaagccgcaatggccgcagcgctacaacagcaaaacaggaaactcagggatgcagcggcaaaagagaatgcctccggaaaggagccggaatatatttcttccggaatgttgtctgttcatgagcccgcactctattccctggaaaagcagcactgcaggtctgataaaacagataccgtcttcacatgtgatgtgattgtggatatggatgccggtttcggccgggacagacagaagatcgccctgattctgatgaataaaacaaacggctggactgtcgttatctga

SEQ ID NO: 194344 - DNA, 327 bp, Klebsiella oxytoca
atgcgtatgtctgtcatgtttggcgctgttgcgctgttaaccggtatcaatcttttttatattccgttccagcctgttcacgccttatggggggccgggctgtctgtcgcctttatcctgctgaatattctcgccgataagatgcgcctctggagtggcgtgccgtggacgatagctgccggtgtcatcatcgcagcgatgctccagggccaggagccgggtgaaggattaagagtgctggtcaccgttttcgcctttatggcttctgtctggtacgccgttactcagttccggaaagaaaagcgtgatgacctccgcagtagttaa

SEQ ID NO: 194345 - DNA, 255 bp, Klebsiella oxytoca
atgtcaaagtggaatatcgcgtcattctcaaaagaagagcaggacaaggtctccgtcgataaagcggccgctgccgttgcctggcaggaacggatgaacaagcctgttgtccatgagctcgttgagcgggaacagcctgaacatcttcgcgaatatttccgtgaacggctcagagttcatcgtatgaacagtcagcagctgccccgcgcaaatgctcccgaatataataaaccgggagatgaccaggagaagtga

SEQ ID NO: 194346 - DNA, 507 bp, Klebsiella oxytoca
atgaattcatcaattacagttccggcggtctacgtgagcacgtatcacaaatacaactgcggcagcatttttggcaaatggtttgatttaaccgatttcgacgatgaggacgcattttatgacgcctgccggacgctgcacgccggagaggatgaccccgaactgatgtttcaggacatcgagggcatcccgtcacagttttcctcggagtcgtccttaaactgggcgtttatcgaggcattccggcaggcacaggacgacgggcgtgccgctgcgtttgtggcctgggcggaatataccggcgagtgcgattatgacgcttttgatgacgcgtatcacggcgaagcggaaagcgaggaagattttgcttatggctttgtggaggacaacggcctgttaaacgaggtgcctgaatcactgcgcgtgtatttcgattatgaggcgtatgcgtgcgatttattcagcagcgggtatgtgttccatgacggctatgttttcagaaactga

SEQ ID NO: 194347 - DNA, 429 bp, Klebsiella oxytoca
atgcagtatgtgaaaacgcgccctgtcctgaatgttgaagagtccgacagtctttctttcctgccgtacatgtttggcaatgacttcatgctcgcagagttacaggtctatgccctggctaaaaaaatgatgcccgagtatgaaggcggtttctggcacttcatccgtctgccggaaggcggcggttacatgatgccggactgtggccgcgttcatctggtcagcactgaaaactggttcgatcgtaccgtcagcgcagatgctgcgggcatcatcctgaccagcctggcggttaatcgccgtctggcggcccaccatgacagcaacaacccggccctgactcacctctatatgctgcgtgatgcccagctctggaatcacacaacctttcacccggaatgcaacgccatttacgccgcgctggactga

SEQ ID NO: 194348 - DNA, 768 bp, Klebsiella oxytoca
atgatgaaaaatgaaacccttaacgctcttattctgcgtcacggcgaccggatgctgcgccaggctggctggcccgacgctattgatatggcgcccgtcgcgcccgaaaccatacccggctggctcgccgcctgcggcacgctgaatgggcaggaaattctggcactgacagattttctttgccagccgctgacttatggccgggcggagctgctgaaggccagcgcccggcaactggcggggacacctgcgcggttacatctgtatccggtccagggcttcccgcatccggaacagctgactgaatgccagaaaatccatctgccgtatgctcaggaatggctcacggtaacggaatgtaccgatttgctggcctttctgaaaacctccctcgatcagatagcggaaatcgtgcgtcgggattcgcgccgcctcgccgtagctcttaaaccgtccgcaattccgcggctgatggagcggcgtatcggtgactggcggctgcttgccgacgagtatgaccatgacaactggctggacgaagacgagaccgggaggctggatcaggtccttgacgccatcctggtacgcgatgcgcgtttctgcccggtcctgctgacgctggtcaacgaacgggaggaaaacatcgaaggcgccggtgttatcactgacatgctccgttttccgggcgatccggttcgtcgctggcttgaccgccgtgtattacgggacgtggtgagagaggcccgtgctgtcagaactcaggcgtga

SEQ ID NO: 194349 - DNA, 420 bp, Klebsiella oxytoca
atgtacggaacctgtgaaaccctctgccggttgttgcgtgagcagtatcccgcagaaaccccgctgaacctgattatctggtccccggcggatatcgaagcgctggccgacggaatggaatatgccgtttcggaacaggacacaagggcggtactggcgcatatggacgccataccggaggaacaacggcttgagtcgggcgtgtctgccagtgcggtgatgaagctgatagacgaggtgaaagcggccgcgacggaagtgagggtgccggctgatctgctcgaaaccctgctggttaccgccgaacaggcattgtggcacagggaatgggccgcccgggatagcaatcacccggtgccggaaagtgtgaggcgccgcctggctgatacggcgaaagtgcgcgcattaataaaaagctga

SEQ ID NO: 194350 - DNA, 678 bp, Klebsiella oxytoca
atgtcccgttttatcctgggtaactgcatcgatattatggccggttttcccgatcgcgccgtcgatttcattctgactgatcccccgtaccttgtcggttttcgtgaccgttccgggcgcacgctggctggcgacaaaaccgacgaatggctccagcctgcctgcaacgagatgtatcgcgtactgaaaaaagacgcgctgatggttagtttctatggctggaaccgtgtcgatcgcttcatggcggcctggaaaaatgccggattcagcgtcgttggccacctggtatttaccaaaacctactcgtctaaatctgcctatgtgggctaccgccacgaatgcgcctatctcctggcaaaaggccgtccggccctgccacgggagccgctgccggacgtgctcggctggaaatacagcggcaaccgccatcacccgactgaaaaacctgttaccagcctgcaaccgctgatcgagagcttcacacatccgaacgccattgttctcgatccgtttgccggttccggttccacctgcgtggcggcggttcagtcagggcgccgctacatcgggattgaactgatggagcagtaccacaaagccgggattgcccgcctgtcagccgtacagcgtgccatgcagcgcccggccgctaacgacgagttcccggaggccgcgtaa

SEQ ID NO: 194351 - DNA, 231 bp, Klebsiella oxytoca
atgtcaccaggttttagaactgttctcagatatgccggtgtaccggtggacggcagtgaacccgtacgtcgtaaatttggtagccggctgataggtattgtgacggtttgtctcctcccgctacttgttttcgatgtcccgctctgggttttcgtcatgtctcagattatctggggaggcggggtctatatcgccctgtccgttgtcggcgacaagtcccggcgccagtag

SEQ ID NO: 194352 - DNA, 978 bp, Klebsiella oxytoca
atgaaacgagctccgatcattccgaaacatacagcaaattcccagactgtagaaatcgcttcatcgcctgcccctgctccagctgctccaatggttgattcattaattgcgcgtgtaggagctatggctcgtggaaattctatctccctgcctgtatgcggtcgggaagttaaattcacgctggaagtgattcctggaagctcagtagaaaatacctccagggtctggtcaggcaacgagcgagatcaggaactcctcacagaagatgcacttgatgacctgatcccctctttcttgttggctggccagcagacacctgcttttggccgccgtatttctgacatcatagaaattgcggacgggagtcgacgtcgcaaagcagccattctcacatcaagcgattatcgtgttcttgtcggtgaccttgatgatgaacaaatggctgcgttatcccggctgggaaacgattatcgtccaacgagtgcttatgaaagaggccatcgttacgcaaaacgtctggagaatgaattcgcgggtaacgtttcagctcttgctgatgcggaacatatttcacgtaaaatcattagtcgttgcatcaacactgccagattaccaaaatctgtagttgccctcttttctcatcccggtgaactctccgcacgggctggtgaatctcttttaaaagcctttactgataaagaagaacagttaaaaaatcgggcggaggaactgcacgagcaaaagaaagcaggtgtaatttttgaagctgatgaggtcattacattgttgatggcggttctgaaagaaaattctttaagaagagctaatctcagttcaaggcatcagttcgcgccaggcgcatctgctttgtacaaaggagataaagttatactaaatctggacagaacacgattgcctgctgagtgtattcagaaaattgaagcaatacttaaggagctggaagctaaggtatcttga

SEQ ID NO: 194353 - DNA, 129 bp, Klebsiella oxytoca
atgcaaagcaacattaaaagtgcaaagctaagcaaaacatgcaaagttgctcacaaagcaaacaatgcagtggcaaaatttaagcagatgaatcaggaacagcatactgcagtcaataaaaatgactaa

SEQ ID NO: 194354 - DNA, 669 bp, Klebsiella oxytoca
atgtccctgatacacgatattaccacccctgtgatttccctgatttctgtctggctcggcgcccggttcgccctgaggaatgagatccgcaaaaaggaactcgatgccagactctcccggcttgaggcgttatctggagactgcataactgcactgttgaataccagtaactatctgggttttattgcctgcacggtaaacaatggtcttgccgtattcagggcgagtaagtctgatccccaacatattccgtatgaaacatattgtctgtggtatgaagaggcggaacgaagttcgtggaagctggatatgagcatgctacaaaaatgtcagcatgcgctacgatttcatcgtcctgttgatgccctttactggaaggagagggtggacggttcggttgatactgtctgcgaatttttccacgtatcccgtgacagcgcgaaaaatccgttccggaataagggggccatcagcattactgaagttgaggcttttattgctgatatgtacaggcgctgcgaaatgctcagggcatatcggaaccagctggcagatcaactctcgtatgaatacctgcaaatgaactcttatgtccccccaaacttctggcgttcactcttactctgtcgtgtacgccttatggcttatttccggttgccatcaggataa

SEQ ID NO: 194355 - DNA, 270 bp, Klebsiella oxytoca
atgggaatgttcgatacagtcagattccggtaccggatgccggacggagtaaccgggacggactttcagaccgacgacctggcctgcgagtgtgaattttacgagatctcaccagagggccgtctgttacgctgggagaaaaacggagaactgaaagacacggagtacaacgggatgttaaccctgagcgccagtgacggctatcacctgtattttgagcaggggacactggcgtggatcgaggtgtactccctgggcgataagcgctag

SEQ ID NO: 194356 - DNA, 2115 bp, Klebsiella oxytoca
atgaaaatactgagacagctgtggaaccagaaagggcttgatgcggcagttgaagatgtacctgaggatcgatacggtttcggtaatatcgcagaaaatatatcccggtccatcctttctcttcctcagaaggcttcaaatgttgtcggaatagaaggagcatggggatcgggtaaaacaagcctcctgaatctgatcctgaaaaaccttgccctgaacaaagatgggcacacgcatgtactgcatatttccccctggctgagtggcggcagtccggttgaagcgctctttcttcctgttgccacggttatccagcaggaaatggaaaaacgcgatcccccgaagggcttcaaaaagctctggcataaatatctgttgtcaccggaagctcagaaagtgattgagtatgctcaggatacttcatcgcgcgttcttccgctggttcagtatatcgggcagttttccagcatcgttaactggatcgcaggcgggataaaagtatttaccgagagtcgtctcgcagttgatcaaaaaacgacaacaaaactgcgggctgtagccgatctaccccgctttacccatattctctgttatgacaggcagattatcactcatgccgttgagcatgcgctgaatatagaagatggcagccgttacctgcagaaaatcattcagctcagttttaaattaccccggcctgaagcctttgatttacgcaatgaatttcgcctgcgggctgaggcgctgtatcagcaaattaataatcaaccaccagactctggaatgtcaggggatctcgccgctgtgacggatacgtatggtgccgcactttcgacgccacgggagatccatcaggcgattaattccctgatttttctgtatccggggatgcgggattttgtgtatttccctgatttgtgcctgctccagcttatccgggtgacaaacccggccctgtatgactggacagagcattacctgacagagcggtccgtgattgaaaccggccagggcatgctttctgacggagaaaaggctgatttccgtgaggggcttatcagatgtatgaagatgttgagggcatccaatgcagactcgtttctgacactcgcagactggatccctggtattagcggacataatgaagaatatctgaatctttttgagcctgtcagtgaggattatcgccacatccatacaagcaacaagcgactcagcagcctgacgcactggcgatattattttgccttttcctcaccccagaatgttcttcctccggatttcttcaaccagctttttatgctggcaggcgtaccggaaaagcagcagcagctctctgaagatctcctctcaaaaattaacagcgtgggcagtctgtccggaacctggttcgaacatatactgagcagactgactccgggcctgataagagaacgcaatttcgaagagtgtgcagggttggttcagtttttcttcgatcacactgatgaggtcagcactcgcttccggatccgtaacatatggttttccctgcgtgaaacgggcattaatcaggttgtacggcatctgcttaagcatatacaggatattgatgagaccagaacagtagcgcggatggaaacgctgatcgttacgggcgcttcgccgttctggatagccgattttatgcgggatctcatctgggaacacggtcttgctcaaaatgcagtaccttcgccttcagacgctcttttcagtcgcgatattacggaacggttgcgtgacagatttgctgaacgcatgagtcagccagaacttaagcaacaacttctcctgcgccagtcaatcctcgggtatctctacgcctggagagacatgagttcaggtgaaaccgtaaagcaatgggtcagagaagtaactgccactgatgaaggccttgttaagctgttgatacgattacagaccagtgtcttcagctctcacagaggggcatatcgccggattgcgcgtgaccaggtcagtccgttctttgataactggccagcagtcgaagagaagctgaaggttatgctgtccggcaacgagctgacgccggagcaggaggaactcaaaagtgcactgggaaatgacgactga

SEQ ID NO: 194357 - DNA, 900 bp, Klebsiella oxytoca
atggcgattgatatctttcagtcacttaaaaattgcgtttttgaccttcagcgcgctgacgttcagaactaccagcaacctctaaaacaactggcccggctattgaaatcggagagattggaggcagtaaatgcacgcctgacccacaatattgagctcgatgattttctggccaagagtgaagaaactgattccagaatggctggttccgccgtgctgcagtggccggatgacccagttgagattttgggcctgaaacttgttttactcgacaaaatggcaatcgataatgattttgcttttaatttttgccacacgtttttccacgaccgaaggattattgaatcaatccgtaaatttacatcatcattagttgttccgtttgtccgtgattaccagttgtatgtggaaaatcaactagatcccgagcctgcagtatttcgtccggtctcccgaaaaatatttattgtacatggccacgataatgatgcccttcagtctgtcgcccgtttcatatcacggatagggttggaggaaatcattctctctgaacgtcctgacggctcaaggacggttatcgagaaatttgaagcggagtcaggagatgtcagctttgccattgtgctgatgacccccgacgacagcggaaatgccctggcatctgaaagcacacgtctgcgtgcacgccagaacgtcctgtatgagctaggatatttcgcggggaagcttgggcgcgggaaagtactggtacttaggaagggggatatcgaaatcccttccgatcttgccggggttctctataccgagcttgatgagcatggtggatggaaacgcaagctgctgagtgagttggtgtatgccggtgttccttttgacaaggaaaaagcgttaagcgcctga

SEQ ID NO: 194358 - DNA, 291 bp, Klebsiella oxytoca
atgggcgtcaaaattacaggcatagacaaattgcagaagcagctaaaagaggttgaaaaagcaacggaagccttaaacggtagttatgatgttcgtttcgatgctaacgatcctgtcagcattgagaacgcgattcaggaagcatactgtttggtggacaagcgagcttctgactatgctactaaccctatggttagcccattaatcgaacacatgaaagaaagtttgcgccaacaaattctggacagtgcagaacaacaaagagaggagagcggacaggatggcgattga

SEQ ID NO: 194359 - DNA, 648 bp, Klebsiella oxytoca
atgccatttgagtggaaagatgtgatctcgcccgtcgcaaccgtcaccgcggtctggctcggggccagactcgcattaaataatgatatccgtaaaaaagcacttgagctggaaacagagagaatggagcggctggcagtggagtgccacagctgtctgagcaatctgaatatctactgcatgaatctggcgaagctgcttcatgacctgtcgggaggatatgaaaaggcgatcatgctggcagacgttaccgacggtcttacaaagtcagccgccgcgggaacccggattgattttcaagcggtgacggcatttcagaacacccttgaatttcaccggcctgccgattttgaggaatggaaagagaccatactcaagctggtactgcatctcgaacaggttattgccgccccgtcgctggccaccgtggactgtacggtggaactcagccgtcagcggtgggaacccggacagacagaaaaatacaatcaaaaactggcagagctggcaagcccgctcccgcgctaccggcagcagctgattgcgcacatcgccggagattaccgcgcgttgctgcacccggcatcaccgaatatccgggtgatgacacgcagggcctgtcgtgcgatgcgggagtttgtcagataa

SEQ ID NO: 194360 - DNA, 675 bp, Klebsiella oxytoca
atgacaaccctgaacacgaccaaaccggcccgtgctccccggctcaaccctgagcacgttgaaaaagcgttgatccagtcgcgcatcgacaacgtcggcaaaaaatttgtcgccgcactcgatgccgtggatgaaaataaattactgtccctgttaaccctgtccgatgatgagttctggtctgaaattaaaatcatggcgctcactcagtcgctgataaataacatcagcgaggaaaaagaggagcaggaagattatgccgaagccaggctggcgtttttaaaaagcctggaaaaatacggcggcgtgcataaatccacggccgtcaaaaatatcctgggcgtgtcggtaccgaccgtgcacaaatacagtaagcagaataaactgattgttcttgactggggcgctgaaaaactctatccggtatttcagttctcggttgatgagaaaaatagtgataatggcatgctcaaaggagtgccggaattattggcatgtatcacccataacgtgagcaatctgcgtaaatgcaacttttttacccgccaggttgaaatgccaggaagcggtgagaaaatcagcgcgctcgatattttacgccgtggcgctacggatgaagaaatggcacacctgcgtattctggccgaaaacttcggcacccagaacgccgtgtaa

SEQ ID NO: 194361 - DNA, 630 bp, Klebsiella oxytoca
atgatggctcaattcgagggcgacctacatgattgcctgaataaaattatgcacctggaagaccagggcgagattcaggtaacgaagattattcctgacagctcgggttatttcaaagtgcaggatcaataccatgacgggaacggcgtgtacttcaatcccagaagtaacaaccgcttttcattgtccgatcaaactaaatggccaatgtatttggctgactcgcctcatacggcgtgtagtgaattcttccaggatgaagagttcattgatcgttcggactttgacaccaactgcatggccgaaatcacggcggaacggtcattgaaggtgttcgatctgacccggcttgcccctcatctgggggtacctgtcggtgatttgatggcaccaaaagcgacctaccctttgacacaggagctggcgaaagagatggcacaacatgcagacggtgtagagtatttgtccagacacacgggtaaaccgtgcctggcgatttggtctgacaaggaagacggggatggcatcctgtcgacggcgtcagtgacaccgctgagtcagtatgagcatcggggcagaaccgccaggcagatcctgaaagccgattgcaatatacggatagccggataa

SEQ ID NO: 194362 - DNA, 1326 bp, Klebsiella oxytoca
atgacagcgacaataccggacaaatttatcgcggcatttgaccgcgtatggaacctgccgtcgggcatgaacatcaacaccatacttaaatcacccgaatttctgcttcttcggaacacggcagataagctttgctatgccaaaatcaaaggaaacttctttgatccctttctgcttcgtggactccaaaaacttggggttccctgcttgtttcctaccggctccccgctcgccgccacggatagatctgagacggccgcacgctgttacgaggcattaatgaagcgccacgtgcatcatatctatctctgcccgctcgattgcgctggctatatatcgccaattaagacggccaacgcaagtatcaggcgcttcagtagaagtgagctggatgagctgctgaattctttgccgcagcaaagacagcctgggtacgcccctgcagatgctgcggggttatcgcagtttttgtggttggtggtcagtcatgatgaggcgcagtgtgcagaatttgctgaacgctactggttttggaatgccaataaggaaattccaggaacggtctatccctacaaataccattatccggaagccgtggaaggtgccatttttttattgctgttggccatttgggaagaatggcaacttaacgaagaatatcactggcgacccttctatatcccctgggtgcatacgctctcagacgatattttttggcaacaaccacccatcccgtcagccgcctcactcacctgggtaccttatacatatcaggatgaaaatacggactgccaggagtatatggctccctacgaatacaattacagcctgaccagtgaccaactgatgccctttgttgacactcccgtcttcgagcgccttgaaacggccataaccaacggcctcatcaatgtggcggctcgacatcaatttgtgaaagcgtttcggtccgatggcgttgacgagttcctggctcatattgtcgtgattgatgcctgtgttggcgaaaaatcagtgaatagggcactggaaaaagagctcaaaaagattggtggtactggtagattaaaactcaggttggcggggttacttaatgatgcatctgtcaaagagaagttgcacgtcctgtataaagcacgtagtaactatgtacacggcaatacgcttgagaaaattccaggtgaacacattctgcaagcacgtaccctggccagaaaaacactgaacgccattattaccgaagcaggtcaatcgccgggattaaaacgggatgagtttcttgacgatgttctgcgaagaggatggaagctagatcaaggcgggtag

SEQ ID NO: 194363 - DNA, 741 bp, Klebsiella oxytoca
atgaacaacgtcattcccctgcagaattcaccagaacgcgtctcgcttctgccgatcgccccgggagttgattttgcgaccgcggtcgcactccgccggatggccacgtcgaccggcgccacaccggcctacctgctggcacctgaagtgagcgcccttctcttttatatgcccgatcagcggcaccacatgctttttgcgacaatgtggaataccggcatccgtatcggcgaggcccggaccctgacccctgagtcgtttgacctggatggtctgcgaccgtttgtacgtgtgttatcggaaaaagtacgcgcacgccgcgggcgtccgccaaaagatgaggtacgactggtgccactgactgatctaaattttgtacggcagatggagagctggatggtgaccacccgccctcgccggcgtgaacccttatgggctgtaaccgatgagacaatgcggaactggcttaaacagacggtaaagcgcgcagaagctgacggggttcatttttcaattccggtgacacctcacacgttccgccacagctacattatgcatatgctctatcatcggcagccgaggaaagtcatccaggccctggtcggtcataaggatccacgctcgatggaagtgtatacgcgggtatttgcgctggacatggctgccacgctagaggtgccgtttaccggtgacggacgtgacgccgcagagattttacgggcactgccacctctgaaatga

SEQ ID NO: 194364 - DNA, 465 bp, Klebsiella oxytoca
atgaaagtcactgaaacccgtctggccaccctgatcgataatctgaacaccctgatttgtgaagacgatctgctcacccacccggagcgtgaaaccctggtgcaggccgttgccgccatcggtgccatgaaagcacgcgtcagcatgaaaaaaagcgaagcgccggcagccgctaaacctgaaaagacagagagaaaggagattatccccgatccacgctttcctaatgcccgtcaagccttggtggcagaagaggaaacattattactgaaaaggttcccgtatcttaacatgaattgctttaaagtaagatcattccagcagagaaatcactggagccttaattatatccaatacccggatccgggcatgtacccttcgaacataaaacggcggccacctattattattgttttagacatcgaagtgtacattttctgctccgtgtggatgaaagatcgataa

SEQ ID NO: 194365 - DNA, 246 bp, Klebsiella oxytoca
atggagggcaaatcggccacaacgcactgggaagatgtcacagatttgcgtgcaatgttcccctggcttttcgtaaaagaaggggggcggtgggttgatgaggacgaaatcgtgacttcggtaggaatttcagctggtatcgatatgagtttgcatttagtcgagtggcttaataacagggaactggtactattaaccgcgaaacaacttgagtttgacaagactgagaaccaaccgtcagtttag

SEQ ID NO: 194366 - DNA, 282 bp, Klebsiella oxytoca
atgtcagctaaagatgactttacaaagaaagtacaacaaggcagcattaatatggcaaatttggagaataaagttaaaagcgatattcaaaatttccgtgcgcctctttatgagttggttaaggaaatcgaagaatggctacacaacacaggtgtaaagactgatgtcaccgaagccacttttacggatgaaagtatagatttagtcccggaagtgaaacatctcagtaattataaagcgagctttgtcacaattaagaatggtatgaaatccgcttcgtaa

SEQ ID NO: 194367 - DNA, 420 bp, Klebsiella oxytoca
ttgaagtggaacacggccgggcaggttacgcgcctggcgggcgatcccctgcaggccgccgcctggttgcaggcctgccacgatgtggggattgcggcccgggtgcagatcaatgagagtgcaacgccggaggagggcacgcggaacgttaccgcgccggcggaccagaccggcgcctggtaccgccagctggacgccgcgctgcaggcggaggggataaacggcctgaatgaggagatcaggcaggccgcgctggctgacctgctggcacgcacagggtttatcgccggccaggtccaggagctgcagtggcaccgcatccgctggccacaaatgagtcaggaagaagctgaccggcgcgaactgaacagcctgctggacgaacaggagcagtgccagctgtactgcaaccgcgaatag

SEQ ID NO: 194368 - DNA, 363 bp, Klebsiella oxytoca
atggacgtgcgaaagaccgtggagcagctggcagcatccgatattcgcgttcactgcctcgcgctgggtggcgtggatctcaccatcgcggccggcaagatgaccatgcaggtcatttcggcggtggctgagtttgaaaaggacctgctgattgaacgcacgcattctggcctagcaaggactagggctgctgggaaacgatttggtcggccacctgcgctgaaccagaaactgcggcaggcagcgcttgaacgcctgaaagcaggtgccagcatcagcgccattgcccgcgagtttgggacctcacgacaaaccatcatgcgcctgcgtggcgatgcagtcagcccggagttaccagattaa

SEQ ID NO: 194369 - DNA, 309 bp, Klebsiella oxytoca
atgatggacgagaaaatcctctttgcccatatcctcaacctgtccgcaccgtggcaggtacaatccctttttcttaatgaacaatctggttcagtgacggtcattgtcggcattgcggaacacacacacctgacctgtccaacctgcggtaagtcttgctccatacatgatcaccgacatcgtaaatggcgtcaccttgatacctgccagttcgccaccctggtggaagccgatgtcccccgaatcatgtgcccggaccatggttgtcagaccctgcctgttccgtgggcggaaccgggaagccgctaa

SEQ ID NO: 194370 - DNA, 1287 bp, Klebsiella oxytoca
atgaaattagatggaaaaatacataaagaggttatgtatttatatattctgcagataagtaatatgcttttgccttttttatctttacccattttaactaattcgcttggtgtcgagttatttgggaaattaagtttttcgcaggcggtagcgctgattgctatattcatagttgattttggatttaatttttcaggagcaaagagaattagtgatagttgtgatagtaatgaaggtctaagcgcaatttattcgaatgtgcaacttattaaaacattcgttttttttatagtaatgtttttttctatcataatttcattcctttattcagagcctattgataaaactttattgctattaggatgtcttacatcatcaagctcaatttttctttctggttggctttttcaagggctagcgaagaattcagtcattgcatttgtttcactaattacaagattggtctgtacggctattatttatatttgcgtaagcggtaagcaagatttttatattgcttgtttattacagctaatgccacctgttatatcaggtgttattattcagttttttatttgtttttttactccaataagattgcgcattgtttatataaaaaaagacaatataaaagtcttattcaaggacagctttgataatttctctgcttcatttataacgctagggtttacatatttcaatccattgctggtgaaattcttttttggcgactcagctttggggatttatagtcttgctgataaattagttaacgtactgagacagttttattctccaattgtacaggcattttttagtcagatttgtggtttcttgcaatcaaaaaatatagttaagtaccaacagacgattaagaaagtattctgtttttattgtttcattagtatttctgctttattgtttaacgaatttcttgggttttttttcttagaaaatttttttgcaagagggttttcttcagatctgatagccaaagtgcatttgttaataaggctaatgatcatcactcagtttatcatatcgttgtctattattgccgttaacttgactataattcctcttgggttaagttatttccttaaaaaagggtatcttctagggcttgttctatatgctgttatgctttatccaatgctaaaatatttcggattggttggtattaacttggctttgataatagttgaactggctttacttattatttttgtgagttttataagaagaaaattattagtccatgtagggtcgaatgatgaaaagaaataa

SEQ ID NO: 194371 - DNA, 1005 bp, Klebsiella oxytoca
atgaaaagaaataaaatagcttttgctatgttttttttaccttttttttctaacgccgcgaatgaggttcatgatactaataattcatcttttctattaggcgtgggaatacatccaaacgaatggaatttccctgaagataagatgttttcattgttaaatatataccatttcaattcttttagaaccgattatcattggtctaatattgaaagaaaaaaaggtatatatacagttccccaatctaatgatgaatcaacaataaattacctaggggataaaaaaatcaaaccactaattattttaggatattcaaatcccatttatagtggaacaaaaccgattattccggagacagtaagcggtttttgtaattttgccgcatggacagttaaacatttttataataagcaacctattttcgaaatttggaatgaatggtcgattgatccaaataaccaaaagcaagctaaaagctttacatccgcgcttcagtatgttgaattagttaaatcatgttctgaacgtatgaaagcaatcgatccaaatgtaaagataatagctggctcttttaatccgcataaagattctgatcttaaatggggcatgtacctgataaaactaggtataatgaattacattgatggattatcattacattcctataatttctcgaataataaattcctagatgcagaaagggatgtttctgatattgttaaacttaatgctaacataaaaaatgccttgggtacttctctggatataccaatttatataactgaggtaggagtgccaacattttatagatataaattcactccagaaatgataggcttgtacgctcagcagtttataagtaactcacgaaaatatagttatattaaaggtgtttggtggtatgacttaattaatgatggtaattcttatacaaatggagaaatgaattttgggttatattatcataatttaaataaaaagataaatgaaagatttttccattag

SEQ ID NO: 194372 - DNA, 837 bp, Klebsiella oxytoca
atgaaaacgttaatcaccgttgttctttacaacaaagaattagttcagtctaaaacattagtcagtatttgctcctgtaagtacactgatgctgaccttgttatatataacaatgggccacataatgttgatgcgaataattttatttttcggacgttagaaaataagttcatttccgttaaaatagtaaatgatgtaaataataaaccattaagcatgatttataatagcgctataattaataatcctgaagcagataggtttgtttttctcgatgatgatactattttaagtgatttttattttaatggtattagcaatacgcaagtagacttaatagtccctattattaaagaaaaaaattcaccttactatcctttagtcaatgggttaccctgtgataaatttaaaaacgttgatctttcatttgaaaccttgttttctatcggatctggcttggttatatatagaacgttagttaataagttttgtatttataagcttagccccttcgacgaaagatttgctttgtacggtgtagattttagtttctttagacgtttacagttcttatctaataatggcgagaccataaatataatcattaatggtatgttagaacattcattatctagaaatgaaggttttatatctgaagagagacatgttgagagattaattgatgttgttttatcggcaaagttttactctaaaagtttatggatagatatttacactatgatgaaggtaattgctcgtgagataaaacatttacgatttcatcatgcactttttgctttaaagatttatttaagaggtaaacatccacgttgttag

SEQ ID NO: 194373 - DNA, 1977 bp, Klebsiella oxytoca
atgtcacacacacttgcactccatcccgtgaaaaagcgggatgcgatattcctttgggttttattcggctggctggcgttcgccctgctgccgagctggagcctggattacggtctgctggagtccacgcaagatgaaattctcgcggcctacggctggtcacagttcaatatcagctggctgtggtatctcctgccgagcctgctgctgattcgtccatggcaggaagccagccgggagcagcgcagccgccactacctcgacgccggctgggcgctcctctgtatggcgtttatcgtcgtcagcgccaccgtggaaggccgcgggttaggctacgccaccctcgtgctgtttgtcgcgctgggcgccatcatgaccctggcgctcacccgcctggaatggctgggcggcgaccgctttgtgattggttcgctggtcaccatcgtggcgttaatcggcgtctttatcgtctggccgagcatcgccattttcatcccgatgttcaccaacgacgccggcgagtttgccccgctggcgtttatggccgtgctgtcgcaggcgcatattgtccaggtgatcctcaactccatcgccctgtcgattgcggtaggcatcggctgcactttctttggtctggtgctggcgatttacaccacccgcatcgcgaagcgcagcgcgattatcggccgcattttctcgattctgccgatcgtcaccccgccctttgtcgtcggcctcggcgtcaccctgatgatgggccgttccggctacgtcaccgaactgatggtcgactggttcggcttaaccaacactaactggctgtacggatttaccggcatctggctggcgcaggtgctggcgttcaccccgatggcatttatgatcctcgacggcgcgattaagaccattcatccgtcgctggaggaggcgtcgtacaccctgcgcgccagccgctggcagaccttcaatggcgtcttcgtcccgctgctgaaaccggcgctggcgaacgcgtttttaatcgtcatcgttcagtcgctggccgacttcagcaacccgctggtgctcggcggcaacttcgacgtgctggcgacgcaaatctacttctatatcaccggttcgcagctcgattatcaggccgccagtaccctcggcgcattcctgctgctgttctcgctgctggtgttctgcattcagtatatgtggattggcaagcgctcttacgtcacggtttccggcaagtcctatcgcggcgacgtgcagccgctgccggtgaccctggtgtggagcgtgatcgccattctggcggtgtggatcgcctttaacgccctgctctacggcagcattttctatggcagttttaccgttaactggggcgtggattacaccctgacgctggataactttatcaagctgttcggccaggggatgagcgacggcgcctggccttcgctgctcgataccctgctctacgccgggatcgccgcgccgatcaccgccgccttcggcctgctgatcgcctggatcgtggtgcgtcagcagtttaaaggcaaaaagaccatcgagttcaccaccatgctgtgcttcgcggtgccgggcaccgtggcgggcgtctcctatattctcgcctttaacagcgcgcctgtgtacctcaccggaacggcggcgattgtgattatctcgatggtgatgcgtaacgtgccggtgggcatccgggcgggcattgccggtttaggccagatcgacaaatcgctggacgaagcgtcgctcagcctgcgcgcgggttccctgcgcaccattacgcatatcctgctgccgctgctgcgcccggcgatcctctcggcgctgatctacagctttgtgcgcgccattaccaccgtcagcgccattgtgttcctcgtgacgccggacacccgcgtcgctaccgcctatatcctcaaccgggtggaagacggcgaatacggcgtggcgatcgcctag

SEQ ID NO: 194374 - DNA, 1089 bp, Klebsiella oxytoca
atgattaaactcgataatattcgcaagacctaccccggcagcgcgcatgcggctattcgcggccttaatctggtgattaatagcggcgaactgtgcactttcgttggccccagcgggtgcggaaaaacaaccattctgcggatgattaatcagctggatattcctgatgccggtgacgtatacgttcagggcgttaagcttgccgctgccgatattattcaggtgcgccgccaaattggctttgtcatgcaaagcgccgccctctttccgcatcgtactgtcgcgcaaaatatagccacggttccgcgccttctcggctggagcaaaaagcatatccaggcgcgcatcgacgaattagtggatttgatgtctctcgaccgcaacgtcctgccccgctatccgcaccagctttccggcggccagcagggccgcgtggcgatcgccagagcgctggccgccgatccgcctattctcctgatggacgaacctttcgccgccatcgacccggtggttcgcgagcgcctgcaggacgagctgctgttgctgcaacagcgcctgcgcaaaacgatcgtcctggtgacccatgatatcaatgaagctattcgccttggcgatagaatcgctatcttccaggagggcggcgagctggcgcagttcgccacgcctgaccatattttgtcgcatccggccagcgactttgtgcgccgttttatcggccccgaaccgaatctgcagcggctggggagaattcaggtcggacagctcccgcgtcatgacgtgccgcttattgatgagagcctctcccccatcgccagcccgcatccgccggtcgccagtccgctgcgcctggtgctggacaaaaaacggcgtccgctgaactggttcgatccggttaagcgccggacgctgccggtcgacgcgccgctggcggccatcaacacgctgcgctttgcctacagcgcgctgctggatgcgcccggcggcgtagtggttcatgtcgataccgacggtgaatatcagggcagcatctcccacgctctgctgcagaacgtgctggaaggccacgtggatcttcgccgctatgattga

SEQ ID NO: 194375 - DNA, 1824 bp, Klebsiella oxytoca
atgtcttttattatgctacgaaccggggtggctgtcgcgctgtcatctttgatgataagtctggcctgcccgactgtcagtgccgcaccttccgtgaatcaggatattaacattcaaaaggaaagtgaatatcctgcatggtggaaagaagctgttttttatcagatctatcctcgctcatttaaagacaccaatgatgatggcattggcgatattcgcggtattattgaaaagctggactatctgaaatcgctcggtattgacgctatctggatcaatccccattacgactctccgaacaccgataacggctatgatatcagcaattaccgtcagataatgaaagagtatggcacaatggaggattttgataatcttgttgccgaaatgaaaaaacgaaatatgcgcttgatgatcgacgtggttattaaccataccagtgatcaacacccgtggtttattcaaagtaaaagcgataaaaatagtccttatcgtaactattatttctggcgtgacggaaaagataatcagccacctaataattacccctcatttttcggcggttcggcatggcaaaaagacgtgaagtcgggacagtactatttacactattttgccaggcagcagcctgatctcaactgggataacccgaaagtacgcgaggatctttacgcaatgctccgcttctggctggataaaggcgtatcaggcatgcgatttgatacggtggcaacctactccaaaattcccggatttcccaatctgacacctgaacaacagaaaaattttgctcagcaatacaccatgggccctaatattcatcgatacattcaggaaatgaaccgggaggtactgtcccggtatgatgtggccaccgcgggtgaaatttttggcgtcccgctggatcgttcttcccagttttttgatcggcgccggcatgagctgaatatggcgtttatgtttgacctcattcgtctcgatcgtgacagcaatgagcgctggcgtcacaagccgtggtcgctctctcagttccgccagatcatcagcaaaatggatgtcacggtcggaaagtatggctggaacacgtttttcctggataaccatgacaacccccgtgcggtatcccatttcggggatgacaggccgcaatggcgggaagcttcggctaaggcactggcgacgatcaccctcacccagcgggcaacgccgtttatttatcagggctcagagctgggaatgactaattatcccttcaggcaactcaacgaatttgacgacatcgaggtcaaaggtttctggcaggattatgtccagagtggaaaagtcacggccaccgagtttctcgataacgtgcgtctgacgagccgcgataacagcagaacacctttccagtgggatgacagcctgaatgccggttttactcacggaaagccctggtttcgcattaacccaaactatgtggagatcaacgccgaacgtgaagaagcccgcgaagattcagtgctgaattattataaaaaaatgattcagctgcgccatcatatcccggctctggtatatggcgcctatcaggaccttaatccacaggacaataccgtttatgcctatacgcgaacgctgggtaacgagcgttatctggtcgtggtgaactttaaggagtacccggttcgctatactctcccggctaatgatgcgatcggagaagtggtcattgaaactcagcaccaggcgaccgcgccgcagggtacatccctgtcattgagcccctggcaggcaggtgtatataaactgcgtgggaaacatgaccagacacaggggcagtag

SEQ ID NO: 194376 - DNA, 1161 bp, Klebsiella oxytoca
atggtggcgaccattatcggtggaggcatgttcgcgttgccggttgctttcgtcaacgtgtggtttataaagggccttctggtcctgtcggtaacaggtatattgatgctgattacagggttaatcctcgtcgacattacgatgcgctttcctcctggcgccagttttcataccttcacccatgccctgctcggacccgctgccagcgttatcatcggcgtggctttctgtttcgtactctatttactgacctacgcgtacatatcaggcgcagcatcgatagtgtgggatctccttcctcccgatattgctggccgcagctggctgccgatcattttgttgtcgctgacaacctcgctgattctgtgggccggcggcaaattgcccggttttctcctctccggccttattgccgccaaattcaccctttttctcctgctgttcgccggtgctgcaggaggcgtaaaagcactcagattactcgacttcgccggcagcacgccgctccagtattacctgccgatcgtaccggtctgcgttatcgcttttggatttcatggcagcgttccctccctgacaagaatgtaccggggggataatcatcgcgcggttctccgctctctctattacggtttcgccgtttcgttaattgtctatgctttctggctgacgctcacaatgggcgcgctcacgcctcaggctatccggcatgtcagcgatgaaggcgggaatattggcgcctttatcacggccctcaatatccaccggaccacctctgctaccagtctgatactggtcgcctttgggtgtattgccgttttagcttcactgatgtcggcttcaatcggcttaagtgattatcttgaggatacactgaacaaaattaactgtcagtgctcacgcccgctggcaatatttctgacttatttccctcctgcactggcctgtattatagctccgcaaggttttttgtctgccttgtcatttgctggtttttcactggtattatggagtattatcctccccccttatttactccttaaagccaggcgttccacttttcctccggcatataacttcccgggaaataattttctcctgaaaattattattgttaccggagtcatactctggctattgatgatttacgcttttctttaa

SEQ ID NO: 194377 - DNA, 1230 bp, Klebsiella oxytoca
atggaaaactggcaaaaaaggaaaatagacaggtcattaaaatatcagaccagggtattttccgagcatattaacgaactggtcgcagtaaaaagagagggtaaggtcattaccctcgacgatggcagaaaaatggtggaatttgtctcttgctcttaccttgggctggagacacacccggcgctgaaaaaagcggttgtcgatgccattgaacgttttggtgtgcaggtttctgtcgccagaacgcgggttaaagtcgatctctttccgcagctggaagcgcgtctgaacgacatcatgcacggggctcataccctcacgttcaacgcagtgactccctgccacatcgcggtgctgccgctgctggcatccgggacgctgccgcattttacgttcagtaaaaaaccgtactttattatggagaagaccgcgcacgcgacgttgcagatcaaccgcggactcttacagcagtttggcgaagtcgtcagaattgatttccaggacaaggcgcggattgaagaggcttttcgctatgcggccagccagggactgacaccgatctcggtatcagacagcgtaggctcaatgggtggtgtcgcccctgttgcacatatcgtccgcctggcgcatcagtatgacggcttcgcctatattgacgatgcacacggcacctctatctacggagattacggttcgggatatgtcatgtcatgcctcaaccatcagcttgacgagcgtattattatcgccgggtcgctgtccaaagcttttggctcacacggcggatttatcgcctgtcgggaagctgagaccatcaactttatcaaaacctacggtacaacctacgcctttggtggacctccgtcattaccggggattgccgcctgcgtcgccgcagcagatctccacctggacggcaccgtcacagcccgtcaggagaagctacagaacgtcattcgttattttgacgaagtgttcggcgggaccgagatagttaaccggggcacaacaatgccgattcgggggatcctgataggtaacgaagacctcgccattacgatgtgcaaaaaactgcacgatcgcggcttcgccacgacagtggcgatgtatccaaccgttgaggaaggacacgccattctgcgttgtgcattgtctgcacttcatgagagcggccaaatcgacgacttccataaaaacttcagtgaatcactggctgaagccacaaaataa

SEQ ID NO: 194378 - DNA, 591 bp, Klebsiella oxytoca
atgccttacttgttactaacaccaccggccctgatttggcgaaggaatgatgtcttcagccagcttctttttcagggtgcggacccggttcttatgacagaagcgagttgggcttcaaatgtggtaatgctgtatcaacggcatatctgcaatgtgaagtcgccgttgctccaccaactgctgatttctttgctacaggtacagtcccactctgttgatttacagccgatttttgctccaggcaaaacaatttatatggctgcgatctccctcatagttcttattatcaatcgtctgatctcccttatgtggctatcgctgcgttacaaccgggaaatgcactcccatactgcacgtgaattgctacacctctctcatcgcaacctgagtcggggctcattgctaaaccgatttagctttcaagagatatcgataatgaaatcggcaatggttctggcagtgtattgctctctgttgcggaatattctgcttaccggttggcaacgctgtcatttactgagctggctttttattttaaatggaatcggtgcttgttcattcgcaaaaactcagcggcctgttgataaataa

SEQ ID NO: 194379 - DNA, 639 bp, Klebsiella oxytoca
atgaaacgttatatatgcgtggccgctacgttatttttgagtacttcgttacttgcagcgggtgaacttgttatcaatgattcgccgctgacattggttttgagcgaccagaatcaggcacatgtttcatcctgtgccgattttatttctttgcgtaaggcaggtgaaacggttaaagaattaccagaactctccgatcccgatttccgtactgcacaagatgctttgttttcgtgctggctgaatgcatacacaactgagcacgacatgtcgccggtaaatgcaaataaaccagcgctggcagacattcttcagcactttcccgcaagtgcggcatacctcgtaagtaataaggaacaacaggatgtaaagatgcactacgcgggtaaatctatcgccgattatacacctgacctgaaggctaaggacgatcgccttgaatcagccgccagatcaaccgggtatgtcctggatgattactatacttttgctgataagaaagggaatcaactcaatatagtggccctgactggctacgccactggcggtacggccgctgataaggccttctatcgtgttgatgatatgcatgatcgaatctggaaggttacccggcttgatgagaacagccatctctaa

SEQ ID NO: 194380 - DNA, 762 bp, Klebsiella oxytoca
atgggtattgaagattcaaatcaggggcctggctggaatgatcatgacaccccctacggcccgattcacagttatgatggtaacatcggctcttcgagctatggcgggggttctggtgggaacggtggtaaccgccatgaagggattacggacaaaacaacgattaatattgcctcaacgaaagactataacggcacatatatgactatgtgtgtgaataaccttaaggctcatgaagggtttaaaaacagcatgtacaaagataccgcgggtaatattacggtgggtatcggccatatgctggcgactgctgacatggcagcgagcttatcgtttactcgcacaaaaataactcatgctcatggtgacgatatggagcacgaagaagccgtttcgaaggcggatatcacttcagcatttgatagctttaaaaaggattcaaaagctgctccgaatagcctgcatctctcaaatgatgcagttatcggacaatgtatcaaagatgtccagagcaccgaaaaaggcttacggggtctttactctggttatgacaacttcccgaatgaaggaaaaactgccttggttgatatggggttcaatctgggcatcgctaagctaaaaaacggattccccaattttaacgctgcggtcaatcgtggtgactggaatggtgcagctgatgaatcccatcgaaccgggatcggggataagcgtaacagcgataccaaagcacaactgcaacaagcagcaaaaaggaagtag

SEQ ID NO: 194381 - DNA, 750 bp, Klebsiella oxytoca
atgacaagattaggattattcctagttccggttttttttatgattaagaacaaggtggaaatagaatcttatagttttgttttagagccatcttacaaaaaagatggttccattcattcttgggaaattctaacaaaaaaagtaacaaagaaacatattaatgatgaattggctaaaaaacaggtttttttattcaattcgttaaacgaaaaagaaatcattgatgtattcaataaacagttattgacaattgctagaactgacccgtttattttaaataataggccggtatcagtgaacgttgatagtctaattagtgattatatattaaacgacagatacgtaagtgattacattaaggtgcaaaaaaacataactattgaaattaacgaggattttcatgaatttaagcatccaaattctttttctgagttaggcttactttcgaaattgtgtccagtatggttagatgatttcggacgaggattaacaagtcttaaggttatcaaatcatttcaatttgaatgcataaaaattgacaaagattatttttgggaaattcagcatgtaaaagatcttacggcaatcttgaaaaaaataaaattacattctaattttatcattgtcgagggagttgaaacgatagagcaaaagaataaagttttttttgtggttgatagcgcttgccaaggacggttatggaaaaataattatcactatattgagtgtttatataattatgaaaagtga

SEQ ID NO: 194382 - DNA, 162 bp, Klebsiella oxytoca
atgaagccacgcagcgatgtcctggagctggccactaccaccgctccagttagaattgaactggaggggcgggtggaggatagtttggtcgataacaacaacatgaatatttttaacaaagtaattcgccgcatgctgatgtttgaaactagaattttataa

SEQ ID NO: 194383 - DNA, 165 bp, Klebsiella oxytoca
atggcagtcaaattaattattgcattttttgttggttttattttatgtttatttttagttagtatatttttaaaaagaatcaataaagcgaatgagcgtaaaccatcttcttatcagcaggggtgtatggcaactcgtaataccgattcaaagaaaaaaaattga

SEQ ID NO: 194384 - DNA, 702 bp, Klebsiella oxytoca
atgaagcgtattgccctttttttctgtttcatttttagttttgcggcccatgccaataatattattgttaacggtacccgctttatttatccaggaaatgaaaaagaaataacggtgcagctctctaacaccgccgaccgtccggcgctggcgcaagcctggctggataacggtaatgccgacgcgacgccggataccattactaccccctttattatcacgccgcctatttcccgggttgatgcgaaaagcggtcaaaccctgcgtattaagctcggcagtaatgcagggctggctaaagataaagagacgctgtggtggctgaaccttctggaaataccgccggttgaggccagccagaaaaacgaagggcaaaatattctgcagctggcgattcgttcgcgctttaagtttatttatcgccctgccgggctaggcaatcgcgacgctgcggcagaaaaactggcgctctccgctaacggcagcagcctgtccgtcagtaacccaacgcccttttatatcaccgtaagccgtatctcccgtaacggcggcaaagcgctcaacagcaaaacggtcatgtttgccccgcagtccagccagaccatcgccctctcttcagcggtgagcaaaggcgagaccctgaccgttaacaacattaatgattatggtgcagatgtcgcagtgaaagttaccgtcaaataa

SEQ ID NO: 194385 - DNA, 1077 bp, Klebsiella oxytoca
  misc_feature (1052)..(1061): n is a, c, g, or t
atggaattgatgccattcaattttgacagattgcctaatggacaggtgtttataagcaacctcgctggttttcatcacttcattgatgagcaagagctgcttgatctttctgatgagcaaatcagtgcggaacaatcaaacgcacttgaaagcaagctgttcataaccaacgaaagctcatcagctattgctccctatgctttaagttctgcttttgcaaaacgattgatgaatgaactggcgatcaggccaattttcatgattgtgcccacattacgttgcgaccatacctgcaagtattgtcaggtcagtagagcttcagtgaacgcctctggttatgatttagatcccgctctcatccctgatatcatttctactatcaaaaaactatcaactccaccttacaagatagagatacagggtggagagccactcttgcggttcgatttaattcagtccatctatgagctatgttctgaaacgctgggaagcaccgattttgagatggtggtagcttcaagcctgtctgtcttgaatgaggatatgcttgaatggtcgagagataggaacataacgttctctgtttcgcttgatggtgaggaagttgttcacaacagtaatcgaattcttggtcatgggcttgcgtacagtagaacagtgtcaggggtagaggctatcaaacggtctttaggcgctggtcgcgttgcaacggttactacagttactaaagatctcattaggcatcctgaatcgattgtccaggctcacttgtctcttggcctcaaggacatgtttatccgacctgttagtccctatgggtttgcacaaaaagcatcgttcacattttctatggaggaatacttcagtttctatgcctcgttgatagatgaaatccttaagatgaataatgaagggataagggttgtggaacattcggcctccattcatctgaaaaggatcttcaatcccggctttagtggttatgcggatttaaagtcgccaagcggggtcgtgcttaacagtattcttttcaattatgacggtcgagtatnnnnnnnnnngtcgagtatatggtag

SEQ ID NO: 194386 - DNA, 519 bp, Klebsiella oxytoca
atgagccactattctgtggagaaagagaggtatcctacgtcatatgtagatatcaaaaactatattgaaattggtatgtttgaaatggacttgggaacttttcttgaagattcattttttaaaaatgcggacaatataaatgttactgacagtaaaggtcaggtagatttatattttaaggctaaggctgtttatataggcagattttctaaagttaaacttgagataatacaaactgagttgagtgatttcggtatattgtgcagatgtcgtttagattatagtcaagttgaagttgaacttacgtttgacaaaaatgatgatacttattacaaatccctgttgaatcatgagaaacgtcattctttgaatgattatggcaatgatttttctttaagcatgaatcactctatgcaaattgaaacgacattcatatacgtaccaaaggaaaataaagaatacaacgaggactatggtagtattacagatataagtattcaatatatttacttggggtga

SEQ ID NO: 194387 - DNA, 969 bp, Klebsiella oxytoca
ttgaaggatcagatcacgcatcttcccgacaacgcagaccgttccgtggcaaagcaaaagttcaaaatcaccaactggcccacctacaataaagccctcatcaaccgtggctccataactttctggctggatgatgaagctattcaggcctggtatgagtcggcagcgccttcttcacgaggcaggcctcagcgctattctgaccttgccatcacgactgtgctggtcattaaacgcgtattcaggctgaccctgcgcgctgcgcagggctttattgattccattttttctctgatgaacgttccgctacgctgcccggattacagctgtgtcagcaggcgggcaaagtcggttaatgtcagtttcaaaacgcccacccggggtgaaatcgcacacctggtaattgattccaccgggctgaaggtcttcggtgaaggcgagtggaaagtcaaaaagcatggccaggaacgccgccgtatctggcgtaagctgcatctcgccgttgacagtaaaacacatgaaattatctgcgctgacctgtcgctgaacaacgttacggactcagaggccttccccgggttaatccggcaaacccaccggaaaatcaggtcagccgccgccgatggcgcttacgatacccggctatgtcacgatgaactgcggcgtaagaaaatcagcgcgcttatcccaccccgaaaaggtgcgggttactggcccggtgaatatgcagaccgtaaccgtgcagtggctaatcagcaaatgaccgggagtaatgcgcggtggaaatggacaacagattacaaccgtcgctcgatagcggaaacggcgatgtaccgggtaaaacagctgttcgggggttcactgacgctgcgtgactacgatggtcaggttgcggaggctatggccctggtacgagcgctgaacaaaatgacgaaagcaggtatgcctgaaagcgtgcgtattgcctga

SEQ ID NO: 194388 - DNA, 423 bp, Klebsiella oxytoca
atgaaaaggggcattcatcctgcgctggcctttgctaaacaggtagagggctggtctccgggcgtattcagtcatgttgataagtggcgggagaccgattcacttgccccatggcggtttatgacgtttcgccagtgtaaacgctggcttgcggactggctgaagcgtaacccggcgccagaagaagggttcctttgtcctcaaattatgaagcgtttcccgccgcatattgtttatatgacgcttgcggcctggcgagccggtaaaacactcctccactgtgatgagtctctctttcggatgctgggtgaaacccgtcagaccgacgcacagccaggagaaatgcttcgccgcctgccattctggggattctggctcgatttcccggctgacacggtctttgctgaaggccaggggcgctga

SEQ ID NO: 194389 - DNA, 621 bp, Klebsiella oxytoca
ttgggtagcccggacaggcgcgtcaagcgccgcctccgggacggtgtggaggggttccgttcaccgctatttcgcagaaaatgtctcaccgtggtaggtgaacgggtaaagggggagaaaaccgtctccccctttacaatccccgcggtcccgcaaagaaatcggtgctgcgcactgcgctcacctcccggacctcagcctgcggtcggctcaactcgacatcgctgtctcgattcgcctctgtccgccatccctggcggccagcccttgtcttcggccctccggttcgccgatttcagcgggggccagggcatcgctgcatctcacgttgtttcagagatatccccgctgctgtatgaaactctcccggaggcggcgcttgacgcgcctgtccgggctacaagagctacgggtttccagtcgtcagcggggagtagcccgggtaaggcgtttacgccgcgacccgggatttccgggctacaagggcaatacaggctagctgccaaatttgcgcgaaccgacaacgcacagaatcacgcccagcgtcacggccagcatcaatgggctgacggtttcgtgcaaaagcgccgccgccaggccaagcccgaagaacagctgtaa

SEQ ID NO: 194390 - DNA, 510 bp, Klebsiella oxytoca
atgaaatttaaagtggtaattggagttgcatgctttgcgattgtattactatccgggattttgggtagaaatgtagcttttgcactccaatggcccctttttgaagcattaagaaccactgcttccatcatctttgccgtggtgggagcttggtttgccattatctatccagaaaggctgaaaaagtcatttcgtggtggagcatcggaaaatagtggtccaggtatacaccggcttttcactccaatagttcactccactgcgatcctcgcaactgtactgattgtcggtgttatcgtcccattattgaagcaattcgaatggattttgtcgcataaagagatattcagaggcatatcgtatggattgcttgtttttctgacattgtggcagttgattacagttctttttagcctaattggccccgatatgattaaacgtcatgtatcaaaacaggaacgagctgaagaagctgctgcggcagtaatgcccgtaaagaaaaaagattga

SEQ ID NO: 194391 - DNA, 1044 bp, Klebsiella oxytoca
atggtaactgagcaggcagtgtttactttttataagattaataaagcagggtattatgcatacggtgatcaacaaccggcgttcggtaacacaaccgagatgcttaccgatttgcagcactgggctaggacgaaaacactaaagcaaaccaaaacctttgaagctaatgaagagcgatatccttgttatcttgttgatgctaaacggaatggtgatgattgggccctgttgatttggaacgaaatacctaccaatggacagcaagttccttcaataagcgaaacggcgagattcggcgctgaccctgaagtaattttgaacgcggttcagggggggagcatacctggttacgctacatatttttggttcctcccggagagggatttgttagcgacggtcaggcttcacaataaattaacgtcgcaatcttctcttcaacactaccttcactgtttccttaagcaatcctcacctcatgtagtcgcagcacctttcacaaatgaggatgggagtgttgaagttcgggtcacaggttacagaaataaccctcttgatgaaaatgaagaagagaaacactacattcccaaatttagctccagcttggtgcgaaacagggggaagcatgacatcatcagacagaatgctaaccgtattagaaaaattgaacgtgttattgagttagatctgactaaacctgaggagttaggtttgtggcagagaatgcttcaagtggttaatcttggagcaccacaaggtgctgatattacaacaaaagtacggtatacactttcgccaaatgtgactcttcaagatgtgaactcgatgattgacgactgggaggcggacccaagtgaagtaaacgactatggcttttacttcacaggggaatccaataaaccatattggctaagtaagtcattggcaagaatggagtttcagcttgatcttgaaagagaaaatattgaatttgtacagattgattcgctcttacgagagttggtcagaaagaaaaacgctattctgaacggtgcagggctattatga

SEQ ID NO: 194392 - DNA, 582 bp, Klebsiella oxytoca
atgagagacatcgacgttcgacaagctgttcattcaaaaatccttaaggaacatcacaaggatcctgatacccttattatcgatgagtttgttatgaacttaggggctagccgtgctgatatcacagtaatcaatgggttaatgcatggttatgaattgaagagcaaaagcgataatcttttgcgtctacccgctcaggttgaattctattcttcgattatggacaaggtaacccttgttgtatcagattgccatgcagctgccgcagagaaaatcatacctgactggtggggagtaaaaattgcaactgaaggctctaggaatgccgttcatctacgcacgctgcgtcttaatcgaatgaatccaaacgtcgataaagttgccctagccatgttactttggaaggatgaaatgctgtctattttggctgctcaaggtctagagcgtggcctgaaaagcaagccacgcagagtactgtgggcgatggttgcagaatgcatggaaacccatcagctaagagatgaagtgcgcacgcgccttaaagcccgtacaaactggagagttgataaacaacttttgtaa

SEQ ID NO: 194393 - DNA, 1101 bp, Klebsiella oxytoca
atggaagatatttcttacgtaccaattttaaaaacaaaacgcgcagagtttacagcaaccgcacagttatctaaatcggtcaaagtgaaaatcatccctctttttgaaattgaacctgttcctttagatccagacacagatattcccgataagagttataatgaaatgttgagtgattttggaaagaaaattgctacagcatgttctgatatttctattatttaccttgatgggatacttgttgaagagcaattcattgacttaggtgatatttatccaatcacgaatgctgtcaatcaggcgcgcgcggcaggggttcatgttattccggtaagttctccaactcgtaacggaaattatttaaaagcgattgatggtcttgtgaaagatgaagtgtgtttacgattgactgtaacagatattgctaacccccagatgatatcagcttatatttccaggttaaatatcccctatcgaaatattgatgttgttatcgatctgcgtgactctataacagaagattcattggggacagaccaaagtcaaacacttgctgcaggacttattaacaatcttcataatatacatgatttccgtcgcgtaatattagctgccggttcatttccagttgaccttagtcaaatatccgtaggtatatattcgcaacctcgtttcgaatggtttctgtggaaggatttacgtcaaaaatcctatttaacgcgagaagtaatttacgcggattatgggattcagcatccagattatactaggcttgcgacacggtttcctagtgtcactgctagtgttcgttatactggtgatgatgatttttgggtttttagaggaagaaaagctaaccaatatgggtatgatcaatatggtgcgcatagccaacaaattgttgctcacagagaatactctggggtgacattcagtgtagcggataaagatattaatgattatgctctagtttatgcacagtacctgcaaaatccctctcagagttataaatttggtagccccgaagtttggagacgaattggtcaaaatcaccatattacaaaagttgtttatcaactctccagtttgtacgggctttaa

SEQ ID NO: 194394 - DNA, 222 bp, Klebsiella oxytoca
atgagccatttacagcttatagatgcgacctgccaggttgagcaggcgcaggccgttttatccctgtggctggaaagaacctcgaaagattcagacccagacctcccgcggctcttaggttcaatcatcacgttgttgaatggcgttccggaagccatgagcgaggcagacagcgcgttacatgattatgcgatgcgtgaacttaaggagggcaggtcgtga

SEQ ID NO: 194395 - DNA, 198 bp, Klebsiella oxytoca
atgagccgtgaaatcacccttgagcaagccgctgagcgtgctcatcaggcagagatcatctgtcgtcttgttgaggattctcctcatcatctcgttgatagcgaagtatcagcgatcgccactctgttaaagcgcctttcaggtgatgtagcggcatggctgatttcggaactcgcagaaagggagggcaaggcatga

SEQ ID NO: 194396 - DNA, 264 bp, Klebsiella oxytoca
atgaatataaacgctatataccgccatcctgccgagcttgaggccgaggcgatgctatcccgtgggcaaccttatcctgaagattttacgctggcagagcgtaccgtggaacgcatgacccgcgcccgtaatggtctggctcacgttatgaccgatttatccccacgccttgacgatgagcaagcggccatcgtgcattgctggctggataaagtcctgacgattgtcgatataacccgaattgatgcggaggccagcgtatga

SEQ ID NO: 194397 - DNA, 432 bp, Klebsiella oxytoca
atggaaaagaaaaaccgcccattacaggcggctaacacagatattcgcggatctgatgttacgccaccaacccacgctattcaagtgccacgccgtaccccgaagaaacaccgcgcccgcgtctacatgttgcgtaccggcgttgagggatggactgaaaacgacattctgcgctattgccgactttcctctggccggaactatgccactgagatcgaacgccgacttgatatccaactggagcgcattgagcagaagaacccggacggcattggcgcacatctgcgctaccttttttcctgccgtgctgacgttctgaaggttattcagtacgtcaaccatatggctgccattaatcagcaccacggacttactaaacaggatattaccgacattctgaatctctacccggacaactacaccgccgcataa

SEQ ID NO: 194398 - DNA, 807 bp, Klebsiella oxytoca
gtgattaagtttaactttgatagtttggacagagaagctgctggggcagttcatttcgaaaaagcacttgctgtattatccaaaaccaacaaacgatcagaatcggaaacagcagtattgctgatacgagcatttgattcctttgtaggaaaacatccatataatggtatggaatttggtttttacaattatacgccctctaccggatttcgtacgagccaagaatttaccgcacaaagccgtgcatttttatcacatattgcgaaacgtcgtgaatactactctgaccctaatcctgatagtgatggagattactttatagagtttgattaccaggcaccacgtcattattattccttctatttcaaactgtcagaactccttgtttttttaattaaaaacgatatgcctatccctcatgattttgaacatgctcaacccgctgcccaaaagttgtatgcgttctatgatcgactaataaagaaagaagctgatcgtttttttgcagaaattgaaaatgaagacgaagagttggataaggttccagacagaaaggaaggggagactacatggtcgaatttctctggaaaagatacagccttgatgatgatagctggactttccgttgctttagaaaaatcaggggggagatatattcgtggaggaaaacttaataaatcagctgtggcaagggctgctatcgatgcgatcaatgagcatggcaatggtacggagatcaccacaaaagcccttactgacctgttgaacgaggccatttcaactaaagcggccaaattggaagactag

SEQ ID NO: 194399 - DNA, 786 bp, Klebsiella oxytoca
ttgccgcctcgacgcagcgtgaatgattttgtgtattggcatcatccttcaagctgcctctttgttggcttcgtttgtccgccccggtcactgactcatgtcagctcccggggacgaataaccttgccgcctcgacgcagcgtgaatgattttgtgtattggcctcatccttcaagctgcctctttgttggcttcgtctgcccgccccggtcactgactcatgtcagctcccggggacgaacaaccttgccgcctcgacgcagcatgaatgattttgtgtattggcctcatccttcaagctgcctctttgttggcttcgtctgcccgccccggtcactgactcatgtcagctcccggggacgaacaaccttgccgcctcgacgcagcatgaatgattttgtgtattggcctcatccttcaagctgcctctttgttggcttcgtctgcccgccccggtcactgactcatgtcagctcccggggacgaacaaccttgccgcctcgacgcagcatgaatgattttgtgtattggcctcatccttcaagctgcctctttgttggcttcgtctgcccgccccggtcactgactcatgtcagctcccggggacgaacaaccttgccgcctcgacgcagcgtgaatgattttgtgtattggcatcatccttcaagctgcctctttgttggcttcgtttgtccgccccggtcactgactcatgtcagctcccggggacgaataaccttgccgcctcgacgcagcgtgaatgattttgtgtatggtcatgtatag

SEQ ID NO: 194400 - DNA, 297 bp, Klebsiella oxytoca
atgtttaaatcctttttccccaaaccggggccgttttttatttctgcctttatgtggtcgctgctggcggtgatcttttggcaggcgggcggcggcgactggctgctgcgggtcaccggcgcatctcaggatgtggcgattagcgcggcgcgcttttggtcgctcaattacctggtgttctacgcgttctacgtattctgcgtgggcgttttcgccctcttttggtttatttacagcccccaccgctggcagtactggtcgatcctcggcacctcgctgattattttcgtcacctag

SEQ ID NO: 194401 - DNA, 639 bp, Klebsiella oxytoca
gtggatatcgtatattctttgggtatttcatcattatgggacgaagtacgtcatatgcccgtgggtggagtatggtggctgaatgtcgaccgctatgccgacgcggtaagcctgctcaaccatacgctggctgcccaggataaacagagccaggttgcggcgatagtcatgggtgataacccaaataaaatcattgaactagaaaaaaatcgcgggccagaaaagatcgcgttatttagcatgccgaaccgtgctgaggggctgcaagaaatgcaccgcgatttagtttgttccctcgaacctggcaattatttgtttattctgctatgcgctgaaaatgcctggcagaatataaaaagcgatgatttatgcaattgggttgagaaatcgtatcgatggactaattatcatcgttgttcattactagtacttaattccgggcacgatatcgataagcaactctcccctttattacgcgagtaccgctcgctttccggtctggcaagtattcgttacctgggggataaccacctgttcgatatcgcctggtgggggagtgaaaaaggcatcagcgcccggcagcagctcattgttcttcaggatgaaaacggctggcggctggcggctggcgcaggatga

SEQ ID NO: 194402 - DNA, 312 bp, Klebsiella oxytoca
atgaacatccacgccttctcgattatggtcgaaatctacgaacctctgcacagtttactggaacttttttggccgcagcgttcacagtaccgacctgatatgccgttctggcaattacacaatgccgagctttactcaacagcaaggagtagtcaacaaccgccagtgagggaactgaccaaataccacgttgcaggcagttttgatgaacagcactacgccttggtaaccgtcaataaaaaactcatcaatactctagtgcaacagatgtacccgaagcgcaacgctttcttgaccaagttttggtattaa

SEQ ID NO: 194403 - DNA, 282 bp, Klebsiella oxytoca
atggaaattaaaatcctgcacaagcaggggatgagtagccgggcgattgccagaaaactggggatctcctgcaataccgttaaacgttatttgcaggcaaaatctgagccgccaaaatattgcagttgctacagtcagagtattacaagcatggagctgcggaatggccgacggcgcttgaaggaagatagagaaggcttaaagatagtaggcattgagttatgcgaaactgcaacttggataatgcgtgccacagcggcccgattttggcagtatctttag

SEQ ID NO: 194404 - DNA, 1626 bp, Klebsiella oxytoca
atgaaatttaaagcagatcaaacctcacaaaaacttagaggtggctattacaccccacaaaacctagctgattatgtaactaaatgggtattaagtaagaatcctaaaaccatacttgagccgagttgtggtgatggcgtgtttattcaggctatggctaataatggttatgactctaacattgagttatcttgctttgaattgttcgacacagaagcatctaaggctctcgatcgctgtaaactgaacaatttttctaatgcaacgattacagagggagattttctagtctgggctaatgaatgtcttaagaaaaatgagcagatatttgatggagttttaggtaatcctccattcatccgttatcagttccttgaaagaaatttccaagaacaagctcagttggtcttcgaacatctagacctaaaatttacaaagcacactaatgcttgggttccattcctactttcttcattagcccttctcaaacacggtggaagaatagggatggtcataccatctgagattagtcatgtaatgcacgctcaatcattgagaagctacttaggtcacgtttgctctaagattgtcatcattgaccctaaagagatttggtttgaagacacattacagggggccgttattctcttggcagagaaaaagcaatatccagatgaagcatcgcaaggtataggtattgttagtgttagtggttttgaattccttcaagaagatccaaacgttctatttaatgatacggcaggaataaatggtgaaacagttgaaggtaaatggactaaagcaacacttgatattgacgagcttcagctaattaaacgagtaattgctcatccagatgttcgtaaatttaaagatatagctaaagtcgatgtaggtattgtgacgggtgctaacaattattttcttgttgataatgaaacagttaagtcatataagttagaacgttttgctcaccctatgtttggcaggagccaacattgccccggcattatttatgatgagaagcagcacgttgaaaaccaggaaaatggtttaccaaccaatttcttatacatagatgaagagtttcaagatctttctaaaagtgtcaaaaattacatagagctaggtgaagcggaggaatatcacaaacgttataagtgccgtatacgtaagccttggttcaaggtcccatctgtatatagtacagagattggaatgttaaagcgttgccacgatgcaccacgcttaattcataacaaagttagagcatataccactgatactgcatatagagtttctacaacagttactagtgctgagaacttagtgtgtagttttttgaaccctataacggtcattacagccgaactcgaaggacgcttttacggcggtggcgttcttgaacttgttccatccgagatagaaaaactatatatccctatcgttgaaggattagaacataacgttgaagaactcaacctattgattaaagatggtcaaatagagagggtaattcgacaacaaggttcactaatcttagacaagcttggttttactcaagaagaaaatgaaaaacttgtagaaatatggaaaaagcttagagatagaaggctacgtaagtag

SEQ ID NO: 194405 - DNA, 2997 bp, Klebsiella oxytoca
atgaataaaaaagctcagctacaaagactaattgataaatacaaaaacgatattgattactatcgttctaccagatacaacgaaactcaactaagaacggattttttagatcaactattccttattctcggttgggacataacgaacgcagcaggaaaacccacaaacgaacgcgaagtgcttgtagaggaaggtttaaaagctcgagcaggcgaaaatactaaaaagccggactacacgtttagactcttctctgagcgtaaatttttccttgaagccaaaaagcctagtgttgatgtatcaactactatagagcctgctttacaagttagacgatacgggttcacagccaaattgaaaatttctgtgttgtcgaacttcgagtatacagcaatttatgactgttctaatcaggttaaagaaactgattcagtagcaaactctagaatcaagttatatcacttcactgaactcgtagataagtttgatgaaattaataaccttatcggtcgcgaaagtgtttacactggtcattttgacgatgaatggtcagaaattgaaaataagatactgagatttagcgttgatgatctattcctcaaacaaattaatgattggcgtttacttcttgcgaatgaatttttgcagatcaaagacgaacttccagaagaaaaattaaacgaccttgtacaaaattatattaacagtattgttttccttcgtgtctgtgaagacagagacttggaagaatacgaaactctttatcactttgcacaagataaggactttcaatctttagtcaaaaaattaaaatcttcagacaaaaaatataattcaggattattctcgctagaatatattgatgagttattaagcaatgctaactcttgcatttggagcatcatagaacaattatacttcccacaaagcacatactctttctctgtcttctcttctgatattttaggtaatatatatgaaatattcctgagtaagaaagttcgtgttgatgaattcggaaacgttaagattcaaccgaaagaggaacatatcgatagagacgttgttactactccaactcacattgtaaaagaaatcattagaaatactgtcgtagaatattgcaaaggcaagtcagatattgagatattaaattcaaaatttgctgatatcgcttgtggctcaggtgcttttattattgaggtattccaattcatccaagatatccttgttgattattatatacaaaatgacaaatctaaacttcaacaattatctgaacatacatacaaacttaaattcgaagtaaaaaaagaaattctatgtaaatgtatatatggtattgataaagactataacgcaacaaaagcttgtacctttggtttattgctaaagcttctcgaaggcgaaactaaagaaaccattggtaaaggcacacctattttgcctgcactggatatgaacatcctattcgggaatagcttgatagatagtggagacaaagttaaacaagaagatattttttcagttaatccatttgatttgcctaaccaccaatttgatgtgatcgttggaaaccctccttatatggcaactgagcatatgaatcagttaacgccaaaggaattagatatttacaagaggaaatataaatctgcttttaagcaattcgataaatactttttatttattgagcgttcaatgcaagttcttaaagaacatggctatttaggatatattcttccgtccaagttcataaaagtaggtgcagggaaaaaacttcgcaactttttatcagaaaacaaatatttgtctaaatttatttcctttggatctcatcaagtattcaagaataaaacaacttacacttgtttgttatttttaaataaagcaaatcacgataagttttctttttatgaagtaaaagacttcaagaaatggttaactcgtgaagataagtctctattatcaagtacacatcaaactagttctcttgattctgacacttgggttctagaaaagaaaacaaatgacattttgaagctaatgttttcaaaatctgaacagctaggcaacattgtaggaaaaagtaatgttgcaaatggcattcagacaagcgcaaataaatactatattcataaagaaatcaaatctgaaaatggttttatttattttgaatatgatggagttgaataccacattgaaaaagaattgacccgcccttacttcgaaacaaatcgttcgggtgatgatagtttctatacttataaagacgttgaacctaattcatttgttgtttatccatacaaaaaagtgggcgaaagaatccagtttattgaatacgatgaactaaaacgtcaatatcctaagttgtttgagttcctgcatgttgtaaaagtccatttaaatgataagaaacgctctattaagcctgatccaactggacctaatgaatggtacagatatggacgtagccaagcattagagaactgcgatgttgatcaaaagctgattgtcggtgttctatctaatgggtataagtacagcattgataatcatagaacttttgtttcttctggcggcactgcgggttatagcattatcaacgtccctaatgacgttagatactctatctattatatccaagcaatccttacatcaaagtatcttgagtggtttgcttcaatatatggtgagatttttagaggtggatttgttgctcgtgggacaaaggttcaaacgagaatgcctattcctactattgattttgatgatccaaaacagaaagaaatacatgataagatcagtttaaagcaacagtccttgaataaattgtatagcctaactcacaaatcaggtgatagagataaaatcatattcgaaaggcaatttgaacaagaaaaaatccaaatggatgatttgattaagaatctttttgacttgggggatttagattccgagattccgacagtagaagacctatacaaaagcctataa

SEQ ID NO: 194406 - DNA, 204 bp, Klebsiella oxytoca
atgaacggtataaaaacggggctggggatcacgcctggtgagcacattatcagtgcggcctcagctctcagcagaaatatcaggcattgttgctgtcttccccgtcgtggtccgttgattttgcggacagatgctcaggagacgtggttagagcacgatttacgtgccctgactgcgcaacagaaggtggcctggtgttgctga

SEQ ID NO: 194407 - DNA, 384 bp, Klebsiella oxytoca
atgtacgcaaaatcctttatcgctttcgacggtaatggtcgtctgaccggtgcccgtaccgcacagactgcgccatacgatcgttacacctgccacctctgtggcagttcactcaaataccacccgcaatacgacacggaacgtccctggtttgaacacaccgacgaagagctgactgaacacggccagcagtgtccttacgtcaggccggaacgcagggaagtgcaactgattaaacgtttacagccattcgtaccggatgccttacccgtagtgcgtaatgcccgctggcactgcagacaatgccgccacgattattatggggagcgatactgtacatattgccagaccgggggcttcagtgaggaggcagtgacaggatga

SEQ ID NO: 194408 - DNA, 570 bp, Klebsiella oxytoca
atgcaaaatagacctaaatgggaaacagactggtacctggaatctcttctgaacaaccatatcactgaaatggttgaccgctactcctgcctgcgggcaatacgggtcgatctgttctatcagcaccatactacgaaatatcatctgcaaaaccaccgccaacttgaaagggatcttcgagtgctaatggcgggaatgatgcaggttgaggttgtcgttggttttttctgggttatcgaatggaccgaagatcaccattaccacgcacacgtagctttctggctggatggcaaatacacacagaaaccctatctctgggctgagaaagctcgtgaactctggatgtcaattactgaaggtgatggctggtttcatcgctgtgagtttaaaacgcattaccgcgccaatatcaacatcccggtccactatagcgatgcggatagtatcgccaatatccgacaggtactggcgtatatgaccaaaatccagcaaaaacaggggataccattgtttggctgcaatgaagtaccaccgcgcccactgacaggacgaccacgacgtgaggtctga

SEQ ID NO: 194409 - DNA, 1323 bp, Klebsiella oxytoca
atgtatcctatcgcaatcgagttaagggtgagtaacaatcaactggatagttacctgcctgtacgcaataaaaacaacgatattagctggcaattcgtcaccggactggctcttagctacgccctgaaacgtaaaattgaagcctacgatcctgaccaattccgtgaagattgtaaaacacatctgcaggagctgcttgatgagcctgcgttctggtcggtgctggaacggatgtatttttccagtcaggatattttccgtgtctccccactttttttactgttccacgcccagtttaatggtgaaaaaataagtgcgggttcaacggcagataaacgacttggcacgctgtttgccaatttgatgggagatttcagcctccgttatcccatacaggacagactgaacttcattgagcagcaaatgctgaataagctcaatgaaaaaataaaattgctggggaaaggaccttttgccgaagagcaaccctatcttccgtatatggtcacgtgttttcagtccgatctggcgtttttggcggagcacccacaataccttttacaagaattgaccaacaccctacgtttgtacgcctttagctggtgcgctcaactggcgctcaatctggacaactggcaggacggcgagccacaaagcaaatcactattttttattcttgatagcgaaaaagccagctccgaacgggaaaaggtgaaacgttatggctataagctgtttgccagccagagcgaaaaactgttcccggtgctctctgcattggaggttttgcagtggggaaaaggacagaaaaaacgtccgttatggcagatttatcaagacactctgaatgattcagactcatctgcccgagtactaaatgaccttaatgtttatttgcaggattttattgtggatcgaggcctcccgcttcgtgaacgcgcaacaaacctggaaaatgccttcaaacagctattatccgttgccgtagagcaattccagggtaaaaaaactgaccgcgcgacggtaaatcgtaaatacgttaatgagctggaaaaccagatttgcactgacttcattcaggtgcgtggtcgggcagggaaagtgctggtgctgaatcaggatcgccttctgttgctgactaatctcaccgtgggcaaaaatgacaaactccgcctgcacgaactgctacgtggttttgaacagcgcggtttttatctggataaccagtcggcgcaaacgctggtggcgttttatgaacgcatgggaaatgtagagcgaatgagtgatagtggagacgccgtgtatgtccgtaaaacagtatga

SEQ ID NO: 194410 - DNA, 1791 bp, Klebsiella oxytoca
atgaacgttaaacctgagtatatgtcctttggagaattatttaaaaatagcaatattttttatacacctacatatcaaagggattattcatgggaagatgagcagattgaacaattttgtaatgatatacaagatgcattggtaaagaaaaaatcaaagaaaagttgcgaacatttctttggaggggttgtctgtgcgcaagaaaagacatttggaggacacagaaggatagagaatctattagttgatgggcaacaaagactatcaactatagtacttttcttttctgttattcgtaacgttattaattctcttaattgtgaggaagataaagattcagaatatagggcaatgattttaaaagatatttataaatatttttatcttgatgaaagagaaaatcgtgaaattaaaaaacatgtaagaattacaataggtaatgccgataatgagttctatcagtcattaattgacgataatccattaaaaggcactagaaattctcatgaattaatgctaagggctaggaaaaaattcaattcctttattaaggatgatttatttaaaaacagaaaaatctctgagtgcctggaaattatcgatgatatagtcaagttgtttgaagaatcttttttagtcattcatatagtaaccaatagtatcgatgacgcctacaaattgtttacagtgctaaatgatagaggcattaatttaactgaaggggaattgcttaaagcacacacaataggtatatgcagtgataatctttcgcatcagcgaactatttctgataattgggatgctatactcaaacacccatcaaagaaagtcaccgattatttgagatggattttaatcatgttgactggaaataatattacagcatcctctgttttagaggaatataaaaaaacggtctttaatgaactaattagtaaatcagaaatagctcagacagttgcttatattagagattgcgttgaacgtctggagtatatttcaagtggcgagtggccatttgaaaatgataatgataataaatggcataaaagtaaactggatcttcttatcaataaattaaaacatctgcatgcaatgccgttattattagctgcaagtttttcatctgagaataactttaaacatattgtaaatgaaacgagtaaatttttcattagatgtaaaatgattagcgacttacatgcaagtattttctctaaattatatgcagtgttagcactaagaatacataaagaacgtgatagatttgatattagtgagttacatggtgcttttaatgagatactcttggataaggaccctgaagatgtaaggtttagtactaatgttaggagtttgatttaccaaaagaaaggggataataaaccaataaaatgtttgttaatgactattcaggaaaattgggagtggttaaagcaaccgtgtcaaggtaatagcctaaatcggttgaagagagaagaccaaactgtaattttcgatttcaatagtatgactcttgaacatatatatccatactcagcgctacatgaggataaagatatggatatggaaaaattaaaaaataacattggaaatattgttctcttagatccatccaggaataataagaatgacaataaaccttttatagataagaaaaattcatttgaaaatacagggattggtattcactcatggatttatgaacaaaaggaatggaccgaagagtctgtgaaaaaacttactgagacgtatgttgatgctgccgtaaaagttttttctttctcttag

SEQ ID NO: 194411 - DNA, 519 bp, Klebsiella oxytoca
atgccgctctgcgctatgctcccgggggcggcgctcgacgcgccttgcccgggctacaggttcaccgccgtctgcgggccagtagcccggacagatgcgcagcatcgcctccgggaaattcagccactctgcgctatgctcccgggggcggcgctcgatgcgccttgcccgggctacgggttcacagcgttctgcgggccggcagcccggacagatgcgcagcatcgcctccgggaaactcagccactctgcgctatgctcccgggggcggcgctcgacgcgccttgcccgggctacaggttcaccgccgtctgcgggccggtagcccggatagatgcgcagcatcgccgccgggaaattcagccactctgcgctatgctcccgggggcggcgcttgatgcgccttgcccgggctacgggttcaccgccgtctgcgggccggtagcccggatagatgcgcagcatcgcctccgggagatgatgccgctttgcgcccggcaccgccgtctgcggcgctga

SEQ ID NO: 194412 - DNA, 1881 bp, Klebsiella oxytoca
atgagatcaaaattattaagtatatatgtcaagaacataggatgtatcgggcctgagggtgttcaggttaagcttgatgatatcctttgtcttgttggccccaataactccggaaaaacaacgatactcagggcttacgaactcgcatttaacccaaattctttcaatattagtaatgaccgatgtaattgggctactgctgaacaaccgtctgaggttatccttgatgttcatattccagaaggaatgggaaatgtagatgaaaaatggaagattgttgatggcgaaaagaggatagtcagaagttcatgggtctgggatgaaaccggaaaggctataaggaaaacatgggatcctcaattagataattgggcacctgatgggaaggctggtggagccgataatgttttcaaatctcggcttccaagaccaatgcgtataaaatcattagatgatgccataacgacagaagaagtattgcttacccttgccttaagccctttagtaaaggaaattaagacactggaaagtgataataactctcagatatccaaagataaagcggctctggcagctactgttaatgcactggcagggcctcatcaggaaagactttccagcatttctcagcaaatacaatctggatttcaaagtatctttccagggcttggcgtactactccatgtagaaatgattccacctgaactaaaaattgagaatttgctcaagcaaggatccggattattggttgaagaagctgctggccaatcccgaataggacaacaaggtacaggagcaaggagagctttattctgggcgatgttacaagttcataatgagatcagtcgacaaactgaaaaacgagatgcacttcttaagtctttaaatgaacaattaaagaaagagtgtaaaaaggatgcagaaagtgaggccgtaaaattacttaaccaccaaattgacgctataaaaaatggaggtgtaattccggaggatgccgaagatccagcattgccgggctacgtccttctgatggatgagccagaaaatgctttgcatccaatggcagcaagagctgcacaatcacacctttatgctctgggaaaacatcctgactggcaagtattattgactacgcactcaccttactttattaacccacttgaagaccatacgacaattgcacgtatgcaacgttcacctgatgggaaatcattatctccaaaattatatgtctcagatgaagccaacttttctgcagaagagaaagataatttacaggcattgcaactaaccgatataggttttgcagaaatattctttggcagttatccgattgttgtagagggtgatactgaacatgcggcatttatttctgcaatagtaaaaactcagcatgaaatggcaggaaagataagcattatccgggcgcggggtaaagccgttcttgtacctctaataaaaatgctacgccatttcaaaagcaactttgggatcgtgcatgatattgattggccatatcgcaaggatggttccgggaatggaatgtggactatcaatgagacaattcgcaacgaaataataagatgcagacaaaatggccatgttgtttatcatcgctggagcatccctgactttgaacgctttctgggaggaactgaacttggcaaagataaaccatattctgcttttcatcgcatatcatctgatgacgaacttaaggttaaagtacaaaatcttatatcaagcttattcaacggagatgattatgacccgataggtcatgatccgaacggagagtttatttctcagattttagcagagttaaatgtctgggccataaaaaataatcaacaacatagtatacgtataattggtgtctaa

SEQ ID NO: 194413 - DNA, 141 bp, Klebsiella oxytoca
atggatgtcgtgggtctgtacaatatttttctgctcctctctctgttatctttcgcaggtatgatggaaattattcccaacaaaggaataagggtgtttttttctgcgagctcagaggaggcaatggcgatgttatcctaa

SEQ ID NO: 194414 - DNA, 1059 bp, Klebsiella oxytoca
atgaaaaaattaattttaaaaattaacctatgtgtgtgtttttctctggctcagttcactcatgcggcacaattaactcccttcgctgatgaaaacagaaacttatggttgcgaatggaagggactcttgaaaatggggacgcgcagtcattcaacaactacattgaggaggcgaaggcgcaaaatctagaattttacggggttactttgatatccagtggtgggttattacaagaaggaaaagctattgcgaagctggtcagagacaacagaatgataacctacgttcccgataattcattgtgtgccagttcatgcttttgggtatttgctgcagggatacaccggtatgctggcaagcaaacttccatcggcgttcatagtgtagggcgaacaaatcaagaagaagatgaattaacaaaatcgaatacactggatatgattagggcatacgcagctctgggagtacctgatgatattgtcggtgcaacagcaaaaaccaaacccaatgagatacacttcctgaccagaagtgaaataaacgcaatggtgaacaaccctgcaccacccgaagaatttacaaattaccttatttcaacaaatcaatcagtagagacaacaaaattaattcaaacatccttaccatcagaagaatccaaaaactactcccgagacctcaatgagagagggattaatctcattcatacaggaaattacgatgaagcagtcaaagtattagaagaggctaaaaaacataataattttgacactgaagttttaggaaacttaggttacgcttattacaggaataatgacttaaaaaatgcacaggataacataacagcttcattaaaaatcaatgagacaagaagtgtatcctggggtaaccttggcgaaatcgttgcaaagcaaggaaatgttaagtgggcaatcgactgctttaataattatatttattactcaaaaaataaagagtctgcattaaggcacttaaatcgcctgacacagtctgagaatatttacttatcgatggccgcaagttcaataatcaataaataa

SEQ ID NO: 194415 - DNA, 207 bp, Klebsiella oxytoca
atgggcgaatttaccggattaaaagaagcctcagtggtgtgggagcttgcaggtaaaactgataatgaacccgtgtatcaggaaatgccacgaaccagtatgccactttcgggaacgctgagttatcacgtccgttctggcgggcacgatatcacgccttatgactggcaacagtttgttacctttgccgataagtttattaaataa

SEQ ID NO: 194416 - DNA, 348 bp, Klebsiella oxytoca
atgaatgtgacggaacaggcattgacgtgtttatccggaaagattttgagtaccggcatggttttcttaattatttcatgcagtgcttcccaggatgttcatgtgccggaggggaagtgtgacgccattgcagattatgacatcagtttctcccggtttgatgaaactgctcagcaactggcgcacgggacagggtgttttatcagggctgacctcagcaggacgtcccgggtcagggtaaatcccgttaaaggtagaatgactatccgggaagctctccataccgcgctcgcgggcacggtgctgaaagtgactgaacagcaggctgattcgatgacggtcagataa

SEQ ID NO: 194417 - DNA, 303 bp, Klebsiella oxytoca
atgagtaagttattgaatttttttctgctgtttgtcctggcattttcagcattcacttatgccggtcagagtgactcaggggacgggtacagactgcagtttacgaatgatgcgaacggtggagccgggcttgccggggaaaaggggcagcggggcatggatggttgccctggaggcacctctccctcctctgatggaagatactatctccccggtacacatgaggaatgcaatcccgggcataaaagctccccgcaccagaacagtcgtttatccgtggcgcagaattatgaaagggcctga

SEQ ID NO: 194418 - DNA, 693 bp, Klebsiella oxytoca
atgctgagtgcccgggagagcagaatggaaacctacgagcagatataccaggaactccgtaataacgataaatctgcctggaccggtgatggctatccccgggcatgggaaaaactgacagaaacgctcgattcactggccgccatgggccatttacctgagccggggagccatatcctggagctggggcgaggcaacggaatgatggcatccctgtggtttgcccggaaaggaaatcatgtctgtggcgtggacttttcgcccacagccattcactgggcgcaggaaaatttcgcagaacagaggatttcaggcgttttcttgcaaggtgatgtctgctcgctggtgcaactggaagataattgtttcgacctgatttttgacggctgttgcatgcactgcctgacgggaagccagcgtgaacaggcttacagccaggtcaaacgtttactcagggaaaacgggacgttcattatcagcagtatgtgtggtgagccaggatatgaggaggaccgccagcaatatgatgcgcgaagccatatcctttacagggaaggtaaaccatggcgaacactgatgccgctcaccctgttgcaaaatgaaatcatttcggcgggttttatcattcagtacataaaacttgaccacaatccatggtgggaccatgtgacgctggcagtaacacgacgttag

SEQ ID NO: 194419 - DNA, 627 bp, Klebsiella oxytoca
atgaccctccatattctgaatgcgcagaagaagctcaccgcccattctgagtggcttcgtatcagcctgactgatacttacgaacgatccaaaaggacaatgtggctcccttctctggatgttgtggttaaagccggaagttatgtcatcccggaaaaagggcacctcggatattgccctgagcccggtgttgtttatgtcactgttgatcctgaaaaccctgcattctgcaaaaatgacgctcagtcacttgaaaagatgtttgctcatgaactgcaccatgctgcgaggtgggcagaaccgggatacggactgacgctgggtgaggtgattgtatctgagggtcttgcagggcattttgctcttgagatttttgggggcgaacctgaactatgggaaagactcagcccggacattgttcaaccttacacttcactgatccatgaacactggcatcgcatggattacgatcacaatagatggtttttcggtacaggcgatttaccacggtggctgggttataccgtcgggttcaaccttgtttccagatatattgaaacagcccctcatcttcgggcttcattgcttgcaaacatacatgcagaagagttgaaagcttttatttaa

SEQ ID NO: 194420 - DNA, 870 bp, Klebsiella oxytoca
atggatttatctcagttgaaaatgtttaaaaccgtcgccgagcagggtagcattgccagagcatccgaaatactgcactgcgttccctcaaatatcacaaacagaatcaagctcctggaaacggaactgggtgtttctcttttcatccgcaaggggcgcggcctggtcatcacaccttcgggagaaatactgcttgagtacgccagcaaaatactgacttactgccaggaagcccgccgggcacttgagccctcatcagaacctgccgggatcctgcggatcggagcgattgaatctgccgcaacaggacggctaccgatggttctctcaaaattccaccagaactatcctgcagtccaggtgcagttcagtacagggacatggcaacagttagtcagtgatgtcgccgggcataaactcgattgcgctgttatcgcgacaaaggatgaccatccggatatcacttatgtgaatgctcaccaggaatcactggtattcattgcctctccttttacgggagagatctctgcccctcaggacctgaaaggtaaacggatttatatgtggccgcacgggtgtccttaccgacaggccctggagcgttgggtcaatcagcatcaggtcacggtcgatatcaccagcattgcaagctacggaactattcttggatgtgtcagctccggagccggtgtatcgctggtacctgctggcttttttgagcagttcaaaagaacaggaaatatcagggggtatacttttagcgagttatttcccgtacaaaattactttataaaaaatagcagaatagaccttcatcacgcacgtaatgcgtttgaaacgttattgcgtgctgaattaaacgatgtttga

SEQ ID NO: 194421 - DNA, 978 bp, Klebsiella oxytoca
atgacttccttatctttgcaaagttgtgataacaaatcgaaaaaatcttattctatgcaggaactgggtgatatattcatcgatggtttgcctgaacatatcgcaatgttaaaaattcctggtcgctggatagccggagatgttctcaggtcacccgtgcccgcgcgtattgatcatgtcaaagacattcagaatatgatgtatgacgttctttgtcatgagataacccaggaagcgcaggcttatgcggaagggacttttcttgcctttctgaaaaaggataaagttgatcccggtgtcctcagcttctttaacggctggaatgaaacgcacaaaacgacaagcctggtctccgggaaaataatcatgcgcctgtccgctgatgcactttatatttcacatgaagatcaggctatctatcataacgttctggctcatatgcatgaagtaacaaaagatgactttggacttggccagaaagggcatgacggaatgtataaatatatgacaaatgctttcagggccgcagcctgggttgatgatcaatataaaatcaatgagtgtaatgaattctctgatttcctctacaatactggcattgcaaaacataaatctgcaatgcgttctcctgaacatctgcagtctgttatggatgccatgatggtctctgtcgcttctgaactctggaacggacgcgaatacaattttcttgcccagtttatagaggagaaattattgtccttcaatgcgtcgttaaatgaggacactaaaactctgcgtaatgccaaaggttacgtcatgggccatgccggggaggtggaaaacaggcatggcttgcatgcgctggctgcgttacaggcctttggccgtattgcggggatgccattcgatacagaacgacttaaacatgccatgcttgattataacaggagagttggcgtcgctttttctgcattacaaaacgttctgactcactga

SEQ ID NO: 194422 - DNA, 765 bp, Klebsiella oxytoca
atgaatattgatatttctctttttgcactgggaggcttcgctttctgtggtggtctgatcgatgctgctgttggtggcggagggcttgttcaaattcctgcgcttattcatgctctacctggctccagtctggcaacgatttttggcaccaacaaactggcagttctgctagggaacgcattttctgtctcagggtatctccgacgggtaaagattatatggaagctcattattccagtaatgggcgctgcatttgttttttcattcgctggcgcatacactgtctctcttataccaagagagtttatggaatatctggtttttgtcgtccttattattatggcagtctatacgttcataaaaaaagatctgggacgactacatgctgatatcagaattggtctgaaagagatactgttggggatagtgttaggcgcttttatcggattctatgatggcatattcggagcaggcagcggaagtcttttattgtttgcctttgttaaatattttggttttgattttctgaatgcttctgcatcagccaaattaataaatcttgggacttttactgctgcactgcttttttttgtgccgtcagggaatgtgttgtggataaccggaggtatagtcggtatttgtaatgttgcaggggcgattacgggtgtatttttagccttgcggtatggcagtgggtttatcagagtttttttcctgatactattactgtttctcatcggacgaatgggggtttccattctctga

SEQ ID NO: 194423 - DNA, 330 bp, Klebsiella oxytoca
atgattaatcagctccgtctttatacaataaacccggatttacgtgatgaatttctggcaagatttgaaaaacatgctgccagaatcatgagggataagtatggttttaatatactggctatgtggttatccggtgaaagtgccagactccggtttatatacctgctttcatggacagacaaaacaaccatgaacaactcatgggcagaatttatggcagatgaagaatggcgcacgattaaaaaacaattctgggaaaccacgtctgaacccgtattatctatagaggatattgtgctggaagcggctgggttttcatctccattataa

SEQ ID NO: 194424 - DNA, 1359 bp, Klebsiella oxytoca
atgaaaggtccggtcaccgtcacgcatgaacgacatcagttcgttgtcctggtcacgctctgtgtcgggatgtttatggccattctggatgtgaatgtgattaatattgccaccatcagcatccgctccgaattccatgcgtcggtttccgccataacctgggcggtggatgcgtataatctgtcgctttgtggcctgatgttgtcgggaggcacgctggctgaccgctatggttcccgccgcatctggttatccgggcttgtcctgtttacctgcgcctcactcgggtgtggcatgagcatggcaatgtggcagttgattctcttccgcattctccagggcgctggtgcagcgttgtttattccggcctctttctctcttttatcagcgggctggcccgacaggcacgcacgacaacaggccatcggcatgtttggcggtctggtgtccgttgcggcggcggcaggcccggtgcttggcggtgttctggtgggggatttcggctggcgcagcatctttctcatcaatctgcctgtgggcctgtacggcatctgttccggttacaggctgctgcctgctgccttgccatcccgtttacgggcgctggatttcaccggccaggttctggcgatggccaccctgggctgtctgagctgggtcctgatacagctcccggaacaggaatggggccagagtgcgctgccgttaatggcgctggcatcactgttatgcgcgggaggttttgtcatggtggagcgcaggagtgcgtcgcccatgctgccgttagcgttttttcgcagcccggcatttaatctcgccaacctcagcggcttttttatcaacgtctgttattttggcagcctgtatgcgctcagccttattctgcaacagtactggcattacacgccttttcagtccggtatggcgcttctgccgctggcattttttctctttgtcggcaatctgtccgccgggcggttaatgcggcgctggggaataaaaaaacaaatggtcacaggccttctcgcaggcagcgcgggttatgcaggaatgatattgctaaacggacagataaccctgctggtctttatctcaatggccctgctcgcaggtggcgtggcgtttgccgtaccgcccatgaccgcagccgtactggcaggcagaacgcaggacacagcgggtaccgcctccgccatccacaccactttccggcagacaggctccctggtgggcattgcgctggccgggctgatattctcatgcacacaacaccccataactgtactgatgggcctgtccgcgctggtccatctgcttctggcactgatgaatgccgtgatgcatccagaggttacttaa

SEQ ID NO: 194425 - DNA, 870 bp, Klebsiella oxytoca
atgaactgggataatattcgttacctgctggcggtcgcccgcacaggaagtttacgggctgctgctgtcagcctgaatgtggaccaggccacggtggcccgccgcctgcgccacatggaagaggagctcaacaccgctttattcagccggtctccggaaggttaccgtctgacggaatacggggaacgactgttgccggatattgagcagatggaagccacggcggcaataatagaacgtaaaagcgcaggaatgaacgcatccctggcaggaaaagtccatattgcttcgacggattcgctgggcagatgttttatcctgcccgcactgtcagccctcaggcaacgacaccccgacattcaggtaacgctttccacctctcctgagattgtggatatccggcggggggccgccgacctggcagtacgcagcgcccgtccggcagacggcagtttaatcatccgccgtctggcaaccttccatacgggtttatatgcgtctcaggaatatgttgcccgacgcggtctgcctgtaaccggcagtgcgttttccggccatgacctggtgatgtttcccgagacgtctgttccgcagtactggcagcagctgtgcgaggagccgctgacaaacggacatattgtgctggaggcaacgtcccagtggctgtttattgaagcgctgcgccaggggctgggcgtgggtatgatggccaaagaaatagtgcagcgatgctgtcctgaactggtcaatgtcatgcctgcgcgcagcgagccagccgatatctggctggtcgtcaatccggatgtctggtcagcggagcgcattcaggcagtcatcgcggcaatcagtactgcttttgaggatatctga

SEQ ID NO: 194426 - DNA, 945 bp, Klebsiella oxytoca
atgtccatttccctgcataaccagactaccgcccctaaccccgcagcggcgaccagcgtatcgtcgctggagcgctcaggctcctcaaaaacgaaaggggttaaaaaccggactgatatttatcagaccgttaccgacagcatcattaccgcactcgaagccggagtgaagccctgggtgtgtccgtggcagcgtgtagcaggcatgtccggattaccttccaattacgccactggcgcggcttatagtgggatgaatatcatgttgttgtggtgcagtgcgtcagaacagggtttcagcgattcccgctggatgacctacaaacaggcactggcagcaggcggacaggttcgcaggggtgagcacggcacgaccgccattttttacaccacgctggagaaggaaaatgacgacggagaaactgattatatcccaatgctgaagacgttcatcgtgtttaacgttgaacaaattgacggtttgcctctgacaacggaaacaatcagcccggaagcaacctttgaccctttgccgcaggctgaaaatctgttccggaagagcggcgcaaatatcgttgagaaaggacaaaacgcctttttcagcccctcaaacgatgaggtctggctgccggagcgtcaccttttttttgatgctgctaatttctacgccaccggcctgcatgagctggtgcactggagcggtggtaaaagccgcctgaaccgtgaaatgaaaggaaggttcggcagtgaggtgtatgcatttgaggagttgatcgccgagctgggaagtgcgttcctgatggcggatctggggattgacggagaggttcagcatgaaagttatattgcgtcatggttgaaagcactgaaaaacgacaagcgttatatcttcaaagctgccagcgcggcatctaaagcgcaccgttatctgatggataaggtctga

SEQ ID NO: 194427 - DNA, 633 bp, Klebsiella oxytoca
gtgacaattgtgactatagagtactggtttgcttttctttctgctgcattgctgataaatattacaccgggtcctgatcttttgttcattttatcaaaatccagtcgttccggaagattgtctgctttttggggggcggtcggtctatggactgcggcgctgacacacgtcagtgctgttgcaattggactctctgccattattttcgcctcccagacaatgttcacacttatcaaatatacaggtgctgcatatttgatatggctcggtattaaattattttttagttcacaggatttattgatccctgcgcaaatcaaagagggacgcttaaaaagttttgccagtggttttttagttaatatttcaaatcctaaagcagccctcttttttatggcctttttacctatgtttgtacagagtgatgatgcacatccgcagatccagatgttcattcttggcatattagttgtacttgttaaagtactgatagaattactgttaatattctgttcaagttatatttctggatttttcgcaagacaccaaaactcaggtaagatagtgagcagagtttcttctcttttttttatcggttttggtttgcaacttatcattttaagaagaccttag

SEQ ID NO: 194428 - DNA, 1143 bp, Klebsiella oxytoca
atgcacagcaagaaaaatgtattattaacaggtgcgacgggtttcattggttcatatctgctggctgatcttctggagaataaagatatcgggaggatttatattctttcccggaaagtggataaaaataatgaaaaggaaagattgttcaccgcatttgaaaaattttcggtgccaggccatgaacaactggcagcggcaaccaatatatcagtcattgaaggcgatattacgcagccccgtctgggtatatccgatgcagcttttgaagaactctgttcagaggtggatgttattcaccatattgcggcacgtgtcaatcacatccgaccatatgaagtgctaaaagcgcccaatgtggacagtgtcgcagatatcatcagcatcgctcagaaaggtcgcgataaaatcgttaattttgtttcaacgttagggtctgcggctaaaaaggataaggatggtcgttatgttgaggcctttccgggtaatgccgttcttaactctgacatggggtatttgctttcgaaatgggaatctgagcgtcttctggagaaatttcaggatcagggtggaaaagttaatcttttccggctcggttatatttcaggtcacagccatacaggtgcttcgctttttaccgataaccaatttatgctgtttatcaaaagctgcattcaactgggttacgccccggttctccccagaatgattaatttcactcctgtcgattacaccaccgccatcatggctcaacccaagtatatgtcagaagggggagatgttctcaatctgtttaactattccggacttatcagctgggaagacattgtttcatggctgaacttacgtgggtataaaattgagactacggagttttatgattggcagaaaaaatttttggcggataatgaaagtaatgcactgtttcgttttcttccactttatggcgttgacggctctcatgataagatcctcaggtttggccgtgaaattgataagtttgatttccataatacgatggcggcgactgagcgcctggcctataaattacctgctttgagatacgaattactggatacatatttaaggtatttacagtcagttgattttttacccgtacctcacgctgtaaatgctgcttaa

SEQ ID NO: 194429 - DNA, 1182 bp, Klebsiella oxytoca
atggaaagaacacaaagtagttattttgcactggcttgtctgtgtgcttttgctgttgccaatatttattataatcagcccttacttgaactctttgcaaaagatttcgcggttgatgaaaaacatgccggttctgttgcgatgtttgtacaactatcttatgcagcaggtcttgttttcttcgtgccattgggcgaccggtttgaacgcaggaaactgcttattattttattgggcattaatgctgctgcttcggcagcggcctctttcacgcaaacgattggacagctacttactgtaaatattgtcattggcatgacatcggttggtgcacagattgtcattccgatggtatccctgatagctcctgcggaacaaagaggacgtgcagttggaaccgtgatgagcggattaatggctggtgtcctgtttggcaggatcctgtccggatttgtcggcaattattttggatggcggtcgatgtatcttgtggctactactctggatctttttttgcttattatggttcccaggcttttaccacacagtaaaacggcggcatcacagctcccctatcatttattgctgaaatcacttatcaccttttttataaaagaaggtgatctcagactatcatgtttttgtggggcaatgatgtttggcgggttcagcgcattatggggggggcttgcatttttacttgcgcgaccaccttaccattatggcagtgatattgtcggcagttttgggtttgcaggaattgccgggattcttgccacaccttatatagggaaaatggctgaccgttacagtccacgtattgttgtattagtgggaagtgtgattgcattactgggttttatctctgtcttcttttctcctcattatctgtttgcgttaattgttgctcttgttcttctcgatatcgggggacgggcggggcttgtgggaaaccagctgagagcgctggcattatccgaagaaggaaggagtcgtttaaatacagtatttatgtgctcttattttatcggtggtgctgtcggaacccgtgcgggggctgagatcagtgtccggtacggatggaccgggatcactgtaatgggatttattctttcctgttttgtcctgtttctgaatataagacaagcgaatacgaataaaaatactgatgctctggcctga

SEQ ID NO: 194430 - DNA, 1203 bp, Klebsiella oxytoca
atgatgaatgcctatatttgtgatgccgttcgtaccccttttgggcgttatggtggagccctttcctctgtacgggccgatgatcttgcagcgctgacgatttctgccattatggaaagaaatccggccatcaatttcagcaatattgatgatgttattttaggttgtgcgaatcaggccggtgaggataaccggaatgtcgcccgcatggctcttctgctggctggcctgcctgccagtgttccgggtacaacaataaaccggttatgcggctccagtcttgatgccattgcggtagcggcgcgggcaatcaaatccggtgaagtcaatcttattattgccgggggagtggaaaatatgagtcgtgcgccgtatgttttaggtaagtcagacaaagctttctcgcgaaatttgaacatcgaagatacaacaatgggatggcgattcattaatcctgaaatgaaagctcgttatggcgtggatacaatgcctgaaacggctgagaatgttgcccgccagtttggcatttcccgtgaacaacaggatttgtttgctctgaccagccagaggcgggtatcagatgcttatcgtaacgggatttttaacgatgagattattcccgtcaccttacctcagaaaaataaagataatattatcttcaataaggatgaacatccacgggaaaccacggcagaggcattatcccgtctcaggggggttgtgacagcagatggtacgatcactgcgggtaacgcatcagggatcaacgacggcgcgggagcgttattaatcagcagtgaaaccgggttgtccgaatattctctttcgccaaaagcgaggattctggcatcggcagttgtgggcgtagagccaaggatcatgggagttggcccggtttcagccgtcaggaaagttcttgaactgacagggctcaccatcgaccagatggatgtgatagagatcaatgaagcgtttgcagctcaggcgctggcagtgatgaaacaactggatattgacgttaatgatgaacggattaatcccaacggaggagcaatagcgctcggacatccgctgggggcaagcggtgcaaggcttgttatgacggcctgctatcaactgcaaagaacaaaggggcgctatgcactttgcacaatgtgtattggtgtcggtcaggggattgccgttatcatcgaacgaatttag

SEQ ID NO: 194431 - DNA, 891 bp, Klebsiella oxytoca
atggatatttaccgttatacagaaaacctttctttgtttgttgaaatagcaagatgtggttcattttcagcggtcgcacgccgccacggcgtaaacccgtcatccatcatgcgaaaaattgatatgcttgaagcggtcatgaaagcccccctcttcacacgaagcacccgtggcattcatttaacagaaatcggcgatgcattgtttacccgtgcagtgggggtacttgaagcgctcaatgatatgcgtgatgaaatcgtttctttaaatgaagaagtgacagggacattgcgtatcagttgtttgccgacttttgcaaaactccatattttcccctggctaccagaatttaaatctcattatcctgatgtggatcttgttctggatcttacagagcaacttgaaatcccatcaatagaacgccttgatgcagcggttcgcattggtaaactaaaaaacagctcactgtatgcgacaaaaatagcgcaccagacctggattgcctgcgcaagccctcgttatattgagcaatatggggtgcccggtggcccgactgaactccccggccaccatattctggacaaatatcatgatccacactccatttcatggagtcgtattatcgacactcagggaggagagtatcgcttatatatgcgttgcaatgatttcgaagctctgctaaaagcagccatttcaggattagggatcgtctttctgcccaactgggttgtgggacaggatattaaagctggcaggctggtcaatatatttgatgacccgcagcagaaagttgacgatatccattttttgcgtgcgcttcccagaatgacacccaaactggctgcttttttacaatttttgcgtgataatcttacggctgttatttag

SEQ ID NO: 194432 - DNA, 756 bp, Klebsiella oxytoca
atgcgttatgcggttcatcaggggttaatcgacagtaacccggcggcaaaccttgacggcgtgacgacaccgcccgtcagacaccactatcctgccctgcaactggagcgccttcctgaactgcttgaacggattgacggttatcaccagggacgggaactcacccggcttgccgtcctgctgacgttacatgtgttcattcgctccagtgaactgcgttttgcccgctggtcagagattgatttcaggaaccgggtctggacgatacccgggacacgcgaagccattgcaggcgtacgttattccgggcgaggtgccaaaatgcggacaccgcatatcgtgccactttcagaacaggccgtcgccattctgaaaaagataaaggagatttccggtgatggtgaactggttttccccggcgaccataatccgtacaaaccgatgtgcgaaaacaccgtgaacaaggcactgcgcctgatgggatatgacacgaaacaggatatctgcggacacggcttccgtgcaattgcatgcagtgccctgatggaatccggtttatggtcgcaggatgcggtagagcgccagatgagccatcaggaacgcaacaccgtgcgtctggcttatatccacaaagcggaacatctggaagcccgtaaggcgatgatgcagtggtggtcggattatctggatacctgccgggaagcatatgtgccaccgtatatccagggtcaggaagacagccacaaagcggcataa

SEQ ID NO: 194433 - DNA, 1767 bp, Klebsiella oxytoca
atggcggtggaaaagctgattgtcgaccatatcgatacctggaccacggcgctgcaaacccgctctacggcccggcgcggcagcacgggcaagattgacctgtacggcatcaagaagctgcgcgagctgatcctggagctggcggtgcgcggcaagctcgtgccgcaggatccgaacgacgaaccggcgtcggaattgctcaaacgtattgcggcggaaaaagccgagctggtgaagcaggggaaaattaaaaaacagaaacccttgccggagattagcgaggaagagaagccgtttgagctgccggaagggtgggaatgggtaacactggcgaccgtaggtgaaatagtcggtggaggtacgccaaagtcagataatccacaatactgggccaaaaatggtattaagtggcttactccggcagacctatatgggctcaaagggaagtacatttcgtctggagcccgtgatatttcacccgcaggactgtcaaactcatcagctaggttaatgccaaaagggagtgtacttttctctagccgagcaccaattggatatgtcgcgatagccgatgcagaactatcaacaaaccaaggttttaaatcttgtgttccatatatcaaagatagtgcagaatatatatattacttcctactggcatcagcaaaaaaaatagatgcagaggcaagtggtactacatttaaagaagtatcaggggcaattgtatcgaaaatattatttcctttgccaccattgagtgaacaactgaaaatcgtctcaagggcaaatgaacttatggccctctgcgaccaactggaacagcactccctgaccagcctggacgcccatcagcagctggttgaaaccctgctgaccacgctaaccgacagccagaacgccaatgaactggccgaaaactgggcgcgtatcagcgaacatttcgacacgctgtttaccaccgaagccagcattgacgccttaaaacagaccattctgcaactggcggtgatgggcaaactggtgccgcaggatccgaacgacgaaccagcctctgaactgctcaaacgtattgcgcaggaaaaagcgcaactggtgaaagacgggaaaatgaaaaagcaaaaaccgttgccaccgattagtgatgaagaaaaaccgtttgaactgccgaatggatgggaatgggttaaattgggaaatatactccatgatataaaatatggaacttctcaaaaatgtgattataatatttcaggttatcctgttctaagaattcctaatattgtaaaaggcattatcgatcttgccgatataaagtatggcgcattaaccgattctgaactgaaagatcttacactgaatgaaaatgatcttttatttataaggtctaatggcagcactaatatagtcggccaaagtacattagttcaacaagatctaaaagatcatgcttatgccggctatataattagagtgcgactacataacaaatatattaatgctacatacataaacatgataatgaaatcaaatttaatacgcgagcaaattgaaggtcctattagaacaactacaggtgtcaaaaacattaattcaaatgaacttatgggacttcttgtacctcttccaccaaaaaatgaacaagggataatcattaaaaaaattagtgagatagatacgactatatctaatttgaaagttaacatccaatctgcccaacaaacccagctccacctggccgacgctctcaccgacgccgccatcaattaa

SEQ ID NO: 194434 - DNA, 174 bp, Klebsiella oxytoca
atgttcccggctcacgctgcgtttagccgggccacccgagcgcacgggccggtagcccggacaaggcgcgtcaagcgccgcctccggggaaacaacgcgcaatacagcctccacttttccccggctcgcgctgcgctgaccgggctacgggttcccgggctcgcgctgcgctga

SEQ ID NO: 194435 - DNA, 1287 bp, Klebsiella oxytoca
atgaatccactcgatcgcgcccgtgcgctcttttacaaaaatatcgaggcgatgaaaaccgccaccccggccattcgggccgaactggaacgggagaacaagaagctgggggaggagatttccaggctggccaacgaggcagagtttcaggcccgcaatgagggcaacagcagcaatgcttccccgcattttttctccaccagtgcgcccgggcggctgactccgccggccgctgtcatcccgggcgatcaggatcagcgctcaatgttgacggtgattggtaatattctgacggcggtgagccgggatgatgccgtgcagcttggcaccgttccgggtaaagaagtcattgccatctacagcgaggtcacgcccacaccggcgctgacgggcgagctggcgggcagccacagcacggattttctgacaaaaattaatgtcctccccgttactgatcaggaaggggagcgggttcttgtcggcaccggcggccctctggctcatatcaataattcagggcgccgcaatccgcagaatgcggcatcactcgaaccgcatcgctaccagtgcaaaaaggtgaatctcgacgtcagcattccttatgccgaccttgaatcatgggcgacggttgaaaattatcccgaactggtaaaggcggccattgaccgccagagagcgctggatcgccttctggttggttttaatggcacccattactccgatccctccgacgccagcgcttatccaaagcgccaggattgcggggtcggctggctggagaaataccgacaggaagcacctcaacgagttatcagcggcctctcagttgccggccgcgatgagagcaacaaaattattgcttcaggagattacggtaccattgacgcccttgcgctggatggctggcagtcggcgatagcggagcagtacaggaacggtctggtgtcaatttgtagcgctgagacgctgtttcgcaaggagtggccttttgtacgtcacctctcgccagaccggccaaactacgagcggctgattaatgacattatgctcaagaaccccaccattggcgggcttccggccgttgtggtgccgttctttcccgacgatgctgtatgggtgacgaccctgagcaatatttcgctgtactggcaaaagaacggcgtcaggaagcaggcgaaagacgagccggaatataaccgtctggcgatgtatgaatcgcgcaatgatgcctacatggtggaaaactacgaggcaggatgcctgattgacggtatcgactggcgctga

SEQ ID NO: 194436 - DNA, 735 bp, Klebsiella oxytoca
atgagcattgacaagaaaatcaccgcactggcgggaaatattgatgaaaagcgagcttttttcgaaggctgcaatgccgcactcgttgaaaaacaaactacgctcaaaaatctgctgactacccgtgagagcctgaaagcagaagcccatcaccagtcggatgagtgggagcataaccttctggcatcagggggggttgaaacggaggcatcagacaccaccacgttcctttccggtatggcgatacagaagctggagcgcattaacccactgattgagaaggctcaggctgagctgattaccgcccggtttgatgcagggaaagccgcgcttgaatatatcaaccagcataaggagctgcgcgctctggttattgagcctgagtgtcgggcgttactgggtagtctgcggcccgtgctggaaattgcctgggggcttcattgcatgacgcagggcatggactatgagtttgataacatgctgaaagacgtgctcaatgacgtcaaaaaaaacgacaattcacaccctgccgaacagcatcttcagtccgcctccggggatgccgaaacgccactttcgttgttccccggcccggtaccctcagtgatgaaagagattattcgccggtcgccttccgccgcgcaaatggctatggcgcgtaccagtccgcagaaaatgcaggcgctggccgatggccgcgagccgtgtaaaggcctgagccaagggggggcttaa

SEQ ID NO: 194437 - DNA, 252 bp, Klebsiella oxytoca
atgaaaagcccgcccagaaatgaaaagtcgatactacgcagcctgcgcatcccgcatgagatcgataaggcaatccatcacgcgtcagttgctaatgcctgcagctattccgcctgcctgattgagttgattcggatgggactgaggaacgcccacgccgcaacaccttacggtgtatctgagcgggagcgtatggctgaagagatgataacgaggattaaaggagctgctcagggtcggcgccgggcttaa

SEQ ID NO: 194438 - DNA, 564 bp, Klebsiella oxytoca
atgcaaaaaagtgcacaattttgcacaatttttgaaacgtcgcttttactacgcagcgccagcactggcggggcctgggcggtctgcacaaactgcacaaaaagaggcatgtttagcgcgcaggcgaggcgggggagcaagcgcgcgctttggggggcagggcagggatcgacatacctcgccaaaagctgctggacgaacacgaactttcgcagagcatcaggtgaacgcgcaggaaaaagcccgccagaatggcgtaggctgcgtctggttcgggatatgacgcggaggtgttgcggattggccgatacagccagaaatgatggtgctgcagctcagtaccacacaaccagaaatggtgatgtggtgggaggagttgccccccctgagcaattagcgataatggtgctgagtctaactccctgtggggagaatttatgtttacctgtcctcattgcgggcataccgcccacacacgtaccagccgccgcctcagtgattacactgtacgacagtaccaccagtgccagaaccttgaatgcagtgcagcttttaccacgctaa

SEQ ID NO: 194439 - DNA, 1350 bp, Klebsiella oxytoca
atgagaatgaccgcagcaataaattcattttctgatggctttagcgaaagcgatgacattttcaatcgaaagaaactgcatgatacaattatcagagtggcaacaaacgcacctgattcgagcctagttttagcacttaatgataagtgggggaatggcaagacatcatttgtcaaaatgatgtcttcagaaatcaaaaaaagccactcagaacagtttgacgttatttattttgatgctttcgaaagtgattaccaatcagacccttttattgctttaacatcaaaaatttactcattaataaaaaatgaagattcaaagcttaaaggattgggacaagagttgttattaataggtaagaaactaggcgcttcatttgccctgaatggcgctagatttgccgtaagctcactgacaagtgggttagtctcaggcacttcgctggataaatttggtaacaacatctcagaggcccttacgtctccaattgaggattatatagagcagaaaataaaaaccagtgaaaatgagttagccacaatacaacaattcagtgacgtattaactaaaatacataaggaaacttccaaaaaaataattttcatagttgatgaacttgatcgcgcccgtcccgacttcgccttagatttgttagaaaaaataaaacatatattctccgttgagggattcatatttttgcttgtaattaatcgcgaacagtttgaacggagtattgaatgtcgatacgggaatataaatgcacgactctaccttaataagttcatacattactggtttaccctacccaaaaaaaatctcttcactgaaacatgtttgaatggatatgaacaatcaaccatagctcgacatcttttatctctagatcgtgggaataatttattatctagaaacggaaaacttgtcaacaccctatcttaccttttggaaagcaatgactgctcactgcgtgaagcagagaggtgctattctgttttctctgtcatggctcgccccgatgaaatacttggatataatatagagatatttcttgttgcttttggcatggtttcttttttgaaggtatgtaatgagtctcttcttaatgatattgcatacaaaagaataaatcttgaagaatccttaatcaggctgtccattaataacgcacctgaaataactgaaacattatatattgcaatgctactaagataccacttcgccacagacaaggaactctccgaaccagaaatggcaagggaatatgcctttatgactggcatgccaggaaggcgtatcagatggcttgaaacaatgtatgagaaaattgaaggatttacagtttcaaattag

SEQ ID NO: 194440 - DNA, 978 bp, Klebsiella oxytoca
atgtctattaaaaaattgcctgatggtcagtataaggttgatatcagaccttatggatatgccgggcgtcgcatccgcaaggtattcgaaagaaaggcagaggctatcgcttttgagcgctatacgatagttaatgccagtcaaaaagaatggtcaggacgaagaagcgaccggcgtcacctgagtgttctggcggaggcatggtggaggtattacggccagactctcgataacggtaaaaaggaatttaaccaccttaacaagacgataaatggcctgggcgatcctgttgttagccgcctgaataaaagggggttgatggattacagggcgcgacgcctcgccgctggcatcaaggcatccacgattaatcgggagatatatcgcctttccggtatgtttacccggctaatacagatcgatgagttttccgggagcaatccggtaaaggggatgccgcctctggcggaagaaaatcccgagatgacgtttctggaacagagggagatcagcagcttgctgaaggtgctggagggagattgcctgctgatcgctctgctctgcctgagtacaggtggtcgctggggagaggttgctacgctcaggccttcaaatattgtcaattgccgcgtcacgttcctgaagaccaagaacgggaaaaagcggacggtgccgatctctgaagagatggaaaataaggtgaaaaaagaggccagcggaaagctgttcaaagttgactatgagaagttctgcaaaatattgcgtcaggttaagcctgatatcccggcgaatcaggcaacgcatattcttcgccatactttcgccagtcacttcatgatgaacggcggaaatattattgcgctacagcagatcctggggcatgcgaatatccagcaaacgatggtctacgctcatttatcacctgaatacctggccgatgcggtaaggcttggccctgtgtcagagctggatctttga

SEQ ID NO: 194441 - DNA, 2664 bp, Klebsiella oxytoca
atgaagaatatcaaagtatcagaaattagcaagcagtctgtggggaagtgggattacattctgcatactcttggaataaaaattcccgaaaacgggaagcacggcccctgccctaaatgcggagggaaagatcgcttccgttttgataataaagacgggcgcggaacgtggttctgtaatcactgcggaaatggtgatggcattgatatcgtgaagctggtttttgatattgatactgtacccgctgcggctcgcgtggctgaatgtctgccgtccgcacctgtagttaatgcccccgccagaaaagatgctgcaaaacagatggcggtgaactggcctgcgctcctgagccagtcggtaacaggtgaaagtccctatctggcaggcaaaggactggccggtcatgcgtccagactgacaacaagagaaatgacggtcgggggtgaaaaatacccgtctggctcccttatgctgccggttaaaaacacgcaggggaacattaccgggatacagcttatcagcgctaatggcgtcaagaacctgatgaaagggtctaaatattccggctgctttattccggttagcgattttccggaaggcacgcccgaaaaagtcgttattgcagagggctacgctacggctgtttccgtttcgctgctcagtgatgcgtggccgctggcggcactgtcaaaaactaatctcagggcggcggcagaggccgtgcgggaaaagtggcctgaaacgcagatcattattgccggtgacaatgatttcatggacggcaagcccaatgaagggcgggaagtggcaatcaaagcggcgctcgccgtaaaaggctgggtcagtattccccccggcagagcaaaagcagactgggatgattatcgccatgattttggtgtacagcgggcgcgggagtcctttgctgaagaaatgtttaatccgggtgatacggaaacccgcctgcctccaggcttcaggctgacgaaagaatttctgtggtgtgagcgtacccgtaatgacggaagcgaaagcggccaggtacagcagataaagatttgcagcccgctgaaagtaacagcgattacctgcgacgctgatgggggtaatttcgggcgtcttcttgagtgggatgattccaacggctctcgtcacgaatgggccatgcccatgacggtactggctggtgccggtcaggatctgcgcgaagtactgcttgaaaatggccttcactttatcagcgtgaacggttccgcccgagggttactgatggagtatatcgccacctgtcggccggtgcgtaaagtcacctgtgtggagaaaacgggctggtacggtggctcttatgtactcaacggcgaggtgattggcggtgaaacgggatcggtcatttttcaggcggcccggtcatcaaaaaatgatttcagggtcagcggcgacacccgcgagtggatgaagcatgtaggccgttactgtgcgggtaactcccgcctggttttttgcgtgagtctggcatttgccgcccccctgctgacgttgctggggatgggcgggggtgggtatcacctcaagggtgaatccaccgatggtaaaaccaccacaatgaaagttgccgcttctgtctgtggtgggcccgattactggaaaacgtggcgtgcgacggggaacgcgctggagggaatagcgctacgccgcaatgacgccgtgctgatgctcgacgaaatcagcgaggttgacggtaaagaggccagccgtattgcttacatgctgggtaacggccagggtaaggcaagggcgagggtggacggaagcccgcgtgaacaggcgcagtggacgcttttgtttctctccactggcgaggtctccattgccgagcatgcagccgaggcgggcgaacgtcgcactggtgccggggttggggtcaggatggtgcagatccccagcaatacaggccagttcggtgcctttgaggagctgcacggattcggtgggggtaaagcctttgctgagcaccttgagcaggcgagcaggcaatatcatggtgcagtgttccgtgactggctgcgctggctgacggctaacctcaacacggtaacggagcgggccagggttttacgcaaaaaatatgagaaaacgcttctgcctgaaaatgccggtaatcaggtgggtcgtgtggttgaccgttttgccctgctggctgttgcgggtgagctggcaactgaagctggtataactggctgggaacctggcgaggctgagcgcgcagccagaaaatgccttgatgcgtggatacaggaccgcggacacaccgccaaccaggaagatgccgacgcgctggagaaagtgagacgatttatcaccatgaaccagtacacccgttttgccgagtgggaagaaagcgaaaagaaccggcccgctaacatggtgggttttcgccatgtcattaaaggcaataacaatacggaaccagatactaagtactacattctctccagcggctggaaagagatttgcggtacgtctgatacggtgaaaactgcccgcttgtgtagcgaggcggggtggctggatacggatgacggaaagcgactccagcgcaaggtaaggttgccggagattggttccaaatgggtatacgtgtttaaaagtgatgttgtgggttga

SEQ ID NO: 194442 - DNA, 252 bp, Klebsiella oxytoca
atgaaaactaataatcgtattcataacgtcaacccatctcacctcagtatcgagagttatcataaactgaatcgcgcgagtaatgtcgcgttccagatgcatttacatattcgtcggtgtgaggttaatgcagcgccacttttatggattccggatatttttagttatatcagtcaggatgttttcgatgttttacaggaagtgaagtctatgggtatttgtaatgattttctggataagaaatcggggtga

SEQ ID NO: 194443 - DNA, 231 bp, Klebsiella oxytoca
atggctaacatttttcgcggcaaagtgacacgtaataaaacatatcttgtttccggttatgcggtaacgccaaaaggttatacgcgaagtgcagaggtaatcgtagaggcgcttaatcgtgatgaggcgataataagggcaagcgctcaattacgctgggaggggttaacgcactttaaggcgcttaaggtgctggatataaccacaccactaatcagcaagctgcactga

SEQ ID NO: 194444 - DNA, 195 bp, Klebsiella oxytoca
atgtatgagattcatgtaaaagccaggaatgtaatcaccggagaaatcaacttttaccgtcattcaaaaaaatataattcgccgggtaaagcgttcaaagcagccagaaggcttattgatggcattacctttaatggacgttatttagacgataacgaatatacggtgacggttgggaaggtgaaacatggctaa

SEQ ID NO: 194445 - DNA, 192 bp, Klebsiella oxytoca
atgtttaaactcattatcatactcatcaattatcaaaatggtgatcagtgggagctggtacataactggcgctataaaaccagcgatgaagcctggattgatgcaaataaaatggcctatgttcgtaaaggtgatgacggcaagaccacgcatgaatgcagggtgaaagttgtgggggtgagtcatgtatga

SEQ ID NO: 194446 - DNA, 588 bp, Klebsiella oxytoca
atgccacatgacaaaataaattcaaaatactgtttgacaacctcgcccgatggatcgcagaatccagacgttgccgcaaaatcggcaaccgggcgtgagaacccgagtatgttatcggcgacgacagacgcgccatgcgtctttttttacgtcgcaatcaacgccacagagcgccatattatggcgtggtgcgttcactccggccattcaattgccgggcatgaacaggtagcgcaccactccgccatgtcaatggtagctcaggcggggcagctttcgggctggccggtttccgataacgccggtattctcacccccgtctgggctatcgccattgagcgtgagaactccggcgatagcgtatttagcgctgttatcggaggttgccttatggctacgaccccaatctctttacaccctcaatttatctggatctttcttgctatccgccgttctgacgtgttggcgaagccgcagcgtaaggaagtcactgcccctgatctcacaagcgcacgccgcgttatagcgcgtgattttgtcgcctctttcgccggtcgtctgccggttcgtgaggtggttcatgtttaa

SEQ ID NO: 194447 - DNA, 192 bp, Klebsiella oxytoca
atggaaattcgagaccgcatgacccgcaaagaagctgcgagctatatcggtgtttcaaccgccacaatggctaactgggcttgtacagggaaagtcaaactgccttattacaaggctggcctcaaaaaggttatctatctcaaaagcgaccttgatgactacttaaagtcaacccgtcgattgcaggcgtga

SEQ ID NO: 194448 - DNA, 939 bp, Klebsiella oxytoca
atgattaatataaattttgagaaagttcatgaaatgcctcaggttgataacattattgagcaggaaaagagtttaggtgttatgtttattgctgaggagaggtggttatcatataggaaaaatcatttggatgaagattattctatatcaacagatgagcttgattctgttgttatacctctttttatttccatgcatgagtacggagttaatgggggtgagactttagattttgttaaaaatgttttgtgtaatgccagtcaaaatgggaaaaatttaaaatctgcatttggttttattaaatattttgctgtcgagcagttgagcatacgatttgacaatacactcagcaatataatgtctcgcgttaatgatgagataataggtcattcgctaattactcccgagaaagtggttcctgaaataataatgactgctttgaatggtgaatgcccttccttattcgaggaaagggaagttagagcaatttatagttgcatgaggtttaatgagaatccaccttatgataacgatataatttctttgataaaggattctgtgattaacagaaacatatcagtaccgtataataatatattggttgatgtgtttcagagttgcatgaaagttccttttaataatcagaaagtgaaagataaagagcgttccttatcaaaaaaaggaccaagaaacccggagttgtattcctatattattaagatcgttgacgcaacgttgcttaaaaatccaaatgcaacgacttatgcattgacagagaaacttggagagcatttagagaaatattgccatggaaatctagaaagaaaaaattggcgcatatcaaatccacaactaagaagatggattaaagaacatcgagaattaacagggcaggaaccacaaggaaagcatgatggttacttgaagattgagttataa

SEQ ID NO: 194449 - DNA, 1419 bp, Klebsiella oxytoca
atggagtccttcaagttcacaaaatccaagataaacgagttgccacccgcaccaaaagggaagcaggacgaatattacgatagtcacgttagagggttgcgcctcagggttggggctactggcttgaagacgttctatgccgtcagaaaacttaaagggaagttcatcagaactgcgttgggccggttcccggagatatccgttgagcaagcccggacgatggctcttgaaacgctcggaggtattgggacgacaggaaagaacccgaacgaaacaaagagggaagctgagagggccagtgttactcttcgcgaagcaatggagctatatattgaaacccgcggagatcgactaaaagaaacaacggccaatcagtaccggcgtttgctcaccaatttttccggtgactggttagatagaccaattgccaaaatctcaagagatgatactcagagccggcataaagctattacggaaggtatggtttggttcggagctgaattatctaagctacgcaaaggcgttggatctgggagtaaagctcaggctgatttgtggggccggtcgctgagggctgtatataattttgcctacgataattatcgtgatgatgagggcattaaattattacccgatccccctactattgcattaagcacaaagcggcaatggcacggcttaaccagaaagaatacacgcattcgcaatcatgaattaggccgatggctgagagctgttaaggacgtcagagaggaagctgaacttaaccgggatgatcatatagccgcaatttgcgatgctcttgatatggcgttatttacaggtctacgacgaggtgaggtgttcggcctggaatgggatagggtaaatattgatggaggatatttttggatagataaaacaaagaacggtgaaccgcttgaacttcctctgactaatactctgttaactattgttaccagaagaagaaaatacagagctgataataataactatgtttttcctgcagcgaaagggggcaggataactgaccctcgcagagcaattgataagattgttgaaaaaacaaatagcgggaataatataaatgagaaacccatagaatttacatgtcatgatgcaagacgtacttttgcaaccttagccgaattaagcggggtcggaacctatatactcaagcggttaatgaatcacaagtcagcacgtaactataaaagttcagatcaaacacaaggttatcttatctttcctgttgaggaacttctcgaaccagcaaaaattattgaaacaaaaatattaaaagaggccgggcttataaaaatacccgaggattctaagataaagcttttagatggtcttagttcagaggaaaaagagaaggttttaaggtttattgatgatttgagacgaggcgaataa

SEQ ID NO: 194450 - DNA, 132 bp, Klebsiella oxytoca
atgaaggcaatagcggttgccacgcttgaggatattagagatggaacagccgttggtatgcctcgtctgtatcacagtttgtgtcgcattttcacctttaaaggtctgagacacaccaacgtatttttttag

SEQ ID NO: 194451 - DNA, 123 bp, Klebsiella oxytoca
atgctgcgcttctacgtgaccggcggccaggtggataacaagcgcaccgcgaaggttaacggcaccaaagatgagcagctggattcgctgaacgtcggcggcatgtttgaggcgtggttctaa

SEQ ID NO: 194452 - DNA, 1260 bp, Klebsiella oxytoca
atgttaactgacagcaaaatccgctcagcaaaacctctcgtaaaatcatacaaactcagcgactcgcaaggcctgtatctgacggtatcgaccagcggcgctaagttatggtatttccgctatcgcctcgatggtaaagaaagccgtctggcctttggcccctatccccagactacgctggcggaagcccgcgaaaagcgcgatgcagcacgtaagttgctggcatccggcatcaacccttctcagcttcgcaaggtgcataacaccgccgttgaggaatcccgtacattccagtatgcagcgacggcatggcacaccagcagtcttaagctctggtcggaagcccacgccgataaaattctcacctgcctgaaacgctacgttttccccgccattggcgcaatggatatcgctcaggttgaaacccgccatctggcgcagcttgtgaaggcgattgacgataaaggcgtgcatgacgtcgccgggcgggtacgccagcatctgaccaaaatcatgcgtcatgccgtacagcagggcataatcaaatacaatccagcttacgatttggacggagtcgtgaccccggtagcgacccaacatcaccccgccctgccgctgaaacgcctgccggagctgcttgagaagattcgtaattacaaaggcagggaactgacccgtctggcgttggagctgaatctgcatgtctttctgcgctccagcgagttacggcttgcccgttgggacgagttcaacctgaaagcccatatctggaccgtacctgcccagcgtgaggcagtaaaaggcgtgaggttctcagagcgtggcgcaaaaatgaaggatgaacatctggtgccgctgtcacggcaggcagtcgccctgctgaaacagattcagtcgatttccagcgaatcggtcttcgtttttccgggcgcacataccctgaacaagccgatgagcgaaaacaccatcaacaaggcgctgcgcgtgattggctacgacaccaaaaccgaagtctgtgggcatggtttcagaaccatggcctgtagcgccctgaatgagtccggacgctggtcaaaggatgccattgagcggcagatgagccacaaagagcgcaacggcgtgcgggcggcctatatccacaaggctcaacatctggaagcccgcatagatatgatgcagtggtggtcagattaccttgagactaatcacagagattttgtccctccgtatttgtacgcaaagcaacttaaagctacctga

SEQ ID NO: 194453 - DNA, 1902 bp, Klebsiella oxytoca
atgaccaggcaaaaactgtcgcgaaagaagggcggggcatcggggccggatcaggatgcgttgcgtcgccatatccgcgccaaaggtgctgactacctcaaggatccgaatatcacttcagtcggtattggccacaaaaacggcgatgggccgttgtgcattcagttcaccgtcggcgtgaaaggcgactccgccattgaggcgctcgggagcgcacggatcccggagactattgagatcgaaggggcgatgatcccgaccgatgtgattgagcgcgcctatgccccctcgtataagattgttcagccggaacggctggatgagcggcgccagcggattaatccaatccgtcctggcgtcagtgtctcgcatatcgccggcaccgccggaacaatcggtctcatcgtctatgaccgcacgaccgccgcgccttgtatgctgtcgaattggcacgtcctgcacggcaatagcggaaagataggggatgccgtcgtccaacccggtcctttcgacgataacaacaccgaccgcaatacagtcggctcgctgctgcgcagccatcttggttcggccggggactgcgccctggccagtattcgcctgcgtgactacgatgcctcggtgttgggccttgacgtcgttccgacgcgattggcccgtgttgaactcggcgataccgtcgtaaagtcggggcgcaccacggctatcacctatggcgtagtgcgaaggatagatgtgatggccagcatcaactacggtccaccgaccggtgagcagacgattggtggttttgagatcgggccggacatggatcacccttcctccgggggggaaatcagcaggggcggggattccggcgcggcctggctggtcgctgacaagggagaggcgaccaatattttcgccggtctgcattttgcgggagaaaccgaaggtgccagcgacgagcacgcgctcgcctgctatccacagtcggtgcagaagaagctcgacttcctgctcaggccgccatccagttaccttcctggtccgcttctcgaaaccctggctccgcgtaacggctaccagtcggatttcctcggtgtggtggtgccggagcccggtttatcgacggcgctgaagcgcgacgcagtgaacttcggacgccgccaaaccattccctacactcacttctcggtttgtctgagcgccgcacgccgtcttgcccgttatgtcgcctggaatattgacggtgctcgcatcgtgaagttgcctcgtcaggacttcacgctcgaccccaggatagaggctaaataccagactggcgaggaagtctatcgcgataaccggctggaccgcggccatatcgcgcgtcgggccgacctgtgctggggcgatatcgacgaggccagacaggcgaacaaagattccttctttttcaccaatatcactccccagcatgaaagcttcaaccagtcgtcccgcaaggggctgtggggcgagctggagaatctggtcttcgaccaggcggagcggcaggacctcaaactctcggtcatgggaggtccggtattcggcgatgatgatccggcctatcgcgatatccgccttccacgcgccttctggaaagtgatcgcttaccgtgccgacgacggcgggctgcgttgttcggcttttgtcctgtctcaggacagactgctccacgacctggagagcctcgacctcgatccgttccgcctctaccaggtcagcattggggacctgggcgaacgcaccaccctggacttttccgcgctttcgtccgccgatgttatgctgcatcctgcattggcgacccgtggccgccctcctgaggatgaagaggccgcacgcgcaccgagaacgatcgtggaaattcattcgttagccgaaattgtggtctga

SEQ ID NO: 194454 - DNA, 318 bp, Klebsiella oxytoca
atgaccgaatccagcgattacgaatccgtccaggtctttattggcgttgatgtcggtaaagacacacatcacgccgttgccgttaatcgttcaggtaagcgcctgttcgataaagcattacccaacgatgaaaacaaactcaggtcactgatatctgacctcaaacagcatgaccagattctgcaggttgttgaccagcctgccactatcggtgcattacccgccgcggttgcccgctctgaaggcgtccttgtcgaataccgccaacttacccttatatatcagaaccctcccaccttgttacataagaacgtttag

SEQ ID NO: 194455 - DNA, 1356 bp, Klebsiella oxytoca
atgagtaaaaattttggtggatttctagaaagccttgcaagagtacgtaacgcaagaactgcgcgtctttcaagctgggatcaatctggcaaaaaccaggattactggttaattggtccgggggagacggtgaagcttgctgatataaagggcgcaggatgtattactcatatttggatgacacaattttgccgcagagtattaggggccagtgttatcgatcctaaaatgggccagtatattgcccccgtaaatgaaattcataatgcactcggcgtatgctgggagattgccgaccctcattattatcgtaaaatcttgatcaaaatgtattgggataacgaagataaaccaagtgtcgttgtacctctgggtgactttttctgtgtaggtcactcgatgcctggtaatatcaatacactaccgataaatatttcaacaaaaccagaagagcgatataagtttgggggaagtgcatcgttaaactgtcatttccctatgccgtttaatgagcgtgctgtcattgaaattgaaaatcagaatgatattccatacggtcaatatttctacatagactatgaaatgtatgctgaaaagcataatgatgatgtcgcttattttcatgcgtgctggaagcgtgaaaatccatgcgaaggctgggcccctgaattacaaacaaacagccctgaagtaaacattccacacctggatggtgaaggaaattatgaaatattaaatgctgaaggtgaaggtcattatgtaggctgtaatctgtctgtagtccatttccagggaagctggtggggtgaaggtgatgatatgatcttcgttgatgatgatacctggcctccttcgattcatggcacaggaacagaagattattttaatcatgcctgggggatgcagaataatgcagggctatacaatggcactgccttgcacgaaagtatagtgccaggatttcagacaagttataaattccacattactgatcctgtgcattttaaaaagcgtattcgcgtaaccattgaacatggacatgcaaaccatttatctgatgattgggcttcaaccgcttactggtatcaaaaaaaaccaactggagtaactattcagcctgtagaacaacgaatcccaacgactccgggagatattgaacgccgggggatcggaaaatcgatgacaacattaacagctgaaatgcaggcacaaaaagatacagcaaaggcacgatttgaagaatttatgactgcgcggcaaattgaaattgaagaaaagcttaaagctacccgtcagaaagaacaaggtaatattgaacatgctaattatcaatccagtaaactgctgaaaagctga

SEQ ID NO: 194456 - DNA, 1722 bp, Klebsiella oxytoca
atgccggcaattaaaatccccgcaggaacaaatctgtgtttcgagtgctggttaaaaaaaagaagtcagccagacaatatgatgcctcttttaaccatcgaagctgatgaagaaattgtttataaaatagtagatgctccgggttactatgaattttttagttacaaacactatgatgaacgttctcttactataacactcagcgaaaatattgaaatgtcgttagggtacatttatcacctggatacggtttttaagaaaggggtggtatttattaatttacaggacaaccagattactcttgtagataaagaaggaatggaaatttggtatcgtgatgaagaatttcgcccacagtttcatttctccccatttaaggcatggatgaatgatcctaatggcctgtgtaaaattggcaatgattatcatttattttatcagtatcacccaaatagcactgaatgggggcctatgcattggggacacgcaatcagttctgatttgattcaatggactcacttacctgtattcaacttaccacagcaaaatcttgctgcacttggtgctacaggtggagcattctcgggtagcgcgttaattgatgagtcaggtatccctacatttttttatactgaacgcttaccatcatatgatctatacaagggttatgttgaaattcaaaaaaaatgtgagtttgataaagctggagtgaaggctggtgctttacaaaccattatagacgaaaaggcggcaggggttggctgtgatatccgggatccaaaggtttggttcgataaaaaacataacgtgtatcgaatgattttaggaagcgtctacgaagatgatcctgctgttttacaatacgtatcggtagataaggagcactggacatttttgaatgttctttaccaggcgccatcctatttcaaagaaaaccaggggcggtgtgtggaatgcccggattttttcccattaggagaccggtgggtattaattatgggaattgtagggtacaaggagccagagacccgtcgatttaatctactgtatgcggtaacgggcctgtttcataacggtgaattctaccctgatagcgatagattgcaggtacttgattttgcaacagagtattatgcattacaaacattcaatgatggagtacgacagatcggtattgcctggctattcaattgggcaatgaaaaagccaattgagtcacaatatagtggagaaatgtctgtaccaaaagagttaagcctgaatgcagagaatcaactttgtatgaagcctgttaatgaactggacaactatattgatcatagtactcagttaaacgtactgagtacatattctcatgtcattgatacaggcaaatcaattcgcctgcggctcaaaccagatacaaaacagccattcagaataaaactgagtggaatatcaggtgactggatagcgctgtcttttgatggccttaaagtttcaattacagaaaatcaatccggtaacgagagatatgaatccgcggtacaatatatcagtaattgcgagattctgtttgatgcgggtatagttgaagttttcattaatgatggagcaatctgcgcaaccaaacgtaattacaaaattccatcatgccatcaagtagaatttaatttcagcgataaagaatacatttcggtcacaatggatactctgcactcgagctggtcaaaacaagaataa

SEQ ID NO: 194457 - DNA, 1395 bp, Klebsiella oxytoca
atgaatataaaaaatcaacgtatgtcggtacttgaacacacggcatatggcgcgggtgatatgtcgctcagtgtatccattatatctgcttccctgcttatctacgccttcatggtgaaagtggtcggcctgacgcctgtggatgcggggtgggtgttgttagttgtgcgtatgattgatgcgatatctgatcctcttatggggtggttatcaatgcggatcagcacacgatgggggcgctacagaccatggattctcttaggttctgtaccctttggtctctcattatttttgttatttactgtggttggcgacagctatcagacaaaattagtctggacgacatccgtctatatctttaacagtctgatgttcaccgtaatttcaatcccctatatttctctgataggagtaatcacgcgcgaaccgggagaaaggttaaaagccaatgcgtttcgttttccaatggcaaaagccgctacattgattgtgactacttttgtaccctattatgtgacaaccgggattgatcctcaatcagcctatgcgaaagcctttctggctctcgggattatcagtttcgtgatactgttattttgtgtatttaatgttaaagaacgggttgaaatcactactccaaagaacatcccgcccagcgtccagcttaaggcgttactacgtaatgaccaatggcttatcctctgtttaacaatggtgcttctgctaatcgcttttgcgacccggggcaatattgcctttatatatggtacagagtttgccagggccggaaatggatgggaaatcggaatatttatgggtatgtggtctgtcggaggagtggcaggagccttgtgctctaaatggctgaccgatcgctataataaactgactatttttcgctggtccctgtatggttcagccataatggcggtgatgatgtattttatcgtcggcatcggcgatttctatctcgcggtcctgtgctactttctgtgttgcgcgatatcagaaattaactcccctattttgtgggcctcaatcggcgaggtaggtttttacggcgagataaaatcgggcgttaacacctatggcttatctgttggttttatagctttcagtcagaaactgggaatgagcatatccggccccataaccggttatactctggcttatatcggttataaagccggcacgcccttgagtcatgaaacgttgctggggttatcgatggctgtcacgtttatacctgccgtattttttatgattgccggtttagtgttcaggaaatatttcattagcaaccattattttaaagagatgatgatgaccgatcgactaccaggtatcagttgtccccgtagtgagaggaatgaacaacccaaagtgacaaaataa

SEQ ID NO: 194458 - DNA, 1011 bp, Klebsiella oxytoca
atgtctactaccattaaagatattgccaaagtgttaggtatatcacattcaaccgtttcccgtgcactgaataactcaggaaaagtgcaggagaaaacccgtgagttgatacttaagaccgcccgtcaaatgaactatattcccaatgcggcggcaagggatatgaagaacaacagtttactagtcctgggagtggtaactctcaatatgggacgtagtgcctacggaagtgaaatgatcggtgtaataaatcattttgccagaaatcgagggtatcagttaatttttatccatgttgagaatggtttccctggcgaggaagattataatatcctgcgtgagcggcggatatctggtctgattttcttatcactggacccggaaccaataaaatataacattatatttgatgacataaaaacagtttttgttaattgttactgtgagcgaccaggttactcttctgtccaggcaaataacattcagggtctttttgatattacccaatatgtattacagcaaggttataaaaagacaatgtttattaactttgatcaccgatatgaagcatcaagagatcgcaagcatggctatcagcaagcattaaaattaaacaatcacaattttgagtcaaaaaaatatatagaagtgcccgttgatttcgcatttaacttttcttcattggatatcgatatcaaaaacgcgatagaggatggagtggatattattctatgtggaagagatgagatagctcttgaggtttactttacactggcaaggttaggtttatccattcctgatgatattgccgtggttggatttgacaatcagagcatcatatcagaacgtgtttatccgaagcttacgactgttgaacttccctatcgcaaaatggcagaacaaggcgttagtttgttgttgcgtgatggagatgactaccgggcagaacaaattacgattaactgtgaacctatatttcgttgctctctaaaaaacaggagttttgtatga

SEQ ID NO: 194459 - DNA, 945 bp, Klebsiella oxytoca
atgacatctcatcatcaggtcgcttgcgttggtgaactactgatagactttgtgtgtgccgatattggtgtagatcttacccatggcaataacttcataaaaaaggcaggaggtgcgcctgctaatgtcgcctgtgctattagtcggttaggcgggtgtgcaaagttggcagccaaagttgggaatgatccctttggtcattttttgattaatactgtcaaggctgaaaatataaatattgactcagtggtcataactgataatcaggcaacaacactggcatttgttgccctgaagcatgatggtgaaagggatttcagttttaattggggagcccatgactcactggtgtatgaagaactcgctcctgattttgttaccagcagttccattttacatttgggagcagcattaactgacggtaatatcgttaaactctatcgtcggttaatcattgaaggtaaaaataaaaataaattgatctcgtttgatccgaattacagacaagctctgtgggttgacaaaggaaagtctgagttcattcaactctgtcatgaattcattgcctcggccgatatagtaaaagtaagcgaagaagaagctctgatgatctcagaagaaagggaattgaaatacgctacgaatcgatttcatagccttggcgctcgcatggttttgatcacattaggaaaccgtggaacattgcttagttataacggctatactgaagttatcaattcgatctgtgtcgatgctattgattcaacaggcgcaggagatgcctttatcggtgccatactatttcgaatatctcttgcaggccaacttcctgctgatggcaagctggcagctgaaatggttcgttttgctaatcgcgttggagctattacctgcacaaaaatgggagcaattcaggctttgccctatcctcatgaaattaaataa

SEQ ID NO: 194460 - DNA, 1023 bp, Klebsiella oxytoca
atgagtcaggccacccgcgatgcccccggagttgatagcagtggctggcttgaaactgcacccggtgcaagttttattgaaattgatacggattcaacacttacggcgatccaaatcaaacgtgatgattttgctgtaacaggacgtatctctggcgtagtactacgtgatttttgtatcgggctggttcatgcatcaaacccttataatacaagtggtacgaaagggatcgatattgccagtgataatgatgcattgcgtattgaaggtatgggattcagtcttctggaagaagcgatgtctatccgcaatgctgatgcgatatcaattaccaataattttattggagaatgtgctaaatgcatcacaatgcggaccagttcaatcgtagccaaaattacgaataacttctttggtagttctcctggaggatatgctatctccatcgaaaatggagacagacatcaaataacgaacaacactttcttctggaatgctcaaatccagctcatgaatacacattatacgaatatatctgccaataaattcagggggagctggccttgtaacattgttatgttgacgccctgcgatgagaatttgatatcgtcaaatatgtttaaacgggttgacggggagacaagttctgccgagttgggtggaactatttacgatgatcttatggggatggtacatattaatggtaataacaatgctgttacctccaacatgtttagcgtaactttctcagatacagcaaacctcaggcctgctggtgctgatccgacagcgatattagttactaatggtagtgtaaataccttgctggcttcgaaccacctggcatatagtggtaatattaatgttaaaacggttcttcatgcatctacggttggtagcagaatatttcatagtgctacctatgaggaattcttaccacaagagggggccacctatacatttctcggttccgacgggcgtgattttatgggaaatgtaatcattccagctcaaacaagataa

SEQ ID NO: 194461 - DNA, 168 bp, Klebsiella oxytoca
atgaaaaagtcacgatttaccgaagagcagattgtctttgccctgaagcaggccgagctggggacgtccgtacctgacgtctgccgcaagctgggtacccgaggtgtaggctatcacctctcttttgcttttcattccttggcctttttaccccccgttcgtatgtaa

SEQ ID NO: 194462 - DNA, 732 bp, Klebsiella oxytoca
atgccattcgttaagaaaataataatcaagccagaactgatactcactggtgaatttccctttacattaccgtcagtcaaggctattgaccagcttgaactacattctgcggttactttttttaccggtgaaaatgggacaggaaagtcaacggtaatcgaatccatcgctgttgcggcgggatttaaccatgaaggaggtagtaaaaacttcaatttctcaacggctgaaaacagccccatcctgtcccgggcaatcagactatcccgttctgcagaaagaatgagagatggatacttctatagatccgagagtttttataatgttattacgcaaattaataaattagataaggagcaaggcttaacgcctccgatcaagaattcatacggtggaagagatctccattctcgctcgcatggtgaatcgtttcttgacctaacccttttccggtttagtgggaaagggctttatattcttgacgagccggaatctgctctttccgttcagaaccagcttgtattactttcacgcattaatgagcttgtcagaaagggatcgcagtttattattgccactcactctccactccttgttgcttatcctggggccagcattctggagttttcttcacgtggtattgatccggtaaattatgaagaaacagaaaacttcgcgcttatgaaacagtatttccgggacccagaatacttcatgaaacagttattctaa

SEQ ID NO: 194463 - DNA, 255 bp, Klebsiella oxytoca
atgaaaaagaataatattagtatcgaaagaataaaccatctcgctattcatgcgggcatgacactgaaagatccttctttttatattattaaatatgccgacaccggccccattagcgctgatactagtgcctgtacgcaatgctgggactcatgttgttatgcaagctatgatccccgttcaatcctgcagaatcaatgcctgacgattgataaagacaagctattatcgatgcctcttttccataagcattaa

SEQ ID NO: 194464 - DNA, 2784 bp, Klebsiella oxytoca
atggaaaacatgaaagttcgacaaatggatgaaatactgtctttacccgaatctgggcttattgagatcagcaaagagaacttcaacagaattgtgctaataaggatgatggcagaacttgagggctgtgaagaaagagatctactcccttgggctatgtatctgaagctgattcaggctcagatatttcatgccaattatcgatttactgtcaccagcagcctaacgtatgagtttgaaaaaaagttcagaacttccctcaatctgaatcctgatgaatgggcaatccagatgaccattaacagggatatttacctcgactggatgcacgattatccgggattgtcagatatattttcatttatatttgagactgaaatagctaatttccgggaagtctgtcggtgctttattgaagattatgacgacttaatcagggaaggatggattacggaggggtatagtaatgtaacggacgttcaccttatcacatctgaaacccataacggcggaaagaatgtactattggtgaaaactaacggtcatcctgcgtttgcacttaagcctcgccccggcaatctggaagcgcagataagtacatttatttctgactatgtacgcgaacacctggattctccaaactggccgttgcctcatgttatcgtagcagaagaccatttctggacaacgtggattcggttccgggaatgctgtactctaagagaagcacaggcctgtcattacaacagtggggggctgacagcgctgagtctagcactgggcatcgtggatctgaattgtgaaaatatcatagcttcaggcgaatatatcattccgattgatttggagtgtgccctacaccatcagcggcattctgataaatatggttcggcccttccggaatggtcggtattaaaaaacggacttctgacgaccgtgatccacagcgactccggaatactcagcgactcgtccggaacggcatttttaggtctaattaatgagaatggcctccttcatcgtgctccagaaaactcctacaatttaagctatggtaacattgatgaggcaaggatatgggactgcagttcctttttcatcaatggattccgggattgctacctcagcataattgagaataaacccctattttttgattttattgagaaaaacaaaagttctgtgaaccggtatatcaggcgtacgacttctgaatattcagaaatactggaggcatctctaaacccgtcgctgatgggcgatcccaatagtcggtatcagtacatactgaccagtctttcgcaacccggactgtccaccgaagaaccccttatctgtgcagaagctcagtccatttataatggggagatcccaatgttcagttccacgccgggtacaaacacggtgacgtcttttactctgaggtcttcttccttgattacaaatgtcatctgtggttctgaggtgactaaaacctatattcaaggcatgtctgtggatactctgcgaaaggaaataggccttatcgaagataacattgccgccgtcagaaatgtatatttaagacggaaaatcaacatcgcgtctcctgactgttcaccaagcctggcagaagtgtatgacggcaggagtaacgaactgctttcgttactaaaaaaaatgcatgacgatagtaacgtgatcggcttttacggcaatgcgcaagggtactattacggaaaaatggatgcatccttagccactggcgtatccggcgtgctactaggagcaaagctaattggtctagatgattcgctggtttcctgcatagctgaaaaagtcatgttggatatatgttcagacctagagaagggtacaggagtgttcctcggtggagcgcacgttgggtttatttcaacgctcctgcccctgacatttgcccttgaccataagtctgggaccatccgaaaatattttgctgcctccctgctgaaggtaatcatccggcagcatactgaggtgttgaaaaagttcgactatcataacggagcgtcaggcattctggctgttgcttccctgtatgccgcaatgtttgatgaccccgattggcgttcatatagtaaccgcctctaccacgacctgctctctacgggggcaagtaatgctgagactctgtatttccccacgccttatcgtaactcttcacatcctgaccggatcctgtctggcatatcccatggccagtcggggatcatttactctgtagcactacatggcatgctttttcctgaaagcaggcagcacgtgtatggcattcttccccggctcattcagattgaactcaactgctttgatgacgttcagggcggatggcctgacctacggagcggcgctcagttaaatgcctgtcccagcgcttggcttcatggcgcgccaggtattttagtggttctggatttcgtgtcacggaattacgctctacccgcccttgaacacttcagaactcgtattgatacaacgaaagtgctggagagaagtatcagacattcgtttgacaccaaagaggtcgggatcgtgcacggcccggccggaatcctgatggcgggaaggagactgggtatccctatagaagaccatctgttgggacaatacctgagaatagcagaatcagcttaccgacgagatatttctgaaagtatgacgctgttaacaggcaaaattggcgacctaattcttatgaaggaaatgaccgacggtaattgcattatgcccatgttcccacatgaatatcttaactggagttga

SEQ ID NO: 194465 - DNA, 816 bp, Klebsiella oxytoca
atggacagatctttgttgcgtgataattttctgatccatctttcccaaggggcacttaaggggataagtgctcaggctgccagcggaaacgttgacaggaagctgctcgttactatcgggcaggagctgctcagatcggataaagacgttgtggttatttccggatcgtatcaccatgaaaattcatcctacctgtcggatgctgacatctactgcattcagcggtcagaacctgaaagtgaaatgagacgacagctgcggattattcatggcgtgccctgcgaaatcaacctagtgggcaccggttttctggacaagtttctgcccgttactggttctatgcgctcaggccgtacaacccctgcgctggctgactgcggttatctcaccggggacgtgcagctttataccagtacgagtgataaggctcgcagcattatggacacccgagcttaccagaaagaaatagcgcagctcagggaaacctatcggtacagcctcacgtcgctgcttatggatcttgtcagtgaaagaggctatgcccccgagcgtatggtggtctggcagattgcggccacactttgcgggctcttcagcctgcattgcctgggatggaatcacagcccacagtaccttggcaagctgtccttggtgaaggatgatgtctgcaagttactcggagaacttgatgtcgccactgatctttatcagtccactggcagttggcaggatgtatatgaactagcctttcgctggctgcaagctctgggcggcgcaaggtgggcggactatggtgacgcaacacgtattctttga

SEQ ID NO: 194466 - DNA, 1461 bp, Klebsiella oxytoca
atgaataatactttttttaaaccaaaaggtggttgggttggcgatctgattccttttagtcatgatgataagttctggctttattatttacatgatgaacgaaaaggtaaacatgaagatgattatgggtttggtacgacctggaatctattagtcacaacggatggaaccgatattacagattatggcgtggtattgccgacgggagggaacgatgatatcgatctgagttgctataccggctgtgtattaaaagggcatgacgataagtttcatatgttttacactgcggtgaactgcgataatccgaagtattgtcacgatggtaaacctctacaatatgtcatgcatgccacaagtgatgatctgattcactggcaaaagcactatgaaacagcattcggtgctgatggtaatatttatgaaatatatgattggcgcgatccttttgtttattatgatgaacaggatgagtgctactatatgttgcttgcggcacgtcagcagggatcgagtcagaaaaacggtggctgtataggtttatgtaaatcaaaagatctttggcagtgggaaatttgccaaccttattatgatcctaaggcatatttaacccatgagtgtccggatttatttaaaatgggagactggtggtatttaatttattcaacgttcagcgagcgattcgtcacgcactatcgtatggcaaaatcaccgaatggcccgtggactgcgccagttgaagattcttttgatggccgtggattttatgctgcgaaaacggcggaaattaatgggcagagatgggctttcgcctgggttccctctcgtcgtggagggaatgattacggtcagtgggagtggggcggtcagttggtcatgcatcaattaaggcaacttcctgacggtcgcttgtgcgtgaatattccttccgcaatatacgatagtttttccgtagaaaataatgttgttagcgatattgatagcttctctgctgagaaagaatttattttaaatggggagtatcaaaaagagtttttacctttaaaaaaactacctgaaaaatgtattattgaagctgatatttcattcagctccggcatcagaaattttgggttaggtgtaaggcaagatgatgaatatgctgatggatattacttccgagttgagcctttctataataggatagtttttgatatgtggccccgacgtgataaaggcgtcaatcagtggtatgtcgatggcgataaacctttcttaattgaactagaaagaccttatcttttaacggaaaagaaaaaaattcatctttgcttaattattgatggtgaaacctgttcgttatatgtcgataatagcgtagcattaacgactaaaatatataaccttaagggggctaactggagcttctttgcttttgatggcagcattacgctctctaatattaaactattgactgattga

SEQ ID NO: 194467 - DNA, 1239 bp, Klebsiella oxytoca
atgtcgattgtgaaaaataaacgttatatagaagcggttagctattcaatattcttttatgcggcactgagttttgctacgaccttttatgcaatctggcttagttcaaagataaacttaaccgcatcgcagacagggtttgtttatgcggttaacgcattcgtagctttgttttttatgattatatatggactgggccaggatcggcttggagtaaaaaaacttttactttggattcagagtattgttatcctgggctgtggaccattttttatctatgtatacgagccattattgatcagttctttttataccggaactatattaggggctgtatatttaagtatcgcttttttttcagggatggggttaatcgattcttatgttgaccgactgagtcgtatctatcattttgaatttggtgccgcgcgtatgggcggaagtctgtcagcagcgatcgttgcatttatcgcggggcgatttattgctattgatcctcatattaatttctggtgtatatctttagccggttttgcattgatttgcttgaatgtaatgtataaggcggatgtatcactgaaatatgaaaaagaagtggagaagctaacattaaaagagcagttttctatttttagccaacggcgtttctgggtttttgtaatctatgtttttggaacctatagcttatataatgtttatgatcaacagctatttcctgtattctatacccatcaatttgaggatattaatgttggctacaaactttacggctatctgggttcacttcaggtatttattgaagcaggcatgatgtgtaccgctccgtttctggtgaaccgtctgggggcaaaatactctctggttttagctgcatttctttctgcgctgcgaattattctttccggatactttacgtctatcgttcttatttcctgtatgaagctgtttcatgcctttgaaatatcgataatccttgtatcagcgtttaagtatatttcattgaacttcgatcgacgattttctgcaagcgtgttccttattggattccagattgccggttctgttggggtgataagcttatcttcattcattggcattatttatgataagtatggatatcaattctcattttatatattaggggcggttgttctggcctttatggttttcgcaatgttctttttgaaaaatgacatgcatcacaatggagaaaagggattaagtaaaacggtagcttag

SEQ ID NO: 194468 - DNA, 2460 bp, Klebsiella oxytoca
atggcgaaacgtaatgacgaaatattccgttctctccccctttcacacatgatttaccgggacaatgagatcgatcgggaaaaagctgaaaaaatggttgtctatcattatccgttaagtaaaaactatcgctggaaagaatggcaaacccaaattgatgatgagttaggtggacgttattacccttatttgatgaagtctcataaagatcaatttggactatacgttgctttggactctgagcaggataatccaccagtaataaaaaatggtgatgggattattgttgaaccaacgcgtgtccattacaaggctatgctgaatcccgtatggatccggcttatcatgcgtaaagtctccgcctttggttcgcattgcaaagggagtcatactctgggatgcccattactacagactgacgtctggaaaagtaaaaacagcttcggtatcaatgcaattagtctggactgtcgcactcaacaaagaagtgataaaaatataactgaggttatattatttcataaaaacgtcccactacgtccagtcgatataaaaaccgaatcatttaatattaatcaaccattatggatatatgataaaaataatgttcttgtccgctggaaagcggaaaaaacgacaaaacctaaatctcagatttaccgggaagtagccaaaaaaaaagataaacgcaagctacgcccttttctcgacctttcgtcctcaacctcacttaaaaatagctggccctggatccttcaacccgtacaaaatgaatttattgagcaagcaagaaaatttggcttcggattatctccagtagtacttaagttacgccctttaccgcttaaaacaaaattcaaaacaactgacaaggctaaattcccaagtgtacagcttgacaaagagataaaggttcttgatctacgtttttcgaaaaatgtatccccacaatatattgttaataacattcagtcgctgctgaatgaaaaatatcctgaagcacgcatgtcattactgcccgatataaaaccggatcagattgtgaacatagaaattgatggatcacagtgtctacttgttctgctggatcagactccgggtatcattgacgatcgctatccattgacacaaacattaagaacaaaagttgcctgccagcatattaatgttaatccttttgatctcacaagcgactcagttgcagataacttactaatagaacagtctacccttgacggtgacacgaagcttattcctaccacagattctcgttactatgattatagtatcagtgattttgagaaaaaagcggttcaggaatctttggcacgtaatgttgaaattgtatataaagagttagtcctgaagcatttgctgctatgcaatgagaccaaaattagtataacgcttccacaacagaaggatctactcactaacagtctcgctgtaatcactaatggctgtttgtttactgttaaacaagaccgcccaataatattacctttccatccagctatgccagatgctgtttctgcctgtgataatatactccgttcatttgatacctctgtaacagcactactcgctttgcttaacgaaaagtggccttaccattatcgcccccaggatattacacaagggatttggaatgaagcagagaagttgactcgatttattaatcgattgacggtgataattcacaaaacggaagagttgactatcctccttcaggatccacaatatggatcacctcatatgcttccggagaaattaaacgatttaatgactattcttgattctcaacggcaacagttccctcttagtcaatggttattacctgaaatggatgaactaacttttcatatagaccaacttactgaagagggtgaattatccgatacaaatagaaatacgttgcttcgtgaactagaattgctgtgtgagctatggaaatgtgctttgaaaaaatattattctgacaatgaattcaatgtcacttatgatattttaaaaaaatatgttttttcccaatggcctgagaaaaaaaatgcgcttatggtgggagttgctcaaaaatcagtaaaaagagccagtacatcattaatagcatcatggaataaattattatctcgtgtcttcgatttacctttaggcgatccccgaaactggctcaagaacgtaccgggtattacacgactctggcatgacccagagcaaaattacgtcattgttggcagtctttcctcccctcaacctattattcaacgtcagcccagtattcgccaatggcatgcattgcagggagaacttaattacgaacttcttgccggactggttgacgttgattgggtcagaatgaatcaactagcgggcaatccctgtgtggctacgcttgtgcgtcggtggaaagaatgccaggttcagccggatgatgtgcgtgatgtatcaatgacagagtaa

SEQ ID NO: 194469 - DNA, 3897 bp, Klebsiella oxytoca
gtgagtgcccctttattacgttcctacaatgccgttattgaatacaccctttctcaggcaaaaaaatccaaaacgtcccgtcgtatcgcaggattttgccagcttcaggggccaacaggtagcgggaagacgagctcgctttatcgtcttggttatgaagacaacgcgcttccggcactggaatccattaaaaaggcaggctttcaggccattctggttacccaccgctggaacatactgcacgatatttatgaaaaaacagcggagcataaagacagtaacggagagccattcagggtcagtgtgctttatgcacaagaggaccagattgtatctgccgttgaagcaacacctttacctcatgagacaaatatttctccagcttcgttgcccaacccttttacgtctatcgatgagctgcatgccagtaatctgtttgccagtaaagatatagctgaaaaattgcgcaaaagttgcaacaatatactccgtatcaacagaacgctaaaaaactatccctcccaatttcgggctgccatagccagtgagaaagaagcgttaatcaattcgtgtacagccatagaaataacgctgattcagaacattaagtctctggataaagagttcaaaaagcagaaagaaaaatacggcgaaatgaatgaacttacgcaggcagcgaagcaacggctcgatgatttccgtcgtcatgcctgggttagacgcattcttcccgccattgcctggcgtgacgaaaagcaacatctgctgatcatgacaacccaaaagctggtttcatcatttttcgatgggcggcgcaaagtacgtatgtccagtaaagagttgcgtaatcacatcatttttattgacgagtttgattatcaggccgaggtattgcaggagtatctggctcaggcccagtgggttcaggagccgccagaatgtctgggccagttgctggatggggggcgcaggttgttgcaacgtatgcagcatgttgcaacggagccagctccgatgatccgtgtacgcctagctgagtttcttgaaaatctggacaatacattagttaacaaagatatcgatttaacacacgccagatcattggttatgccactacaacaatatctgacaggtgagtcattcggtgagcattacttatttcgctctgatcatttagtcaccagcgagcggctcattatgcgaaaagcggagcatggatatgaaattataaaacccaacgctttacctcaggacaatgagtcaataattgatatcagcgattttttacgtctgatggaaaagtttattcggcagtttaacctgatgctaacagatctgacagccagtgaagacgaagcgcatgaatacataaaaaagttaacccgacttctgtttgacccggttaatgactacagaccgtcatattatggctcaaccctgccaaatatgtctcggtttttgttaccacgtaccgatctgcctgaactgcgggaactaagaaaaagtaatattttgcccaatacacatgccagtatttttgggttaactaactggttgctgaaacaaaatattgcggataccgatatcgatccattacgaatacagatcaagcgtgcgttcttgccaacaacagcagaaggtttactactgtcactagccagccgtaatctcgtttttgcactatcggccacatcatatattgaaagggcctgcaaccactttgatgtccggtggataaactcagccttacgctatattgcagaagcacgtaaccctacagttacggaaagctttctcggaactacttttgaaaaccgacctgattcttggtttaaagaaccgataccctatgttcagaccgatggtgacattcagttacagaataccgcgattgaagagatcaatagcagcaaggaaagcatcagaaagacacaactgaatactgaaatccatgattttaataaaataaagaacagcccgcagtcagccgatctgctcgcttctctgccccccgattttttccagaatgatgatgaaccttcaacagatttcgaatcagaatatcgccagaatgttctacttaaactgcttgatgtgctggatctggcaggaaaaagacctcagcaccgagggcatctggcttttgttaattccatatcttatttaagaaaatggctaactgctgcaatagcgacacaaagcagagattgcctcacatggttaaagctggatccgcctttatccgacaaccttctaaagaattttactgatgtgtttatcccgttgaccatacataacaagcccgcactaatctgtctgttaaccgcagaatgtcagaaaaaaaagggcttcagtgaagcctatcaggccgcatttgcgtccggacgtattgttattgtgctgacacaaactgcctccgccaccaacggtataaatctggatttcagcttgccacaatccggcaaaaatatggatttgacctgtttatatttactggaatcacggcattattacttttccgctttccagaccagtgcagatagcaatgatgatatggcacatgcaggcttccagttacgcaatctggaaaaactactccgtgcaggagaaatttcacgtaaacagcatcagcgcttcgtcctgccactgatgctgaaccggaagaacgaaatttcccgattaaacggagagtataagagaaccagcgattatataaaaaatacggcagccaatgttcaacagcaggttggtcgtattgagagagcctggtgtgaagtacccaacgctgaaattcatcttgattctgaactggcaaaacatctgtcccgctttgcttcactgcctatttatacatcaaatcgtcgacagctttcggcactcaatcgtcaattactggatacacttcgggagcgtgatgaactgacacagaacaatttcttcagccagctcatgacgccgacacaacctggaaaactagcattggattatatcgatcagcggctggttcctgctattcggttattacgagaacagtcaacaccaagagatgacatcccattactctggcgacaactcggtaaagcagtacttcaacatgatttagcctgggaaccaggaaaaaacgctttcgacattgatcttgaattatataaatgggcttgctttgaaaaaccgaaattagctaatactgacggcaaaatctggtactccccacagacatggcagttttttgacaaagcagcagaagggctgcgccaatacaaccctcagagactgtaccagtatatccaacgtcatcctgtcattactgactggttcaaccgtaaaggttacagaacgtctattatgcccttcgcgaacgatttggaagaacgttacgcatttcatccactagttgtacaacgcctactgatgggacgtcttggagaagaggctatccgggcgcttctttattcagagagcatcattaccaccagccaggtgagcaatcaccgtctttttgagcagtatgatttcagcataaaaaattctgattatcgtgtggatgctaagttttggagacaagatactctcgataaggcagatgaagaatatcaacaatggttggcgtctggcgcaaatcaagagcatacccctctgggtttgagtaaaaaactggcacaaattcgcgctatcgagggtaataaaaccaaattggtcatcgccaactttgttgctccacatgctgatagtcaattactgggtttctctcaccaattaacccctgttcaaaatccttatgatgcggacattctggttctcggcggatgtgtaaccccggacactatttcagtggaaacacccggattcgggcaactcaaaaaaatcattaatcaaaacattatggaaagagcataa

SEQ ID NO: 194470 - DNA, 357 bp, Klebsiella oxytoca
atgcacaagccctttctcgacccacttgggctgacctttccgcagtatctggtcatgcttgagctgtttgccggcacgccccggtcggtgggagagctgggcagtagacttggaatggatactggcacaatcactcctctgctgaagcggcttgaagcctcgggaaaggtattccgtcagcgcgatccgggcgacgaacgcagggttctggtgacgcttaccgaaagcggagaagcgctgcgcgaagaactctgggctgtgacagacaaaatccgctcggcctgccgactcagtaaggatgagcttgctcagctacgcgacacgcttaacgattttgcccacccggcgacagaataa

SEQ ID NO: 194471 - DNA, 744 bp, Klebsiella oxytoca
atgaacattagcattatcggtgcaggaaatattggtgccaccctggccacaaagctttcagcagcaggttacacggtaaaactggctaactccaaaggcccagaaaccattgctgatatcgcacgtaaggtcggcgcgaccgctgttacgagtgaagatgccctcagggacgctgaacttgttattcttgccatcccgttcaccgcacacagcagccttgccggtctactgagctcgctgcctgataccgtgccggttatcgatacatccaactattatccgttccgcgatgggtctattgcagaggttgaaaacgggatgcctgaaagtgtctgggccagcgcgcgcctcggccatccagtcatcaaggcgtggaatgccctgctggctaagacactctctgacaagggtcttccggaaaatgccccggaccggatagcggtccctgttgcaggcgatgacgaaagagccaaacgggttgccatggtactggtcagcgaaacagggtttgatgctgttgatgccggttccctgagtgaatcatggcgtcagcagcctggttcgcctgcctactgcactgaactcagcgttgcggaactgaagctcgccctgacggctgcagataaaaaacaggctcaattaaatcgcgacgccctcatgcaggagtttatgtctgccagtgcccccctgagccatgaacatattgtggcccgtaaccgggcggtcacgtcaaagcaaggctga

SEQ ID NO: 194472 - DNA, 765 bp, Klebsiella oxytoca
atgacttatccttccccactcaaaataggcattctcggcacgggccatataggaaaaacgctgacccgcaggctctctgcagccggacatcaggtaaaagtagctaactcacgtggcccggagacaatcgatcccgaaacgctggcaacaggcgcaacacctgtaaaggcagtagacgcggtcaacgatgttgatgtgattattctttccatgccgctcagtcgcctgcctcagattgccccggtaatccggcaccttcctgacagcgttattgtggcagacacctcaaactactatccccaccgggacgggaaaattgatgaaatcgaagctggccagccagaaagcctctgggtgtctgagctgctgggccggggtgtgataaaggcctggaatgcgattggttccggatcgtttgcctccaaagacagacagcccggggcccccgatcggatcgccataccggtagccggggataatgaggcagatcgtaaattgataatgcaactggtctctgataccggctttgatggatatgacgccggcacgctggccctgtcctggcgacagcagccgggcgcgcccgtttactgcacagacctgcaccatgacgagatgtcggctgcgttggcatcagcacaggcctcacgtttaccagtgagaagggacctttctgttgcagtgatccaggagcgcgttggtgacagcaagaccaatcctgatgctgattttggcgtccggttatcgcgcataatctttatgtga

SEQ ID NO: 194473 - DNA, 183 bp, Klebsiella oxytoca
atggctacatacggcgctggctttacgcttacaaaagaacgcatcagaaaacggatctacaaaacccgggatctggcccgggcggatatcttcgattacattgaagtgttctataaccgggcccggcgccacagtcacctgggcggcgtcagtccggaggccttcgaacaggcctcgtcgtga

SEQ ID NO: 194474 - DNA, 1239 bp, Klebsiella oxytoca
atgaagtttagatacttctctttacaaatggcattttgcatagggatgtcgatttcacctttaatactgctaatgcatggtttggcacaattcaagattcgtacattagttgatccagtattttctgaggtcagctttgggtattcagttgcacttgtcagtctgagtatgatcgtgttggggcctttgagtggaagcataagtgataggctttatcgaaaaatagaggacaggcgtataagcgtggttcttggcagttttattggtgctttagggctgattttttttgctcatagttcaagtttgttaatcgcgagagtttcttgggtaattgcatcgtttggctatggtttatcgtcagtaagttgttatgcgctgaccgccagcagggtagaattaaaaaaacaagggaaaacttatggtttgatcgggatagcgattccattatgttgcgtttgtgtcggaatggtttcgttaggcttattgtcaggtgaggagttgcataaaaaaatttatacaatggtgctgtttcatattttgtcggttattctgattttttttcgatacaggagtaatgaaacctcattaacacaaaatatcacggcgaggatttctttttctcgaaccagtgagtcaattattagattgtttggtaataaaaattttaggtgcttgtttataagtgggctatttatgaatacagctacttctgggcttaaaatgatgccattgttttacatgacccgcctgcatttgagtgagcaacaagtctatgagttgagtgcaataatgttttcagggactatattgttgtttgtttcgaatttcatcacaggccggatcgttgataggtttggttgtgttcgtatgctaaacattattgggtgcgtattgttgactgcctgcatgattttttattcaatggttgaatcgataatttcagttgtgattttatcatgtttgttttcattaggccttggaatatctggcccggcgagacaggttttaattaatatgatcctgttagataaggaatcctacgcaagcgatatgtctatattgaatgtgtctaataacattggttcttttttgacaggaatgtttgctcctgtgataatattttacgggaggatgtgtagggggggggatggatatgatgtttattttatattcttgtcagttttattattggtgtcaatactgttcctatggcaggttcggcgatacggttttagctga

SEQ ID NO: 194475 - DNA, 852 bp, Klebsiella oxytoca
atggataatataatgtttttcgccataactttccttaatgggtggttggtaatcctgggtctggtgggccttatattcggcagttttttgaatgtagttatctttcgttttccggtgatgctggaaaggcactgtcagaaggaaattgccgatagtaaagaggaggacaatgataccagcaatgaacccacctataatctgtgctggccaccatccatgtgtatccattgtcagcagcgaatttcggttatcgacaatgtaccgttattgagttggttgtggctcagaggccgttctcgatgctgccaacagccgttacctgtgcaatatccccttgtggaagcgacaacgatgttagctttcattgttgccggaaaactgtgggcacctggactgtttctattaggtgttttagtcttgttgtcattcctcattgtgctaacagtgattgacatacaaacttttttattacctgatgagttaacgcttttacttctatgggttgggcttgcttttaatctttttagtgtgtttgtatcattagatgaagccgttattggtgcgatggttggatatacttcactttggctggtttattgtgcgtttaaatatattactggcaaggaggctttaggctatggtgacttcaaattgttagctgcgttaggtgcctggattggctggagagaattacccaatctaattttgttcgcttcattaggtggcttgtgcattactcttgtctggcggttgttacgaaaaaaagaagttaatactcctctggcctttggcccctggctggctgcgggtggggtgttttgcttactagtcaattctcatggttttttttaa

SEQ ID NO: 194476 - DNA, 672 bp, Klebsiella oxytoca
atgtccttgctaagcgctgctgtaagacgagtaaaacactcttcaacaaccgatttctctgcaatatctcggtcgtcttttggtcgtgggcgacagagactgctaattatctggctggtgggtacactcttttctgcggtactgggtgctgcgagctatttgctctggtattcggggcgacttcaaccgattgaacagcggatagagatccctcaggtaacaccgttaccgtggcggcttataagtaaccagcttaagtttaccacccagcccttaccggaatctgtgcctgaggaagagcagaacgatactgctgaagctgatgcctggcaagcagaggaagaacaacattccgcaagtctggccgaacgcgtgcgggaggccttttctgcctcccaacgatcaccgcagggagaaagcgttgatggacgtgtgatcccatcgatgaattcactgccaccagaattgcttcaacgtatccctgcccaacgctatgctgtgcataattattcacaggatgcacgtagccgatttatcaatctcaacggaaaagactttcgtgagggtgacagtattattccgggattaacattagtcaggatcctgccggacaaaagcttatttcgttttgatgatcattctttcgctgttaaagcaatgactgattggtaa

SEQ ID NO: 194477 - DNA, 1626 bp, Klebsiella oxytoca
atgtatcgcaattttttttccctggcggaggcgccgttttcaatatcgccgaacccgtcctgtttttatttaggtgagtcccatcgtgtggcggcggaacatctgctttacggtgtggataaagggggctttgttctgctgacgggagaagtcggcacgggaaaaacgacgctatcacgttattttttgcgtaatctaccagagaacgtggatgctgtattgctttccgctccgctgcctgatgcgccagaattattcactaacctgcgccaagctttccttcctgatgtacagagtgaaaatttacatttatcttcaacgaatcgtcaactgtttgagatgtttctgcgagaaaattaccaacgtcaacgctctacactgttgataatcgacgaagctcaacacctgcctatggaggttcttgaacatcttcgcctgctgaccaatatcgaaacggataataaaaagttgtttcaggtgatgctgattggccagcctgaacttcaggatctactcactaggccagagtgtcgccagcttgctcagaggataaccgcacgttatcacttgcggcaactatcgcgtgatgaagtggacgcttacattcgttttcgtttacaggtcgtagggtgtttgcagcccatcttcacaagacaggctgtcaatgtgattgcccgcatgggaaaaggcataccacgtattattaacctaatttgcgagcgtgcgttacttggtgcatgggccaccgggacagataaggtaaagcaggcgctagctgcgcaagccgcctttgaagttacggggcgcagggatagtggaggtggagtggccgttatcgtcttttgtctcctttgtgtggtgttatatgccggtggctggttttcttggcaacattggggctggctccccgtcgcgcagatcaacaccattaaggtgcccgttaaactgcccccggatgccagtcaaatacgctattttcaaacggctgttatcgcctccagagaacttccccaagcgatgcacacgctatatgccacttggggatatgagagcgatcctgtctactctgattgtgaatctgcatcaccggctaatttacgctgctatcgcttctcaggtacgttagatgatttgattacgctaaattacccggctgttatccagataagggatgccaaactgggagcttggtacgcggtgctatctcatactgaagatggcaaagcaacattattgtttggtggcaaagaatgggaagttacttactcttggctccagcaggtttggcagaagagtgcaaccctgctttggtcattgccagataccggtactttacttatctcccgccaaagtggtggagaggaggtacgttggctcgataaagtactaagtgaagcgatgaacgtggatattttgaaaaatcttcagcgttttgataagcggctggaagggaaaataaaagtctttcagaggcaggctggtattctcgctgatggtattgcaggcgagcaaacattgatgcgtctacgcaatcagactgcagctggtattccgcggctcaatggtgttattccagctcactctaccgttatcgcagaaaaatcagttcagggggagcaaaaataa

SEQ ID NO: 194478 - DNA, 771 bp, Klebsiella oxytoca
atgatgaataaatacgtcaggcgtaatactgtgctcttgtgtgggctggggaccatcggctatctgctgttcgcattattgctgatacctgcctcctgggttttaaatcgcttcacgttaccagtggagatgtccttttacggagtggagggttctgtatggcaggggaagattaagacgttgcgctggcgggatgaagcggtgagtaatatccgttggtcgttccgttggcgatcgttgttgcaaggaggagtgacggtcgaattacatgctgacgaccccagcgtattaatcggtagaaccgtattaacatactacccgtcaacttggtcagttagtgaggcttatgtgcgttttcccgctgcacgtattaaccgatatattctgccagcgtttcctgtttccattggtggcagcattgagattgctatcgagaaattttcttttacgccttcttcctgcctgtcattaagcgggcgtgctgaatggcagcaaagcatgcttagttcatctctgggtcaggctaacctaggaaccactgccatgcaactctcctgcgtgaataataatattaatattgctatagggcaaactgcgccacagataaacagccgtagtcaattacttgtcgatatgcaggggagatatcactttcagggtgaattgacgccgggtgagttgttcccccctgcgttttatcaactgctaaaagccagctcccatgagacgaggaatggcgcatatacaataataaccgcaggccatttttaa

SEQ ID NO: 194479 - DNA, 480 bp, Klebsiella oxytoca
atgaaacagtggtatctgcaacgttctcgctccgaacgtcgcttgatcacgatggcaggtttctgcaccttaattagcctcctttattggctggcctggaggccatatgccaccgctacccatgagtggtcgacacgggttgtcacactgagtcagcaacttgactggatgttagaacaggcaccagagttgaaacaggcagaaatcgcgttaaccgacacgaccatgcgaggcgatgttgcagaggcaatcagcgtcagcgggcgaaaatttggtcttgtagcacagcgtatcgtgccaggaggtagtggtggtgttgatgtttattatactaagtcattgccttttggggcactaatgcactggctgcaggctctcgaacgtgagtatgcgattcaggttattcagttagaattggacgccagttcatccggctatgttcaggttaagcggcttcggttgggacgttcggcggcatga

SEQ ID NO: 194480 - DNA, 963 bp, Klebsiella oxytoca
atgaacagcctggcgtttatgttggaagaggagatcggtacggatcccgaaggtttgcatactatcgtgctggcacataagaaatcgttgttgtctctcgcggcggtggacatggcactcatgcagctttggttgacatggtttaatcacgccaacattgcgcccttgcgtatgatccctgacgtacttgcgctgccattccctgaggcgcagcgctgggaagcaatgcaattgggggaacaatggctaatccgtcaggaaaaatggtccggagcggtggtcgatagctcactcttttcgatctggttggcttgccatcaggagagtcctgcactccattttcatacgcctgccccggatgatgccccggcgggcgatcagtcagtaaacctgtgtccttttcccctccagttgctggtggaaaatattccatcagggaaaaacgttaacttgctgcagggggcgatccagtcgggctctggctggcggaaaaaagtgaccgcctcacgtctgccgctgctactggcgattctactattaattactattttggttaatcaatttctggctgattttcagctgttcaggcagcaggaaatattacagcaggagatgagctcgctttatcgacagtattttccagatgcgaaacgggtcgtaaatccttatttgcagtttagacagaaactggcacagcgaaatgcggtggacctgccggacggtttttttgccttgctgaaggttgtggataatgtgctgaaggtccaggtcgattgctccgtccagagcatttactatgatggcgcatcgcgcaaactgcggctccgggttatcggaccttcttttgatgcagtacggcaaatcggtggccgaatccctgccccctatcgtgctgaattttccgatctggctgagcaaaacgggagggttgctggcctcgttattgtggggtattcatcatga

SEQ ID NO: 194481 - DNA, 1005 bp, Klebsiella oxytoca
atgactatgaaccaaaaacggcaacgaggggtggcactgctgatggtcctgctattactggtagtcatgagtgtactggtttcccaaatgacgcaaagctatcggttgatgtggctgcatgttagtcagcttaggacattccaacaggtacgctggtcattactggggggagagtctctggtcggcgcgatattaacccgtagtgctagggatgaaccggaaaaaaccacactggcccagtattgggccgttaaaggcaaaacgtttcagattgataatgcaacgttgcgcggtgaagtgaccgacgcgcaagcttgcttcaacatcaatagcctgagtggtcaacatggtgacgatcctgatcgctcattacgctatcgctccgctgttttccagcagttgctgcgcaatcttggtatcgaggaattccgcgcattacagataactaccgcgctggaagagtggctaactgcagcagaactgggacagaaacaatacggcaccggagataatgactatctggcgatgatcccaccctacctgccagcaaatcgaccgatgcaggatattagcgaattacgggcggtcaaaggggtggatgcggcgatctacagacgtctggcgccttatatatgtgcgctaccgaacagctggctacaggtgaatataaatactttgcagccggagcaggcacctctgctggcggcgctttttctggaagccttaactctcgatgacgcgcagaaaatcattgcagccagaccgtttgagggatggaacagtgtggaagcatttctggcattggacatgcttagcagccgagtgcaaggcgatagtgacaacaccctatcgatggattcggtgctaagcgtccggagtttatattttgaatcctcacttgaggtgaatattgataataacaggacgcaaatgaagagtctgtttcagcggcgagaggataatcggctggtcgttgtgcggcgccattttggagaagcactgtga

SEQ ID NO: 194482 - DNA, 618 bp, Klebsiella oxytoca
atgaaaaaaataacacttaaaaataaagggtttactgtgattgaggtgttggtggcgctggcggtattcgctgcctttagtatgtctgcatatatgctttttcatggtgtattagtcaacaaagagatcaccgaacggcgtactacgcgctttacagagatgattcgcgctatggaacagctaagcagtgatttaacccaggcggtgaaacgttcaagtcgaacaagcggtgatgaccgccgcgtttttcaggccggaaccgcgcagtggcaaagtgaggatgcgtcgctggtatttgtccgttccggttggctaaatccggccgcccggttacggcgtagtgagctgcagcgtgttggctataggctatatctgggacggcttgagcgacttagctggatttatccggatatgagcgagggttctgaaccgacaacggcagtactgcttgatggtgtcagcgcgtttaaattgcgcttttatcgcaacggaaactggattaatgactggaacattaccgccgagctgccacaggcggtagagattacgctggagcttaacgactacggtacgatccaacggcgttttttgttgacgtcaatgcggataagagaatga

SEQ ID NO: 194483 - DNA, 360 bp, Klebsiella oxytoca
atgaaatgccaagggatgagtttactggaggtgatggtggcgctggcgatttttgcctcggcggccggaacgattgtacggatgcttggccagcaggttagcggtatcgccgcgcttgaagaaagtacttttgcgtcgtgggtggccgataaccaaatggttaacgtccggctgtcgacatcgtggccgaatctcagcgggcaggcgggtgaagaacgtatggcggggaaagtatggtactggcgctggcgtgggagggaaaccgtcgatccgcagttcagagcactggatgtagaagtgcgcgatagtcaggatgctgctgctcctcgtgcgtcactacgcagttatttcactcgataa

SEQ ID NO: 194484 - DNA, 573 bp, Klebsiella oxytoca
atgatacggcgtgagcatggcttcacactgattgaaatgatgctggtggtggcgatcaccgctgttgctgctggcattgtagttctggcgataccgcatacgtcgagacagcaggagacgcgactccagcttagtcaactcgccgataccctgatattgctgcgcgatcgggcggtgattgagggacggatcttcggtctgcaaattgatgggcatagttatcgatttatgacgctggttcaccccggctctgcaccctgtgtctccgcatccctggaaatggtgcgttggtgcccttattcactcccgcggtggcataccgaagaagtttttgatgaacgattaaccatctcgttgaccctgtcagggcttgccttggatgatgatgaagctggtgcggatggtgtgggtataccgcaggttcttctgttgccaggtggggagataacaccgtttgagatgacggtcagcgacaatctcacgttccatacccggcttacaatcagcgaaacgggaaaagctgagataaccactacgactggcgaagcccttgcaacaggtggtggtcgatga

SEQ ID NO: 194485 - DNA, 444 bp, Klebsiella oxytoca
atgtccactaagagacaacgcggttttacgttactggaaatcatggtggtaattgtaattttaggcattctggccagcatcgtagttccgaacctgatgggtaataaagagcaggccgatcggcaaaaagcagtgaccgatattgtcgcgttagagaacgcgttagatctgtacaagttggataacgtacgctacccaacgaccgaacaggggctgggtgcgctactgcaaaaaccggagggtgatccggagccgaaaaattacaaacagggggggtatatcaagcggttaccggaggatccttggcataacccttatcaactgttaagcccaggtgaacacggcgctgtcgatattttctcttatggcccggatggggtgcctggtactgaggacgatatcggcaactggaaacttcaggtacctaggaacccgacgcgatga

SEQ ID NO: 194486 - DNA, 1209 bp, Klebsiella oxytoca
atgacaacattttcctggattggaattagggaggatggacggcgcatgcggggaacgcttgaagcagactcggcccgccatgcgaggcagttactgcgccagcgtcagttggttcccgtcgacgttatcgaatcagaaaaacagatgcagccaggccgtcggggccggttccgcccgggaacggctgagctggcgctgtttacccgccagttggctacattgatggcggcggggatcccagttgaagaggctctgagtgcagtagcggaacaaacggaaaaaccacggatgggagcccttatttcggcggtacgcagcgaggtgctgaccggcaacaccctggccgatggtatgagccagtacccggaggcctttaacgatctctatcgtgcgatggtggccgctggcgagaaatcgggacggttggataccattttgaatcggctggccgactataccgagcagcagcataaattaaaaagccgcctgatgcaggcactgatttacccgatggtactgacggtagtggccatcggggttatcactattttgctggtaaccgtggttccgaacgttgttgaacaatttacttatatgaagcaaacgctgccgcttagtacgcggatcttaatggcattaagctacgttgtgcagagctatggaccggtaatgctgctattgctggcggcgttgggttggatatggaagtgttggctgaagaaacctgccaattgtcgatgttatcacggctggctgattcgcctgcctgtgattggccgtatcagttgcagcgtaaataccgcgcgctttgcacggactcttagcatcctcaacgccagtgctgttccactcttggatgctatccgtatcagcggtgaggtgctgaacaatctggaggcacgagcgcggatagaggcaacccgtgaagcggtgcgtgaaggtagtagtctgtatgtcgctctgaagcagagtcgtttatttcccccaatgatgctgcatatgattgcttccggagagcgcagcggtgagctggacaatatgctggagcgtgcggcagataaccaggataacgaatttgagagtcgtattgctgtgacattgagtttgtttgaacccgcgttggtgatcggtatggcgacaatggtgctgtttatcgttctcgccattctgcaaccgatcctgcaattgaacaatatggtgagctattag

SEQ ID NO: 194487 - DNA, 1491 bp, Klebsiella oxytoca
atggcggaacagcagataactgaaaatgtacaacgcctcggtttcgcctttgcgcgtgacaaaggagtgctgttgcagtgggtggatagcaaaccgcaggttgtggcacgagagaaggttgcgccagccgttttgcaggagctacgtcgtatgctgcgtcgaccgttttgcttgcaatgcatcactcctgaggcatttgaacggcagctcatgttggactaccagcgggattccctggaagtacgccagttgatggaagacatcggtaatgagatgagtttctatgcgctggttgaggagttacccaatcaagaagatttacttgatgcggaagatgatgcgccaattattcgcctgatcaatgccatgctgggtgaagccattaagctggaagcatctgatatccatattgaaacctatgagcaaagcctgaatatccgttttcgtattgatggcgtactacgcgatattctccagccccagcgtaagctggcctcggtgctgatttcacgcatcaaaatcatggcgaagcttgatatcgctgaaaagcgaattccccaggatggtagaatggggttgcgtattggtggccgggcggtcgatgtgcgcgtatcaacgatgccgtcaagctacggagagcgggtcgtcttacgcctgctggataaaaatactgttcgtttagagctggcgcagttagggattgaacgtgaattgcaggaaacactgtcaacgctgattcgcagacctcatggcattattctggtcactgggccgactggttcagggaagtcgaccacactatacgctgccctggcggaaattaataatcgcgaacgcaatattctgacggtagaagatcctattgaatacgatctggctggtatcggtcagactcaggtcaattcgaaggtagacatgacctttgcccgcgggctgcgggcaatcctccgccaggatcccgacgtggtaatggttggtgagattcgtgacggcgaaacggcgcaaattgcggtgcaggcctcgctgaccgggcatcttgttctttctacattacatactaataccgcgattggcgcgattacccgcttacgtgaaatgggtattgaaccttttctcctctcttcgtcgctgttggcggttttggcccaacgactggtaagggtactttgcccattctgtaaaacttcctatgtacttgatggtgaggaatggaaaagatacttccctgctcttagcgccggacagtcattgtttcgacctgccgggtgtaaacgctgtaatttttccggttacaagggccgtgttggcatccatgaaatggtcgttgtagatgaatggatccgtagggcaattcatggacaaaccagcgagttggaacttgagcaactggcgcgagcacatggccagggcattcgactggatggcttgaataaagtcttacaaggcgtcacgtcactcgaagaagtgctccgcgtcaccaaagaggattag

SEQ ID NO: 194488 - DNA, 2028 bp, Klebsiella oxytoca
atgtttatgtctgttgtatcgaaaaaatttattttttttatgatgctgttttttttaaactccggcttttatggggcgctagctgctaattatagtgcgagctttaaaaataccgacattcaagaatttattaatactgtcagtaaaaatttaaataaaacgatcattattgatccgacggtgagggggatggttaatgttcgcagttatgatgcgctgaatgatgagcagtactatcagtttttccttagcgtacttgacgtctacggctttgccgtgatcccgatgccaaatggcctgctgaaagttgttagatccgccaatgcaaaaactggggcaatcccagtggtggatgaagaacgtaccggcctgggcgatgaggtcgttactcgtgttgttcctgtctataacgtggctgccagagagttggcaccgctgcttcgccagcttaacgataacgctggagctggcaacgttgttaactacgatgcttccaacgtacttctgctgaccggtcgcgcagcggtcgttaaccgactggtggaaatcatccgccgtgtcgatgtggctggaaaagagcagactgatattattagacttaaatacgcttctgctagcgaaatggtccgtctgctcgattcattaagccgaaacgataagaatactcagggcggggtcttggcgctgaaagtagccgctgacgagcgcacgaacagtgtaattgtctccggtgaggcgcgtagccgccagcgattgatcagcattattcgccagttggatcggcaacaggagaaccagggtaatacgcgggtattctatctcaaatatgcacaggcgaagaatcttgtttctgtgcttttaggcagtggccgaaacagtcagtctgaaaagtcagacgcggcgagtaccaccacaatatcttcaggtggtgccagtacatttagcggcagaggtatcagcattgtggctgatgaacaaaccaatgcattggttattacagcgtcaaccagtttattactggaaattgaacagatcattgcgaagctggatatccgtcgtgctcaggtattggtagaagcggtgatcgtcgaaatgcaggacagtgatgcgttaaatttcggcgtccagtgggttaacaaacacggcggtggtacacagtttaccaacaccggcttgccagcttcgaccgctattgatgtagtgacgaacggcaaatccactgctgcagctgcggctctgagcagttttaatggtatcgcggcgggcttttactctggtaactggggtgggctggtgacggcgctaaccagtagtggaaaaagcaatattttggccacacccagcattgtcaccctcgacaataaagaggctgcgatcaacgttgggcaagaagtgccagtgatcacaggaagccaggcaaatacagtgggtggggtatatagcactgtcgaaagaaaaacaatcggtaccaagctaaaagtgacgccacaaatcaacgatggagattcggtgctattggatatcgagcacgaagtctccagtgtggcgcagggtgcgtcgggggatgcctcagccaatagtctcggagcgacctttaatacccggacgatcaagaacacggtaatggtgaaaagtggtgaaacggtggttctcggcggattgctgaacaatcagacctctgagtcggtttataaagtacctgtccttggcgatattccgctgttggggtatctgttccgttataacagcaccagtaccagcaaacaaaacctaatggtctttatccatccgattattttgcgtgaagagggcgattatagcggcttatccagcgaaaaatacaaccttttcagaacggatcaggggcagcgacggagtggacgtaacgggatggacttaccaaccaaaccactggaacttcccccggtcagacgagaggtaatttcatctgatgctttacgcggacagaatttatctggtgcgtcatcagcacgccaaggagagacaggatggcggaacagcagataa

SEQ ID NO: 194489 - DNA, 858 bp, Klebsiella oxytoca
atggtacgcaatctaatcgtccgtagacgtggctactggcagacacggttgaagaaattcccggtcaaaccctgtataacggtgataattactattatgatctgttatcagcttgcgcgcctgacctggaattttaactatatttttaatatggataatatctaccaatcagctcctgctttattacctgtggcagatgccaaagttcttaacaagccgcgcgaagtgttttctccgcctgtgtacacattgtttggcagcattaccactcaggattcgctgacttatgcgggctcaatagatgtaaaaagtcgtttgtcggttaagatcgctgggattattgcaagtagtattgcagagaaatcaattgcgattattgagcgcggaggattacaggccagctatgtaattggagataagattgccggaactgatgccgagattagcagtatcctggcagataaagtggttattaacaataacggacaacaggaagcattatatctttacgatggaccactgaaaatttcaggaacatctccctcgtcattaaccgaggtacgtgataatttattgcaacacccgggaaaattatctgattatgtttctatttcaccggtaataaaagatggccacattcaaggatatcgtcttaatcctggtgcgcatccaggcttttttaaaaaaattggtttccgtgagaatgatttggcagtggctatcaatggtttcgatttacttcagcaggagcaggcacttaaatttatatcgacgataaatgaacaaactcaatttatgattacagtgctgagagacggaaacgaagaaatgttgtttattaatttggcagggcgataa

SEQ ID NO: 194490 - DNA, 1164 bp, Klebsiella oxytoca
atgaaagctacaaaaatctttttatctttatttgctgcgtgttactcattttcctcatgctatgcgcagagctttgatgtcggtccggtaacattcactccgactgttcgcctggtgggaggaatagagtatgttaacaatgcctataaagccggggtggctggtgatcgcaccaggatcgcatcgaaccagtggggcacatcctatttcggcatcggtatgtcagtaccattaactgagggtttttcaggggttggttcactggaaagtggatttggtactgataccggggaaaccaacgatttggatggtaccaatacactatttaaccgtaaggctaacattggtttacaacatgatgttctgggaaaattaaccgtcggtactcacttgtttattgcgcaagatattgaggatatggatccgatggccttccagtcgatcggtttgaatacccttgtcaacggtgctaatgatggcacggcgcaaaaatctctgctgtatcgtacggtagatttttatggtttcaatgctggatatatgcatcagtttggtggtgaagtaggggatacagaacgttcaagtagcgatgggttttcattttcttacgcatatggtgatgcgaagattcgcgctatttatcagaaaagagccgataactacgggcgttataccggcggtaatttctatggcttaggaacgcaaggacgctggttgtatgttaaaaatacggtgattgcaggatcgtatgattttgatccggttaagctctttgcaggatatgaacgtgtagaagcacccgattccggtcatggtttgagctatacctttgacgataaggcgacaatgtcctgggttggggcaaattattcggcgacggaaaagctcactatactggctgcagcgtatcaggttaaacagccttatagtaataaaaaatccaacctctatgccgcaggcattaattactcatttaatgactactttaccgcgtttagcactgtaggttatatcaccaataatacgatagcgacagatctggttagtcaggttggtgcaagcaaccatgctctctcatacgacgatgtttcctgtaagaacgagtcagactgcaacggcgcgtcgcagttaggtggatatactggcgtggtctttaaattttaa

SEQ ID NO: 194491 - DNA, 2469 bp, Klebsiella oxytoca
atgaagacgtctttactaagggctccaactaaaattgcaattttagtttctgctattttttcgctatccgcttgtgatagcggtggtagtgacagtggtaataatacatccgggggcggttcggtagaacaggatattacccctgctggacatacagtttctgatttaaatgcagataaacgcgcacgtagccttcttgaaaacctgacattagagcaaaagatatcacttatccacggtcatggttcaccagtaggacaaaaaggttacatcgggataggttttcctcctgtagaaggagcattacaagatgcagttggttatattccaggggtccctgcagtcggtattcctgcaaacaatatggctgatgcctcgaatggagcaaatgtcgagcatgtacaaacgacagcacttcctgcttccgttggtttggctgcaacatggtcaacggatttagcccgaatctatggtaatcgtattggtgcagaaattcgtattttaggctttactactgcattgggaggcggagttaaccttattcgcgatccccgtaatggtcgtgggtttgaatatatgggggaagatccagtattagccggagagctcggggcacaacgtacgatcggcgtgcaggaaaaaaaagtcatctctaccattaaacactttgcatttaataattatgaaaccaatcgcacggttgctaataatattattgatgagcagaccatgcgcgagacagaacttttagcattcgaaatagcgatcactaaaggcaacccaggatatgtaatgtgtgcctttaatcaggtcaatagtgattatgcctgcgaaaatagctatctactcaatgatgttctgaagaaagaatggggatataaagggatagtgatgtctgactggggggctcagtccagtaccgttaaagccgctaataatggtctggatgaagaacaaccgggtcaggaagctcaggatacaccgattcctgaatttatgaagctatttatgggggggccatggtttattaaaaacttgtctgaagctgtgaccaatggcagtgtatccatgagtcgcattgatgatatggtcttccggaaattacgtaccatgattgctatgggcattatggataatccgcctcagatgagaagtagcattaacgaagcggcaggcaatgctgacgccaaaaaaattgctgatgccagtatggtgttactaaaaaataatccggcgtataaaaattttgacagcaaaccagtgcttccccttgataaaaacaccgtgaaaaaaatactcgtgatcggtggtcatgctaatgctggcgttctttccggtggaggctcaggcggtagttcaccgctgatcgagaaccaggttgatgcatgtggacagttgcctatctctccttatcctacctgccccaattttatcggtattgctccactgaaggcgattaaagataaattcccggcagctgaagtcacatatctcaccggtgaagatactgctgctgccactcaggctgcaagcaatgccgatgtcactatcatcttcggtctgcaatggctgaatgagggatcggatgtgccggatatgtcgttatcctctcctgccaacgacagctcaggaacctttgccttcgatcaggacagtatgatcgcagccgtgtcggcacaggctaagaagagtatcgtggtgttggagacagggcaggccgtattgatgccatggatcgatcaggtcgatgcggtattgcaggcatggtatcctggtgcccagggggcgaattccattgcggatattcttgctggtgatataaacccatcaggtaaattgccggtctcatttcccgccagtgaaagtgatttggttcagccgactctgccaacgaatttaggcaagtttctcggtggcggggcgatgatcaaaagtctgagtggaacggtaaaatcaatagtcaactccagcctcggtaacggtgcatatgataatattcgcacaataaattatgacgaaaaattagcatggaacggctataaatggatggagcagaacggtattaagcctcttttcccatttggacatggcctttcttactcaacatatcgttattccgaggcggcgacatcaatgactcctgaaggcgatgttgctatatcatttaatataaaaaatgaacatggcccgcaaggcagtgaagtcgcccaggtctatgtatctttacctgaagatgtaccggggaataaacaaccaccgaaaaaattagttggttggtctcgtgtggatttagctccgggtgaaaataaaaacgtcactgtgcatatacccaagaagtatataagtacctgggatgtttccacaggaggtaaatgggtggtaacaccgggtaattatattttcacagtgagtgattcatcagctgctgaatccgataatacgctgacggttgcccagtcgatacagtaa

SEQ ID NO: 194492 - DNA, 1002 bp, Klebsiella oxytoca
atgttctattattctgaatcatgggtgttacatcatatagaaaaattaaaattatttggtgttaatgaagccgatattagtactgcattaaaaataaaagttggttcactatcataccccggtactaacagagtggtaacagaagaaatagggagccgtattttatctgcattgtatgatgtcggttattattgtcgggaggaggttggaacaattgtaagtagtttttcatcagttgatttccataaggcatttttgcttggagcccctgatttggaaagcgctataaagcgtgtgaagattattttgtcaagacatgtaattaatgctgaatataaagttgaaatccgcaatggttttttgcgagtaagctattcatgcgctaatgaacggagtattttcatgaccccgcaagggcattttgcttttttgtttaaagttattgagggcgctttttcaaagactgacaggaaagttaaagttaatgttaatgttgtgcatgatcgactcccgggaattaatgatttttctacattagttactgatgatgtaagatataattctggtgggaattatattcaattttcgctagaggatatttgccaagataataagttttttaatccatttatagacaattatcttgttagcgaattcaaacgaaaatatgaatgtaaatcgtcgccgaatgataaagtaattttggaggttcgtcgctatcttgccgggtgcatgacaaatggaatcgataaactaaatatggacagtttagcttgccatatgaacatgagtcgttcaagtttgtatcgatgcctggctgaaaaccagcttacattttcctctttgttggaagaagagagaaagtcaagagccatgcatttcttaaaagagggaaatcttagccttcctgaaatcagtgatcgcttagggtactcaaatctttcggcgttcaatcgtgccttcaaacgttggtttgattctaatccctcttctttcaggtaa

SEQ ID NO: 194493 - DNA, 174 bp, Klebsiella oxytoca
atggtcgttgtcgcatctcgaaacttcaagaaggatttcggagctccagatggttcggttaccatctttttcggacttctggactgcgggaagtcgatgcttctgcggcttatcgctgtgctggaggatgcgaccgatgagagcatcttcagaaattactacgacgtcacctaa

SEQ ID NO: 194494 - DNA, 1635 bp, Klebsiella oxytoca
atgacgaccgtaattcgtaatccgatcttgcccggtttcaatcctgacccttcgttctgccgcgttggcgatgattattacatcgccgtttcgacattcgaatggtatcccggcgtccaggttcatcactcgcgcgatctggtgaactggtgcctggttacccggccactcaaccgcgcctcacaactcgatatgcgtggtgatcccgatagctgtggcatctgggcaccatgtctgacctattcggacggactcttctggctggtttatacggatgtgaaacgcaagagcggttcctttaaggatgcgcataactacatggtaacggcaccgtcgatagaaggtccgtggtccgacccggtttatatgaactcctctggctttgacccgtcgcttttccatgacgacgatggccgcaaatggtatgtgaacctgttatgggatcatcgtggtcgtccatcgcgctttggcggtattgtgctgcaggaatatgatccggtagaaaagaagctggtcgggccgatttccaacatcttcaagggatcaccgctcggcctttcagaaggcccgcatctctacaagcgcgatggctggtattatctcatcgtcgccgaaggcggtacgggttacagccatgccgtgaccatggcgcgcgcgcgcaatctcagtggaccttatgaactgcatcccgacactcatatcatcacctcgcggttccatccggatgccactctgcagcgtggcgggcatggtgatttcgtcgagacgccggatggcgcgacctacatggtgcatctgtgtagccgaccactgccaggcctctaccgctcgattctgggccgtgaaacggccatccagaaatgcgtatggggcgacgacggttggctgcgtctggatggagaaaaattcgtgccacaagacgacgtttccgctccggaccttccggcacatcctttcctctccgagccggaacggtatgaatttaaccccaaaagcggattaccactagccttccagtggctgcgttcgccctatcctgaacggctgttctcactgacagagcgccctgggtatctgcgtcttttcgggcgggagtcggttggttcgtggtttgagcagtcgcttgttgcaagacggcagacagatttcgattacgatgccgaaacggaggttgaatgtgacccgacctcgcatcttcagatggctgggctgatcgcgtattacaaccgtttcgcctatcattacctctgcgtcagtcatgacgaagaagtagggcgctcgctgcagattctgttctgcaacggccaatggccgaacggcatgactttactcgggcttgacaatcctgttgtggtgccagatggcgcggtacggttacgggtcgaggtgcgcggcgctgcattgcgtttcttttacatgaaggacggcaagtggacacgaatcgggccgattctcgacaattccgcacttgcagatgaaaacggtgaaggagaacaaagtaagtttgtcgggacattcattggcgtgggtaacttcaccggcgctttcgttggcatggcggcaaacgaccttggcggtctggcgatgccagccgacttctcatatttcacctacaagaacgttcccaggggatga

SEQ ID NO: 194495 - DNA, 1284 bp, Klebsiella oxytoca
atgaatgaattaacccgtgaaacctatattgatcgctccgttgaaccatcatggtgtacacccaccaatgaggctcaaaaaaaagcgcctttcagagtggggattgcactgattatcggtgtattttgttggcttggctcttatcttggtctggtcggcgtacttgttcccgctaaaattgcagaaattgccccagccgaaaaggccacaattcttgcaacgatgtcaggactggccatggttgtatcaaccatagcaaatatcatttatggcgctgtgtccgacaggacgcgatccaggtatggccggcgtacaccctggataatttttggttcggttggcacatgcctgacaatattgctttggggaagcgtaaatactgttaccggtattattgtttgtgcagggctataccaggtttttcttaatgccattgttgcccctatgattgcagttcttgccgaccgcaccgctccgcagcatcggggaatgatttcatcaatgtacgcggtggggaactctaccggtgcctatggtggtcagatcatagcgtcatttttcctttcgtcgtcttataccggtttcattattatggcggtacttgcgcttgcttccgggccggttgcagcctgtatcatgcgggaaggcccaagcctagatatgccaatatccgaccttaaaaaaggtggacttgtccggcagttttcatttccggttaaaaatgcgcgagactattatcttgcattgtttggcaagctgatgatcttaacttcaaaatatgtcattgcgggatatcaactctatatattgactgattatatctctcttaatgcagtgcagtctgctaaatatatcggaattatatctctatgtctgcttggtacatcgcttaccatgtcggtgatatcagggcccgttgttgataaaataaaaatgcgaaagtggcctgtggtcgtttccggatttatcatcgcaattggctgcttcttgccgtctgtcgcggcaacaccagatttacttattgcttatggcattatagctggaataggcatgggtatattctcctctgttgatcaggcactgaatatcgaagtcttgcctgaccccaaagcggctgcaaaagatttgggaatactcaacatagccaacaacggtagtcagatactgggtccggtcattgccagcatcatgataaatgttgttggatatcatgctttatttattggcgcatctgtagccgcgatgcttggcgctatcttgattgcctgtatacgaaaaggctga

SEQ ID NO: 194496 - DNA, 2124 bp, Klebsiella oxytoca
atggaaaataaaacgcactatgacaaaagtgttctcttcggtaccgcgttttatgacgagtatcttcctgactcagatttagattatgatttttctttaatgaaagaagctgggtttacagttatacgtgtgggtgagggttcctggagtaaatgggagccagaagatggccagtttaatttagactggttacagccagttctggataaagcaagtgaatatgatattaaagtcattatcggtatgccgacattttctctgccacgatggatggcaagaaaataccccgaaattgcactgactgaaatttcagggatgtccaaaaaattcggtttcagggaagagcataattactcacaccccacttttagatttttttcccagcgtattattgaggagattatcaccagatatcgctcgcatccagtagttataggatggcaggtctataacgaacctggattatatataaattactcacatgacgtttttgaaggtttcaaagactttttgcgaaaaaaatatgtaaccgttggaaatcttaataaaaaatggggtctggtattctggtcacatgaactggcgacatgggatgacctgtgggcaccggaaggcaatggatcacctcaatatgactacgagtggcgctgctaccaacaaacgttgacgacacaaatgatctcgtggacagatgcgcagatacgcaaacatacgttaccacatcaatttacaacagcatgcatagccgccaatcgcaatgcggtagatgaagttaaagtctgcagtgctttagatatatcttccgccaatatatattatcacatgcaggatggtttccattacgaaaaatattcaaagaccccatcaacggcatttccttctggggcttattcaatagcgcttgcttcagatcgtgcttttgccatgaagcaatcctctttctatgtatttgagacaaacggtggtgctattggcggcgctgcagataattatcctggttttaacggccagtggcggcaggctgcatttcagatgatttctcgaggtgccactatgattgaatattggcactggcagtctttgcattatggtagcgaaacatactggaccggtattttaccccatgacagaaatcccggccgggtgtactcacagatcgctgcgttaggtaatgaaatatcacagctaaatgaagcactacgcaatttaaccccccagcatgacgttgtatttctctattcagaacgttctaaaaatgctttaaatatgcaaccacaccgggctgaggatatcagtagtcctcatcgccagttcaatgacaaatcatatgacgagatcctgagagcattttacctgggagcttatcaggcaaatcgtcaggttggctttacgcatgacagtcagatcgtgaatgatgccaccggggaatggatcattcagcccgcggattttgccagagaaaatcctgtccttgtagcagtcgcactgttttgtacatcagaaagcctgcgaaaatggttggccgattatgtcagaagcggtgggcacctgatgatgggccctaaatcgctttatgcagacgagtatgcctgtcctttgcaactcaggaaacctgccctccccgataatttagctggttgttattaccaggaacaagcttctctcccttcttcactcaaagttaaacagaatagttgtctgaatgttacaggcgagacttatatacacgactggatagaatgccttgtcacggaaggggcagaaactgtagcaggaattgaccatccgcattttgatcaatttagtgtcgtcgtcacgcatgaaaccgcaccgggaagggtgaccacagtgggtgcgcttcctgatgcatcccttgcagaaagtctgttcagatgggccgtaaaagaaacggttgcaatagatattgacgaacctggaattacgatcagctccgccatcaaagataataatacccagattgtttttatctttaactgggactgggctcagaaaagaattgagcttccgaacagttatgttcgcgttgatatacaaagagggacagcatcacccagtggtttattaaacgcgtgggatgttcagattttccggacaagagaataa

SEQ ID NO: 194497 - DNA, 852 bp, Klebsiella oxytoca
atgatgaatgaagataaatcacgaataaatagagatgcagatatattccgttcgtcggtagttgccggtgtgaccgaggcagttataggtgggattcaggattataccgttgaccgcccgaaagggatgatgggttacgttatgcatctgaccgttgcaggacaagggattgtcaggaataacggattagagtttatatgcaaacccggagatatattacttttccctcctggtgttatgcataattacgggcgagttcatacatgtgcttcctgggttcatcactgggtttattttcatccgcgcagttactggaaagatatgctgaactgggaagaaatttgtggccagataggttactataggccaaaagtagagatggctgatatgtattcaggtctttttttacaaatcgtcaataacggaagaactaaaatagcacataaacagcttatgtctctaaatcttattgaaaacatactactacatcgtattgacgataatctacttcagcaagaagtcatctgggatgaacgtgttagcgctatatgcaagtacatcaatgacaacttaaataatccttctcaattaactatagataaaattgctttgaaagtaaatttgtcacgttcacgagttttacatctgtttaaagaacaagtcggattaagtattttccagtggcgtgatgatcagcgagtcattatggctaaaagattgttaaccgaaacccagttcccaatatccatcatcgccagtaaaattggcttcgaagaccccttgtacttttcccgtttttttaaacaacacacaggtgttaatccgacaatttatcgcagggattcacactaa

SEQ ID NO: 194498 - DNA, 357 bp, Klebsiella oxytoca
atgaataaccatatcttcccgataattggacatctgccggtcacagaactgaaaccccgtcatttcattgtcttgctgaaaggcattgagcaaaaaggtctgttggaagtcgcagcacgtactcggcagcatatgtgcaatatcatgcgccatgccgtacatcaggagttgacagagcacaatccggcagcaaatctggacggtataatctctcctctcgttaaacgcaactaccctgcccttccgctggagcgactgccggaactgttgattcgtattgagggctaccagcaagtacgagagttaacccgcccggcagtatcactcaccctgcaccttttcatccgttccacctaa

SEQ ID NO: 194499 - DNA, 678 bp, Klebsiella oxytoca
atgttaattgcatggaatgtattacatgatagacctctcagtgattttaatcaagatgtacttcaaaaaataccacgtctgatggctagacggttcaagaaattaagggattttgtacgtcatgacggtcactttattgcctcattctctgaatttggtaataaatctataaataatgacggattcactgccatatatgaatcaattcctcctgaagacaaggaaatattcagggataagttcattcagtataggaatctggcaagaagtatttaccctgatttttgggctgaactacatcgtccgctattgaatgtttcgaatttatttagaacaaccaatgatatctatattgtgtcaggaaaggatgaagagtctatatcattcattctacgtaaatatggtttaaacatacccgcgcataaaatatatgggaggatgaccgacaaaaacaaaactcttacctcgcttaaatcaatagccaacgataaaaacgaggggattatatttgttgatgacaatatccaaaatgttattgatgctttagatcatggcattcaatcattttgggctaattggggatacaatatccctgaacacaaagcaatagcccttcaaaaaggaattaatgaattaggtaccgaggatctctttaatttagttaagaaatcctcttaa

SEQ ID NO: 194500 - DNA, 927 bp, Klebsiella oxytoca
atgtcagatcagtatacttgcccaaacattagagatgaaattccagactggataactatcagggaggcggtaagacttttcagtggattgaatggatgtaaaataagaaaaagtgacttttatcgatttgctttacaaggaaaaattcgtttttcaatatactttcaatctccagtgatattgaggaagatcaaatcacaaaatcataaattaaaactaacaccaataaataattcgttagcaatgagattattcacgctttccgaaagtgcttttttcagcgaaaacaatttaactttcagtactgagggaagatatatcacccccggacaaagagtcattgacacaacattgctcggctatgaatatgtccttatacagcgtttacttgcacattcattaaagataccatcacctgtaacaggagcaaagtcgaataattatggcattaccgtttctttattgggggaaacgtttcaacttttcgaaaagatgacatggcataaaagaatcgaacgacaagtaaaaaggccacctaaaggtctttcatcagatgattacaaaaaaataatactaaacgatataaaggaagattcgcataaatgttattttcctatgcatgaattaccgagtgatgcctgctttgtcatcagaaaaagtgaacttgagaagttgatcaacaaaccgataggtaaagaaacaccttcaccgtctccaactcggatatccactcctctatcacgcctcttctggcttgcctgcaaaaataatgaaactatcagtccgttgataggaaagccttacaagttgctatccatttttgaacaatgggcatcagaggagggcattactgatcgattcagtggcgacacgctgaagactgcgcttcagcgcggctcgccctcttccctaccaacacaaaagtaa

SEQ ID NO: 194501 - DNA, 1140 bp, Klebsiella oxytoca
atgcagctgatttgggcttcagatgagttttgtttatcaggtgttttttatcctgggtttccgatcctgctccacgactcaatggaaagttgtagtgaagctaatatttttcttcagcactatctgacgaggggtagctgcagttcttgtcatacatggcgtgctgccggacaggcactttacgactatttcagctttcttcaggcgcatactttgcaatggaatgctgtatcatcgcaagccaccatcagcctgatcgatagttatcggatctggagtattaacttagggctttcacgaaacactgttagtctgcgactgcattttatctgccagttctatgagtacgcagcccaacaaggctgggtaacgaatctgccatggataattgaatacagggccgtagctcacccgccaacattcctggcacataccgactcatctgcaggcagaagagcaaccagaagtgttatgcccagaaaatggcgccagcttccaaaatttttatccaccgaacaaatacataatctaatttccgcagctcacaatccacatcatcggatgctgctactgatggcacttcatacagggttacgcagagaagaactggctacatttcctgtcgcttatatagcgaactcaaactcaactaatggtttccgtaatgttcgaatctccctcattccaggcgatggctatggcatgcgaacgaaaggaatgaaaccaagagatatttatatcagcagccagttctatcgtaacgttagcgactatatccgtcttcgccgatatgaaagagcatcactttcaccatttgagcaacaggccttatttttgaataaaaatggtttaccttatgccgacggaggaaaacacattgatcggattatcagggaactcggtcacagagttggtataagggttaatactcacatgctcagacatacctgggccacccatatgctgtcggaactgcaacaacaacgagacaaaaatcgcattgagcctgtcgtttttattcagcaacagctgggccattcctctgtcaatacgactatgcgttatctgcatttaattaattctcttgctgaagatgcaatcctcaagtacagcgactctctcaatcaggggatgggctaa

SEQ ID NO: 194502 - DNA, 759 bp, Klebsiella oxytoca
atgggtaaacgcaaactcttcattcaaaccacactggaagccgcaaactttttttcccatgaaaagtcatttaatattccatctcgcccctcaacgggcctggtattttttcctgacaatccaacaacaaataggagctttgatttctccccctggtacggagtaggaatagacgacattacaggagagtggcaaagacagatagaacgatttctggctggtatggacaatcaggtatccacaactactgttgttaactactgctgcatcgcagggcgtaattttttagattttatggccctgagtagtcagtcctctcagaaggagataacactgcttgatattgatcgtaatactattaatggttttttgcatttcctttatcagaggaacatatctacactgagccagcgagctatttatagtgcttgtcgttcagtattaaaagctatcggattacgcggaaaaataaaaattacgctcagagggaagcccgacctactgacttttccgataaacccatttccaggcagtaacagacgagccaggggagaatctccattaccacaacatcagcgcctggcattttccattgcattaagagaggccacaaaaccactaatgtcactacagatcgctcctggccctgatttacttagttacgtactgttgtcgatagctctgcataccggacgcaatacaacaccattactggaactgagctgcaattgcctcatccccctccaaggcaagggttaa

SEQ ID NO: 194503 - DNA, 900 bp, Klebsiella oxytoca
atgtttctccagttgaacaaacgtcgggggcattttgaagacaaagtggtgatacgggagaacaccatatcagatgaagaaacatggccagctataaatttctctatggcacaactcattcaaaaagtaattgaattaacagcgccacttcgtgaaaaagcaccctcccatttaaaaacacttctatggctgtatcgggttcccgcaggccctacaactggtcaactgacaacactgacatcttccgtaatactgcatcatactaataaactgattaaagaggccagacttgttgacgataatggtaatcagcttcgtctaaatattagcaggcttcgaaaaacgttcataaacagaatatatgaagtactggatggagatatcatctctacagctgcggctgccggcaacagcccccaggtgacggaaaaaaattatcttcgttcgacagaacagtccagacttaactggaaaaaaatggggatagtattgacctcagaattactcaacacaaatcctgataacctggagcaaacaccaactggccattgccgcaatcgcaaaagtggagaatatgcaccaaccactcctggagctcagtgcttttcatttctaaattgccttcgctgccgccattatgtagtaacaactgatgacctttatcgtgtgttcagtttctactggcgtgttctgtatgaacataaccgggtaagtaaacgttgctggaagcgattctacgcttttatcccacgattgatcgagcgaaacgtagtcacacctggtttacaaaatcatattttcaggcaagcagatatcgatctggctcgtgaatctgcgaaacattcaccacatccattctgggcgtataacactcccttaacctggctggaaaaacaatga

SEQ ID NO: 194504 - DNA, 1839 bp, Klebsiella oxytoca
atgaccctcctatcgcagaaaaatagctcactccagcctcgaatacctgacgacacagtaatatcacgcatatttatcaatggaaaatgggttacattaagcatctatattaacgatgaatggatcttcaatgatgcaccaaccaatacctgcaaatcgcggcggcatatacgtttcactgcaattcccgtatcttttcgaccaaccctgaaatacatatcatggcactggctgtctcatggccgcccgggtaaaataaaaccacgtccaggaacaataatagcgtttatatcggaaattactggatttcttaactggttgactttccaaaatatccatacactcaacaaggttactattgaacattgtctggcttgggctcgatatctacagcagtataaacgcgttaacactgatgaaccattgaaaccagcaacactgtcccgccgacttgcagccgttgaaacgttatttgaactgggacaattttgtccgggcaaaatgattccgcatccctggcccggaacatcatcccacagactggcaagaatgaatgacctcgcgatgcaaaaaactccattgatgccagattctgtattcaccaccttattccagcatgcctggcatcgggtgacccaggccagtgaactacttcagcatcgtgatgccctgcaacagatcagcaaaaatgttgcacataaaagcccgtcaactcgttcacttgcccgaagtaattgcctgatcacaagaggatggaaatcagggccaaaggccctgtatgaagctctgacttatctcagtacagcctgttacattatcatcgcaagcctctcggggtgcaggaatcacgaactggcatggttaaaaacaggtgcgtgctataaggtcagacatgaaaacggtgagatactttggtggatgcgctcccggtcaacaaaaacaggggaaggacagacggagtggatgatcccacctgctgcagtaaaagcaatcagagtggcggaaaaattagcacttcccttccataaagagttagaaactgaaatacgacggaaaaaactcatcaacccggatgatccagagattcaggaggctgaacgccaccttaaagtactctttccggggaagcatcctcatacgggggtagtacggacattaaatggcggccaatggaatctacgtctgcgttctttctgcaaatatcatggtattatgtgggctatcagtacgcaccagtttcggcgaaaattcgccaactatgcggcgcaaagtcagtttggtgaccttcgttatcttcgcgaacattttaagcactggtctgttgatatgacactgcgatatgcagtaaatgcttctcaggaaatgacattgcttagtgagataaaagaagatgtagcaataataaaaacaaccctgattgacaagtggctccagtctgaaacgccactcgcaggaggctatggtgagagtctgaagcactggagaaaaaccgatgcctcccacattttccacagtcatgaacatatgttgcgatcaattgcagaaagcattgcaatacgcagcaatggtcatgcctggtgcacagcagataacagaaaatgttcgggtaatttttcgcaaaatatgttgcgctgtagcgaatgtcaaaacgctgtgatcgactctgcacatctttccgtataccagaaactatatgatgacctgaaaatattacagcgtagtattaaaaaccagtcatctcagaagagaatatcctctgatataactcattgtaagagagtgatgctatcctttggtattaatctcaacgatggagacaccgatgagccacaaacatga

SEQ ID NO: 194505 - DNA, 726 bp, Klebsiella oxytoca
atgtcagattggtcactttctcaactatttgcttcgttacatgaagacattcaacttcgactgggaactgcacgtaaagctttccatcatccaggagctaaaggggatgccagtgaaggagtatggattgaaatgctcgatacatatcttcccaaacgctaccaggcagctaatgcttttgtagttgatagtttgggtaattttagtgatcagattgatgtggtcgtttttgacaggcagtactcaccatttatttttaaatttaatgatcaaataattgttccagcagaaagcgtctatgcggtttttgaagcgaagcaatcagcgtcagcagagcttgttgcttatgctcagcgaaaagttgcaagtgttcgcagacttcatcgtaccagccttccaattccgcatgctggcgggacatatccagcaaaaccactcattccaattttgggagggttacttacttttgaaagtgactggagtcctgcattgggggtgtcgttcgacaaagctctcaatggggatttatcagatggacgacttgatatgggctgtgttgcatcacatgggcatttttacttcaataacattgatggaaaattcaattttgaaccaggaaataagccagctaccgcttttcttttcaggcttattgcacagcttcaatttagtggcactgtgccaatgattgacattgatgcctatggaaaatggttagctaactga

SEQ ID NO: 194506 - DNA, 933 bp, Klebsiella oxytoca
atgaacgtaaaaccatcacttgatgaattgtttgagcggcgtattaacttccctgattttgagcctcaggagcgtctggctcgtttagttggtcttgatgagcacaaagatcgattatcaaaaatattaggcttgcttgtaaatccttatgggattcaggaatgggctaaaaaatatcatccagatgctcgtgcggctgttgatacagtactcagacggccacctttagttgtattggctggggacgtgggctcaggtaaaacagagctggcggaaaccattggtgatgctgttgcccggcaggaagatattgatattacgttgtatcctttgagccttgctacccgagggcaggggagagttggcgaaatgactcagctggtttcagctgcatttgattacaccattgaggccgcagataaattaaaaaacacgaatggaaaagctcgtggtgcggttttgctgttgattgatgaagctgatgcattggctcaatcccgggaaaatgctcagatgcaccatgaggatcgtgctggtgtaaacgcttttattcgcggaatagaccggatcgccaatcagaaactaccagcggcagttcttatgtgtactaaccggctgaaagctctcgatccggccgtccagcgtcgtgctgctgaagttttaactttttcccggccaaatgatgaacaacgacactatttgttgcattcaaaacttacgggattgggattaaattctacggcgatagaagaattagtcaggttaaccggtccaagggacacgaattcgccgggatttactttctcagatattacccagcggctaattccatcaataattcttgcggcctacccagatagcgcagtgtcagtccattcagcactgcaggtagtcaataaaatgacaccaacacctgcatttattgaccgctaa

SEQ ID NO: 194507 - DNA, 519 bp, Klebsiella oxytoca
atgtcttcttatagttatacggtagcagagacacaaactttcagcgtaacccacgctcgtcacatggctgctaaagttgcaactgacttgcggcggatgcagcgtttttatggttaccccagtgatgccgacattgaagcatacgaagaagaattggttgtgtttcttaaggctggatatttgggggaggtctcttatggttttcagaaaaataataactggatcgagccgacccttcgatataccgcaggcgacttgcttggttcaggaacagatgacgatcccggaaaaatccgcccaggaaaagatgtatcgggtgcatccttctacagttttatgacttatagctcgaaatatctgaatgctactcaatcggaaaaagatactgctttgaaagatctaccattcaaacgggttggtgcccagtctccagggattaatggctacctcgaaaatgataagacttactcggccggtggtcgctccctcactcgcactagcgtaaggaattttgtatga

SEQ ID NO: 194508 - DNA, 966 bp, Klebsiella oxytoca
atgtcaacagaacatgtcgaccataaaactatagcgcggtttgccgaggataaggtaaatcttccaaaagtaaaggctgatgaattcagggaacaggccaagcgattacagaacaaactggaagggtatctttctgatcatcctgacttttcattaaagcgaatgattccatcaggtagtctggctaaaggaactgctcttcgctcgttaaacgatattgatgtggctgtgtatatcagcggctctgatgcaccacaggatttacgtgagttacttgactatcttgctgatagattgcgtaaagcatttcctaactttagtcctgatcaggttaaaccccagacatactctgtaacggtttccttccggggctctggcttagatgtcgatattgtccctgtattgtattcggggttacctgactggcgaggtcatttgataagccaggaagatggctcgttccttgaaaccagtattcctctgcaccttgatttcatcaaagcccgcaagcatgctgccccgaagcattttgctcaggttgttcgtttagcgaaatattgggctcgtttgatgaaacaagagcgaccgaattttcgctttaaatcgttcatgattgaattgattcttgcaaaattactggataatggtgtggatttctcgaattatccggaagctttacaggcattttttacctatctggtgagcactgaattacgtgaacgcattgtcttcgaggataattatcctgcgtcaaaaataggcaagttgtcagacttagtgcagattatcgatcccgttaatcctgttaataatgttgctcgtttatatacgcagtctaatgtggacgccatcattgacgccgcaatggatgccggtgacgctattgatgctgcattctatgcaccaaccaagcaattaaccgtaacctattggcagaaagttttcggttcttcattccaggggtga

SEQ ID NO: 194509 - DNA, 324 bp, Klebsiella oxytoca
atggcaacccgtcttggcgaaaaacttcgcgatttgcgtaaacagcgtggattaacactggaaaaactcgctgacatggctggactcagtaaaagctatctatgggaactggaaaatcgcgagtctcaacgtccttcggcagaaaagctcactgccctggcagatgcactgggagttgggactagtttctttttagaagatgatcttagagagccggaagaaagacatcttgatgatgctttctttcgtggctataaaaaccttgaacctgaggctaaagcacagttaagaaaaatattggacacctttaaaaaggacttttag

SEQ ID NO: 194510 - DNA, 867 bp, Klebsiella oxytoca
atgccagaaaaagagatatggacgcctcaaaaagcagctattcggctaacaaaaatttgcgatactttcagtgagattcacggcacagaacgatttcctgttaacgttggtgagttgtctctgggggcagcagagttattccaatgggctgaccctatagtaaaaatagaacccgttgacatcaaaggatttgatggtgcattaattgccaatgaagcccgcagtcgttggatgctactttataataacggcttaacgtccccggggagaattcgattcactcaggcacatgaactgggacattacatacttcatcgtctaaatcgtgatgagttcagatgtagcagtgatgatatgctatcctgggaagataaaaatattgaatcagaagcagatttatttgcttcttacttactgatgccattcaatgatttccggaaacaattgacgccagacattgatattgaagtattacgtcagtatgcgatccgttatggggtatcgctgacagcagctaccttgaaatggcttgaatgtactgaagaaaatgccgtattcattttatctcgtgacgggtacatgaaatgggccttttccagccccgcggctcgccgtaacggagccttctttcgcacacaacgcaatgttgtatgtattccagaaggatcgcttgctgcaaaccagaacatttcaatggaaagagcaggaatgaagatccctgcatcaatttggttccctcatgcagataaagacgcttcagttcgtgaaatgaaaatacaatcagagcaatatgaatatgtcatcacccttctaatcctttcccgaaaaacaactgtatggcctccctttcatggggaagatgagtaa

SEQ ID NO: 194511 - DNA, 279 bp, Klebsiella oxytoca
atgtctaaagttattacctttaactgcaccggtggcccggaagtgctggaagttgttgatgtgcaggtgcctgcgccgacagcgggtgaagtgcagattcgcgtacatgcgataggtattaaccgtgcagaaatcatgtaccgcaacggccagtatgttattgagccggaatttccggcacgtcttggttatgaagcggccggcgttgtgcaggccgtaggtgagaatgttctcccttatgggcccaagttaactgttatgtcttttaaaatccattaa

SEQ ID NO: 194512 - DNA, 903 bp, Klebsiella oxytoca
gtgcataccaacatgattgaatacctaaatattttcatacaggttgttgagcagggtagcttcacaaaggctgcagatgtactgcagatccatcgccccaccgtgagcaaagcgatacagcagatagagcatgatctgggtgtaaaactcattcaccgcacaaccagaaagctgagcgttactgctgaaggggatgagttctatcatcatgccaggcatgttctggccgaagttaatgacatgatggccagtttttcaccgactcttccaccgcgaggtcgcctgagacttgatgtgcccctggcgctggcgcattcaatattgatccctaatctcaggcattttcaggcactttatccggatattgaagttgtgctggtttcatcggataaaaaaacggatttgattacggaaggcgtggattgccttgtccgcctgggagcacttcaggattcaagttttatatccagacgtcttggtgacatccggatgataacctgtgcagccccgtcttacctgcagcggcatgagcggccagaaacacttgccgatctggataaacatcaggctattaacttttttagcgaccacagtcgtgacgtcatggaatggaagtttatcgaagacgggagcattgtttcgctacgtcctgcgggcagcctgctggttgataattccgatattctgctttcctgtgctctggctggtctgggcattatccaggccacctgtgatgccgttgctccgcatattgcttccggcgctcttgaagagattctgccgcaatacccgtcggtgtcaaagcccgtgtcagtgatgtatccggacaggcgctatctttctccaaaagtgcgtgtctttatcgactggttcagtgatttgctggccacgcagatccagtaa

SEQ ID NO: 194513 - DNA, 291 bp, Klebsiella oxytoca
atggctctgatactggtggcgtacgccagcgaaattaacctcctgaaggcgctggtcgctaaactggtgctcatgcagttcggtaaaagttctcaggatctgcatgagcaaacggcgcaaggcgcgcgaagccaaggtgtgcatcagtgccctgccaggagagatggccggggtgcgccgggcgggcaacatgacccggtactggcacagccgctgcgcagtcttccgtccgtaaaccgccgcagacctcagtcccgttccgctttgtcacaggtaagacgccacaactga

SEQ ID NO: 194514 - DNA, 1707 bp, Klebsiella oxytoca
atgatgaaaataaataatctttttactgaatttaaaacgggtacagacgcatattcatctgcgtatcggttaatattaaaatcatacccgtcctttgtcttgtcctttacaggtgtatcactcctgtttattctgacatcggtattaagtgctctgcttcctttcttactaaaaaaaaccgcagaggcatatatcatttcagatggatttatgtccgtttttttccttgtcaccatgacttatgcagtctgctggacagttaccgagattttgaagaatattaaaggcatattctcagcaggggttcttgctcgttgtgatgctgcgcttgtcagtcaggcgatggaaattttgctgtccgtaagtttcaaaaaacaacggtattttgaacccgcaattcttgctgcaaacatagaccgtggttcaagatccttcagcgccttaacggtatcggtgttctggacgcttatacctgtgtttatagagattacagtaggtctctttttcctttatcagtctcttggcttaatgtatgcgatggtgttttgtgtgtcagttattggtatgatttttctggcgttcagtattgcattacgcagtcagaacattcatgctgatataatgaatgcccataacagtgtttatgcttatacggttggaagactttcaatgccgttagacattcgtgtcaatacggctcataaaagagaaacaaccacccgtacaaaaacgctcaggcattatgtagaaaccatcagaaaaacaaataaaaaaatgggttatttgctgtctgttcaggctgcggttgtgggggcattactggccatatcagtacttatgctggtttttttcaggcattcttcccatattggaactggagatttcatcatgattgttggttatatcagcatgctgactttccagttacgaacaatagcaggtgcctgtattgatatccaacgccaggttgtatttttaaaaaaaattctggaatataccagtgaactccccgaaggtaccagcattgtcagcatcccgccgggaagtgatgccgggtatatttttgatgtccgtaacctgggggcatcagttgatcagagagtcctgttcagtcaggttaattttaaaataaaagaaggagatatgtttgccctctcagcgccttcgggattcggcaaatcgacaatgcttggatatcttctgggacttgagtccccctctgaaggagaggtctacttccagggctaccgtatagataccgggataagctcagctgttttgggaaatgtctcattagtacctcaaaagccagttttagtacccggcactatcagagaaaatattttatatggcacagacaatattctttcacgggatgaattactcgaattactgacatccctggaattaataccggacagggatgatgaaacactgcatattttccttgaacgatacattagtcagcaaggaggaggagggcttagtggtggtgaaatacaaagaatatgtattgcccgggccctggcaagaaaaacaaagattattgttctggatgaacccacggcttctatcggtgaagagctggcaattaagattatcacatatgtccgaaagcgttgccctaccgtaattattaccactcataatccccggatcctttccatggctgatcatttttatgaaggcagagttgctgaaagctag

SEQ ID NO: 194515 - DNA, 681 bp, Klebsiella oxytoca
atgagttattattttaagcctcatgttcatcacgtgcatattaatcatgaagttactattctggacgaaatttcagaccgttatattcttctttcagaggaacagtcccgtcttctggaaaaatacatgaatactggtgaagagaacgcattaggcacgaaattaaacaggtcgggtctgatctggagtggccccgggatgtcattatctgacagttcagcgtcacctgaaggagttggtctttattcgtgggacagcagtgtgattgcaccgtctttgttcactacattactttatttacctgaagcaattaccagaattatcacggtgagaaaacggctacacctgcatggccttcatggatgtctccagcattgccgcaacagactgaattcagtcaagaaaactgatttttattctgataaacagacagataaagctgaaacttttgggcagagtattaagtatgcctcgccgttttttcccggaaaggtgaaatgccttgagttctcactttcattgtttgatatgcttatcgccagaggcataaaatcacaattatttattgggatccagaggtatgactttctgtctcatgcatggctggaaatcaataacaaagtgatttctgatgatgaacacctcaaaacgaaactaacgccaataattagtgtgctatga

SEQ ID NO: 194516 - DNA, 1398 bp, Klebsiella oxytoca
atgattttcgggaatgaatgtctgcagccaggatactccggcaaaaacccttttaacagcaaagaaatcagatacctgattaataacagcaatggctggcttgatgcatcactgcaagacgtaatctctcaacctgtcagggttgactttgaatcactgatatcccaaataatacttggtcgttctgcgggaaaaacatcattacttcatgatgttgaatgcattgctcctggctttagtttcaaaataaatcaggcatctgcactttcgtcggtaacagaattttttgactggaaggattttatagcaagtcatgaaactgttaattcaccggccgaaatactttatcagtcagtttctgatatcgtcagccgatctcatgagtgtcacttcattgtacgtctgtctggtgggcttgattccaccggtatattgctggcgttaattgaatcggttgatataaataaaattattgctttaacctatagttaccatagaggctcaagtaatgaagatgagaaggcagccaaaaaactgtgtgaaacatatggtattaagttaattattattgaatatgaacctcatcttttatttcaaaaactggataaccccgtcgctccggtgttgaatatgcgggtgataaatcacaaaatgtacgagaaagaaagaaatctcatccagaaaatctgtgaccgtcattttgtgatttttgacgggcatggtggcgaccacgtgttctgtgagaggattccgccttccctgccaaaggaattgtttctgcgtgctcatcctcttaaagctatcagtactcttctgaacatgtccagactttacggatgcagtataaaagatgttttatatatgcaggccggggagactgcagctgctttgaaggaagcacagagttttttccttccgtcggcgctctcacatattaaaccggtgcagaaaacaaagcttgatgacagaaaagctgtgctttccgatgccattcttgataacagtacagcaatgacacttgaaacatccgttgatgataccttcccatttacaaccgctcaaatgattcactatggattgaatttaaaagtagaggattcattcaacagtattcataagaggatacaatacagaaactcagttcaggagagatttaattttacctttaccagaaaagataaaggacatattacaggagcataccaggaagcattaaaaataaataaaaaaagggttgcggatttaataagaaacggacaattagcaagacataagatgattgacatatctaaaattgaaaatgcaattgaaactgcatccagaggtgttggcggactcagctcaatcattatcagaataatagccgcggaaattatatttgaagggtatgataaatga

SEQ ID NO: 194517 - DNA, 1737 bp, Klebsiella oxytoca
atgggaactcatctgatgcaaaggctgaatgccttttcggatgccttttctgtttttctgctctggctgcaacacaacccggtaatattatccatattcgccgggctgatgctgccatttatatttcatctgccacgtgaagaaagaaaaaacgcccccttctggttaaagtcggtggcgtgtgtgtccatcttcttttttatatccggcaccctgtcaccgctgaccattcagggactgagttttttctttacagtgctcgataatgacattctgctcaggttatcactctggatactgacggttggatttacgcttgccggtctggtttttcatattaccacccgaagattactggccggagaaattgacagtctgaaacaccggatgattaaaaaaagcaaactggaaagaaatatcagaacggatgttcgtgaagtcagggacatattacctgacagtattgcgtataacccgctggattatatcgacctgaataaaggtatttttattggactagataaagacgaccagcctcaatatatcacccccgaagaatttcagtcccagcacgccgacctcatcggcaccaccggttcaggtaaaggcgtcagcgcctgtgttttactttatcaggcaatactttctggtgaaggggtatttgtcgaagatccgaaaaatgatgagtgggccccgcatgtattgcgtgaagcctgccagaaagcgggaaaaccctttgtcctgattaacctgaatgaccttcatttccagcttgatttactggccgatatttctcatgagcaactggaagagctatttaatgccggtttcagcctggggaaaaaaggcgaaggcgctgacttttatcgtatcgccgatcgccgggcagccagaaacaccgccgctatttatgaaaaggggatgacattacgtgatttatttaacactgacttcgtgaaatccctcagtgaagatgtgcctgctttttatggcgagcttgaggaaatcgctttagtgaactctattaatgccaataagggattttccttaaagaccatttttgatgaaggcggatgctgctacatcatcggctcgatgcgtaatcagaaaatcatatcggctcagcgaatgattttaacccgtctgattcagatagccgaaacgcgtgaccggataaaaggcaaacctcgtccggtcgctattttcctggatgaactcaagtatcacctttcccgccctgcgcttgaaggacttggcgcagcgagggataaaggtgtacatatcatcatggcccaccagtcggttaaagatttatatgactgtccggcagatctggatggcgatgccgttgccggttcggtgattgagaactgcaaatttatgctggtttatcgccttcgcgatccggataccgccgactgggtggcaaggatgaccggttctattcttgtagacgatgaaatgaggaaagtgaaaacggatatctccctgaccgagaagatggaaacggacaggatgatccgtcaggctgaacgatattatatagacaacaacatgttgcttaacctcccccaatttgttggttttgtttttacccagaatgatctggcgaaggcaaccaaactattccacataccggcaaaaaagcaatatatcgacctgctttcgtttgagcataaaaacccgctgtataccggaaaaaacaatcagactcacaaaccttccattaacctgtga

SEQ ID NO: 194518 - DNA, 753 bp, Klebsiella oxytoca
atgcttattcataattttgctgaaagaaatgaagccgcaaaccggagaatggagacattactgagttttcttaaggaagaaacattttctgatttccataccttaaaaaaagttgtcggctataaaggaagacataaccatgcgatgtataacctgcttaatagagcggtggtgctgggatttctgagtaaacatgaatatccggtactgaccgggacaaaggcattgtgggggatcaccatgccgggtctggcaagggtggttaacgcggatgacccggtttttcccgcctattttgagccgggaaagctcaaatactggacgctggagcatcgcctgttaaaccagcgggtcaggatcgcccttgaggaaaaaggcggcacaggctggctgaacggcgaccggggggcgtttatggcgcggcatcccggtgtccggcaccgaccggacggcattattaccttaagcaacggtgccatcgttgcggtggaaacagagcgctcgctgaaaacccgcgcccgctacatcagcatcattaacagtcatctggccgccagcgacgccggacgctggcactatgcgatgtatgttatgccggatgataaaacgaaagaatcgctgatcaggctgtttggcagcatcaggacggtgacaagaaaccatgttcccgttccgtttgatgcgaaaaatcgggaaatgtttctgttccgtaccctggatgaactggaacaagcatccacaaaccacgactaa

SEQ ID NO: 194519 - DNA, 300 bp, Klebsiella oxytoca
atgaacagaaataccgacacgctttcggacgtactcactgaaatgtgcgcaaaagcactcgtcacatggatgactcattccgcacagcaaggcatgccacgcgaagaactgctgatacgcggcaacgattttgtgtatgccctacacgccaattttgttttgctacatgatgttttatcagaaacgatggaggatattcagcaacagagtcataaactcgaagaaagcgtggacattctggcgcagcgtttacactccctcggggcagaggccgataatatagtcgtcaggataaaataa

SEQ ID NO: 194520 - DNA, 948 bp, Klebsiella oxytoca
atggctatttccctgcataccacctggacaagcgcccctaacatctcagcggcgaccagcgtatccccgctggagcagtcaggctcctcaaaaacgaaattgtctaaaaccagaaccgatatttatcagaccgtcaccgacagcatcattacggcgcttgaagcgggtgttaaaccgtggtcctgcccgtggcagcgcgtaccgggtatgtctggtcttccatccaattacgcaaccggcaccgcttacagcggcatgaatatcatgttgttgtggtgcagcgcctcaaaacaggggttcagagattcacgctggatgacctacaaacaggcaaaagcggaaggtgggcaggtacgcaagggagaacacggtacggccgccattttttacaccacgctggagaaggaaaatgacgacggagaaactcattatatcccgatgctgaagacgttcaccgtgtttaacgttgaacaaattgacggtttgcctctgacaatggaaacagtcagcccggaagcaacctttgatcctttgccgcaggctgaaaatctgttccggaagagcggcgcaaatatcattgagaaaggacaaaacgcctttttcagcccctcaaacgatgaggtctggctgccagagcgtcaccttttttctgatgctgctaatttctacgccaccggtctgcatgagctggtgcactggagcggtggtaaaagccgtctgaaccgagaaatgaaagggaagtttggtagtgaagggtatgcagcggaagaattagtcgctgagttaggaagtgcatttttgatggcagatcttgggattgtcggagaggttcagcacgaaagttatattgcttcctggctgaaagcactgaaaaacgacaagctctatattttcaaagccgccagcgcggcatcgaaagcgcatcgttatctgatggagaaggtctga

SEQ ID NO: 194521 - DNA, 261 bp, Klebsiella oxytoca
gtggttcaggcgcgaatcagcttcagcaaggactggcagcaggataaggtggagttcgatgccgtcatttaccacggtgatgccgatcagttgcgtaccctgtgtgagcagatcgcccaacgcagcggcgcgatcgtctcggtacagggctttgcccacggtgaaaccaatatcctgttggaacgcctgttgatcgaacgttcactcagcgtcaacaccgccgccgccggcggtaacgccagcctgatgaccatcggttaa

SEQ ID NO: 194522 - DNA, 411 bp, Klebsiella oxytoca
atgttactgagtcaggcgcttgatgccgttcttaaattcactcctaaagaatttgctgcactgtccgatttgctctcacctgagcttatcgatgagtgcctggccgatacgggcgtcgtgacgatccgaaagcgccgtctccccatggagataatggtctgggccgtggccggtatgcccttgttccgctcactttccatgaatcagttggtttcacatctcgatattatgcttccgggtaagcgtccttttgtcgcccccaacgcagtggtactggcccgtcagcggctcggggaagaggtggtcagactcgttttcgagaaaacacaccagctctggttcgagaaaataagcgatcgaaggatcaaacatttcccgcagcagcgtgatgcacgggggaaatatgaataa

SEQ ID NO: 194523 - DNA, 309 bp, Klebsiella oxytoca
ttgaaattttcagggacattatcttcaggtctattcatttacccgttcgattcagacctgttatttgttctggcgcttggcttggtttgtattgtttcctcaatctgcctgaccaccgtcacctacatcgccaatttactgtccaggagggagtttaatgccgtaaacgtacagtcgttcaggtttccactgttgatctgcgtatgctatgtcctgttgccgagtgagggagtgctggccacgacgcagtccgacttctggatgtacctgccgatcatcgtgatcttgggcaatatactgcctctatag

SEQ ID NO: 194524 - DNA, 1737 bp, Klebsiella oxytoca
atgtttacattactaactaccctctcagtcatgttcattgtcatgctgatctcttcccggctcactcgtcggtatcacgacccgacagcccatggttatttcatggcgggcggtaaactaagtttcgggtacattgctggctcaatgatgctgacaaatatttccatcgaccaacttattggattgaacggcgattcgtatgctcataaccttagcgccattgcctgggaggcaacggccgttattgcgatggttgcgttggctctgttctttcttccgcgctacatgcagggcggattcaccacgctgcctgagtttattgcatcacgctacgacacggcaacacgccgctgtatcagtattctgctgattctaacgtatacctttgtgctcaatccggcgtctttgtatctgggggctatcacgctgaatcagatctttgatatccagatgctgttgggcttgacctatccagcgaccatttcgttgcttatcgccataaccggcgttatcggcgctgcttatgccatactgggagggctccgggcggtagccatttcagactcgatcaacggtatttttctgttgtttatcacgttactggtcccggtattggggttctatgcgttaggaaaaggttcttttttcgcggggacggagatcgtcttgcagcagtcagcagaaaaactgaacatgatcggtggaacaaaggataatgtgccttttggcacgttgtttaccgggatgttactggctaatttattttactggtgcactaatcaggcaactatccagaaaagtatggcggcaaaaaatctggaggaaggacaaaaaggggttttactgacgggtttcttcaaactcacgctacccgtcattttgatgatgcctggcatcattgcgtggcacttgtttaaggataatccggtttctcattccgaccttgcctatcctcaactggtcgcaatgcttctgccctggtggatgaaaggcttttttgttgccgtaatcctgggcactgtgatgagtcacttcaatgccataattaatgcatcagcgacattactcgcttacgattttttcaaacctgcggttccacatgctaccgatcgtcaattggttaaatttggtaaaacgatcagtatcgtcgtggcgctggcttctatagtggcagcgcctttattgatgtatgcaccagaagggatctacacggtattacgccgcttcactggcttctttaatatgccggtaattgccatcgtcctttacgctttctttagacgttcatacgccagtgcccaggctgcgaaaatcgtactcgctttccatgcgttgatttatggcgttttcgtactgggactgaagatcgatgagcgatggaatatcagctttattcatattatggggatattgtttgtcattgaatttacgttgttggaaatcatcggacgcatgacactaggtgtacaatccccccccaaaactgaggtattaacaaatataacgttgactgaatggcggcatgcaaaaagcgtcagcattctactcattgcacttcttatttctctctatctgacattttcccccttgggcgtagccactcagacttacaatactgaacgatattatctgtttttcactagcgtctggattgttgcaaccatattaataggtttttcagagaggaaatatatgagaaaaaaaagatcaaacagaaaaaacatcattcatagttga

SEQ ID NO: 194525 - DNA, 1026 bp, Klebsiella oxytoca
atgacttatcaagccaccactgcgcgctacgatacgatgacttaccgccgcgctggcaatagtggattacgactgcctcttatttccctgggtttatggcacaatttcggcgaatccaccccgttagagcagcaacgagaaatgttacgtaccgcattcgacctcggtatcacccatttcgacctcgcgaataattatgggacgccctacggtagtgccgaaaccaattttggcaccattttccgacaggatttccgtcgctatcgtgatgaactgattatctcgacaaaagcaggcttcgatatgtggcccggcccctatggtcagggcggcagttcgcgtaagtatttgatggcgagcttagatcaaagtctccagcgtttagggctggattatgtcgatattttttattcacaccgattcgatcctgatacatcattggaagaaactgcgggggctttagccagcgctgttgctcaagggaaagcactctacgtcggcatttcttcctattccccttcacaaacggctaaaattgcgcggctcctgagggaatggaacgtccctctgctcattcatcagccagcatataatatgttaaaccgttggattgaaccccaattactgaatgtctgcgaacaagaaggcgctgggatcatcgcgttcagcgcactggcacaaggcgtgctcaccgggaaatacaatcgcccttacaatacacagctcaataaaacagcaagagcgactattgagatcaacgaactttcggaaataaatcttgagcgtattaccgctcttggggaaattgctcgtaaacgtggacaaacgctggctcaactggctcttgcgtgggtactacgcgatcccagagtgacatccactttgatcggtgcaagcagccggtcacaaatcattgaaaatgtaaaggcgctggataatctcgcgttcagtgctgaagagctggcggacattgaccaatacgccattgatggcgccatcagctttggccggcaacaagcagtctga

SEQ ID NO: 194526 - DNA, 1299 bp, Klebsiella oxytoca
atgaatgacacccgaaaaatgtccttgggggcctttttacacccaaccggacatcacgtagctgcctggcggcatcctggtgtgaatcctgatccgctggattttcgagaatatattaaaatggctcaggttgcggagtcggcctgctttgacacacttttcgtcgctgacagcgtatgtacgttcgactcccctgtggctcaccggatggcgcgttcaaactactttgaacccctcactctgctggctgcgctgtccgccgtcacctcgcgaatcgggctgatagctaccgcgacgaccagctataacgagccttatcacatagctcgcaaatttgcgtcgctcgatcatctttccggtgggcgtgccggatggaatctggtaactacagacgcggccaacgaagcgatgaattttggtcgtgcttcccatttctctcatgctgaacggtatttgcgtgcccgcgaattttatcaagtcgtgtcaggattatgggatagctgggatgccgatgcgttcattaacgataaggcgtcaggcattacgtatgaccctgacaaattacatacgctcaattatcaaggtaaatatttccaggtgagagggccgcttaatgtagcccgttccccacaaggtaaacctgttgtggtgcaggcgggctcttctgaagaaggcaaaaatctggcggcagagacagctgaagtcgtcttcaccgcacagcgctcattgagttcagcacaggcgttctatcaggacgtgaagggacgtatggctaaatttggccgtcaccctgactcattgaagattatgccgggtgtctttatcgtgactggagacacgcaagctcaggcacaagagaaatatgaggctttccaggcgttagttcagcctgaagtgggtatcgctctcctgggacgcatgctgggtaattttgatttgtctgactatgatcccaacagcccactgccagaattgccgttgtccgaaagtgggcaaaaaagccgacagaaattattggcagagattggggcatctgagcaattctctctggctgaattaggtaaacatattgctggtggtcggggacactacagtttgatcggcacaccagaaaagattgccgatgagctccaggcatggtttgaaggtaaaggggccgatggatttaacgttctggtcccccagcttgctggcggcctggacgatgtggttcattacgtcattccggaacttcagcgcagaggtctgttccgtacccattatgccggtacaacacttcgctctcatctgggtttgtaa

SEQ ID NO: 194527 - DNA, 336 bp, Klebsiella oxytoca
ttgaccgttcgcaaccgatataatcataataactacagctcaactgattttaatggcgaacaggataataatgacacctatgaacttggcagttactggaaattcattattaccgataagttctcttatacctttgagccacactattttatgcgggtgaatgattttaacagtagcaatggcaaaggccatcattgggaaattaccaataccttcagatatcgcatcgatcaaaactggttaccctactttgaactacgctggttggaccgtaatgtagaaccataccatcgggaacaaaaccaaattcgcggtggggtaaaatatttcttctga

SEQ ID NO: 194528 - DNA, 897 bp, Klebsiella oxytoca
atgatacgtgataatgatctgactggcgtggtatttaatatccagaaattttcaattcatgacggaccaggcatccgcacagtcatttttctaaaggggtgtccgctcaaatgccattggtgcgccaacccggaatctcagcgcaccaaacctgaattgctctggcaccgagccaagtgtatcaattgcctgaattgcctgacgccttcagatcaaaaaatcagcgcgccattacgggatggcggcgcgtcattaataaaatttgccgacctcggttgcagtgatttttgcccgacgcgcgcactggaacgcgtgggaagaaccatgacagtaagccagatactgtatgaggtagaaagtgatgatgctttttatagtcgttccagcggaggaatcaccttaagcggcggtgaaccgctcctgcaatccactttcgctattgaattattgaagagggctaaagaagcgggattgcattgtgcgattgaaacctgtggttatgttgaatggccagtacttgaaaacgcatgccgttaccttgattatttatttttcgacatcaagtcaacgagtgatgagagacacataaaatatacgggcgtttcaaacagaaaaataattactaattttttaaaaatgacggataaattcagccacattcccgtatgtgttagaacaccaatcattcctgaatttaatgataatgaagaggatatttttaaaattattaatttaataagggaaaaaaataacgtcacctacgaaatcctcccttaccataggttgggggaagagaaatatcaaagtttggggaaaatttatcctatgcaaaaaaaacagctagcgccggaaactataccaaagttaaaaaaattattgtctcaggagggttattaa

SEQ ID NO: 194529 - DNA, 2478 bp, Klebsiella oxytoca
atgagtcatacagagactgttctttcaccgcaggaagaaagaataaacaacaataaattactttatggaagtaaatcggacagaataaccagaatctataacaggatacaatcatcgccaaccagtgtggacatcaaccgagcgcggttattcaccgagtctttcaaacagagcgagcgcgatccgcttattctccgctgggctaaggcgctatatcacactgcggcaaatatcccaatatatattgatccagatcaacttattgtcggcagagtcggcgcaccgggaaaatatggtttaatttaccctgagctcgacggtggttttttagaaagcttttctaaatctattgctacccgcgtcgaatctcccttccatatttcagaagccgacattgagattatcaacggagagatcgcgccttattggaaagataaatcctattacgaaagcctcgcacaaaaactacctgaagatgtgctgaagctaacctatgaccaaaataatatttattcttcccgctatatcgtgaatgaaacatcaacaatgcgatcgggcttgcagtgggtacatgattacaaaaaggggatatcgcaaggatttcgtcatatcaaatccgaagctcaggaaaaaatcaacagactggatgaactgaataccagcgatcaactgaataaacgccccttttatgaagcggtgatcctgatatgcgacgccatcgtcttgtgggcaaaacgtcacgcacagcttgcgggcgaactggcgataaaagaaacagatataaaaagaaaaagcgaactattatcaatacatgaaatagcgagcagagtacctgagtttccggcgcaaaacttcagagaggcactacaggcacagtggttcatgcagatgttttcacgtctggagcaaaaaaccggtgcaaccatctccaatggccggatggatcaatatctttatccctattataaaaaagatcgtcagcaaggtaaaattacgccggaagaggctaaagaattactggcctgcatgtggctgggcatgtctgaatcgttggatctctacgtcagccctgctggcgcatgctttaatgaaggatacgcgcactgggaagcggtgacgattggtggcatcgatcaaaacggtaaagacgctaccaatgaactgacttatcttttcctggcgtcgaaacgggagttcccgcttaactacccggatctggcggcaagaatccactcccgctcgccctcgcgctatttgcatgaagtcgcgaagacaattaaggatggctctggctttcccaaactgattaatgacgaagaggtgataccgttattagtggcaaaaggcgccacctttgaagaagcgaatgactatgctgtatcgggctgcactgaggttcgcatgcctaaccgggatacttataccagcccttgcgcctatataaaccttggtgcagccattgaattaacgctgaataatggccggatgcgccgatatggcgatacattgctgacgctggaaaccggcgacatcaccgatttcgatagctgggagcatttttgggcagcctatcttgaacagcaaaattacctgataagtcgggcatttaagcaacaatatatcgtcaataaactacgtcaggaacatttttccgccccgtttgcctccgctctgcacgatctctgctttgacagcgccaaagatctgcactcagaatttattccggggggaatcgatcttggctacattgatttcacaggctacgctacggcgaccgactccctgtccgccattaaaaaatatgtttttgaagaaaaacgtctggcgctcaccgagataaaacaggccgttgacgctaattttgagcagcatgaaaacatcaggcaattgctgacgactgccccgcgttatggcaataacgatgaattcgcggatgcgatagccagggatatcgattttcatgcggtcagcttttcgcggaaacactctaaagagttgggcgtacatatcgatttgcgttatgtgccggtcacctcgcacgttcctttcggcaaagtgatcgcggccaccccgaatggtcgtaaggccggtatcgcgttatccgatggttcttcagcgtcgcacggctcggatgaaaaaggaccgacgtccgttctgttgtccaattacaatacaaagaatgtggcattccgggaacgcgcatcccggctgttaaatataaagttaagcccggcttgcgtctccggcgaagcggggacgcaaagaatcatttcatttatccgcagctggtgcgatttaaaactgtggcatcttcagtttaatatcataaaccagaaaacgctgatcgccgccagaaaggaccctgacaaatatcgtaatctgctggtcagggtcgcaggctacagcgcgtatttcgtcgatttaacccctgaactacaggatgatattattatgcgaacagagcataccgctatttaa

SEQ ID NO: 194530 - DNA, 981 bp, Klebsiella oxytoca
atgttttttcgaacgatgattgtaatgtttatggttttagcggcatccgccacgccgactctggcgcagaagcaggacgtgttacggatcggttatcagaagtcgggtattgcattagtgttgttaaaaggctccggcgagctggaaaaacgtcttgctccgcttgatattgcggtgaaatgggtcgagtttcccggcggaccacagctactggagggattgaacgtaggtgcgattgattttggccataccggcgagacgccgccgatattcgcgcaggcggcaggcgcatcgctggtgtatgtggccaacgaaccggcttcaccgacggcagaggctatactggtgccgaaagattccgctttgcaatccgtcgccgatctgaaaggcaagcgcgtagcgctgaataaaggatccaatgtgcattacttgctggttcaggcgctgcaggagagtggtctgcgctatcaggatatcactcccgtctatctttctccggcagacgcccgcgcggcttttgagcgcaacaacgtcgatgcctgggtcatttgggatccatttgcggcggcggcggagcagcagatacaggcccgcaggctgcgggatggcagcggcattgtggctaactatcaattttatctggcgacgcgtagttttgcgacacgttccccgcagactgtcaacgcattgattgacgagattaaccggattaatgaaaacacgggagcggccccacagacagtcgcccgacagatagcgccactgcttggggttccgctggacgtcgcgcgtaccacactcgaacgccaaggctacggcgcgagcgccatccttcctaaagtgattgcagggcagcaacgtatcgcagacacttttgctggcttgaagctgataccgaaaccgctggatgtgaaggagaccatgtggacgccaccggcgcaggaaagccgcgccgtcgccatgcaaccgaatgagcactag

SEQ ID NO: 194531 - DNA, 795 bp, Klebsiella oxytoca
atgaaaaacttgtataaagtccggctttcccaactgctgatcccctggctgcttccggtgtttttattgtccggctggcagttggccgtcagctgtgggtggttatccagccgtattcttccggcgcccagtgcggtggttgaggcggggtggcagttgattatcagcggtgagctttgggatcatttgacaatcagtgcctggcgcgccagtgtcggttttgccatcggtggagggatcggtttgttcctgggcgttctaaccggtttatcgccccggattgctttactgctcgacagtaccgtacaaatgatccgtaatattccacatctcgcgctgatcccgctggtcatcctgtggttcggcattgacgagtcggcgaagattttcctggtggcgttgggaacgctgttccctatttacctgaatacctatcacggtgtacgtagtgtggacgccgggctactggaaatggcccgaaattacggtctttccggtttttcactgttttatcaggttattttaccgggcgcattgccgtccgtgctggttggcgtccgttttgcgctgggatttatgtggctgacgctgatcgtcgcggaaactatttcatcgacttccggtatcgggtacctggcgatgaatgcgcgtgaatttctgcaaacagacgtggtcgtaatggcgattgtgctatacgccctgctcggaaaactggccgatatcgccgcacacgcattagagcgtaggtggctgcgctggcatcccgcctatcagaaaacaggagaagtccagtga

SEQ ID NO: 194532 - DNA, 792 bp, Klebsiella oxytoca
gtgaatgtgagcatcccgtcaattaaccggggcgtttccctggcggtaaggtcgttaaataaagagtttaatcagcgtcctgtattacagaatattaatatgacgataccatccgggcaatttgtcgcgatagtgggccgcagcggctgcggtaaaagcacgttgttgcgattgctggccggccttgagcgacccagtagcgggacgttgctgaccgacggcggtaaagccggactggacccacatcgctccgatatccggatgatgtttcaggatgcgcggctgctcccctggaagacggtaatcgataacacctgcatcggtttgggcaaaggagacaaattacgtgcggaagaggcgttggcggcagtcgggttgttggaacgggcgggcgactggcccacggcgttatccggcggtcagaaacagcgggtggcgctggccagagctttgattcaccgtccacggctgctattgcttgatgagccgctgggtgcgcttgatgcactgacccgtattgaaatgcaacagttaatcgaaaaactgtggatcgaacacggttttaccgtgctgctggtcacgcatgacgtgaatgaagccgtcacactggcggaccgggtgatcgtaattgaagaaggccacatcggcctggatatcaccgtcgatatagggcgtccaagaaaacggggaatgccccgtctggcctcgctggaaaatacggtacttgaccgtattttttctcaggacaagcgcggaaacgatgatatcgtgcaggtctcttccggcggataa

SEQ ID NO: 194533 - DNA, 996 bp, Klebsiella oxytoca
atgcacaaggctttaattattttttcacggttttttcactatggccgccatactctggtgatggcgctggcttgttttttattctacagcgtcagcgcaagtgccggacaggaaaaagaaccggaggtttttcggattggttatcagcaaggttcaatcaacttattactggcaaagcagcatcgcttattggagaacgccttccccggggtagaaattgaatgggtgagcttttccgccggcccgcaaatgctggaagcgctcaacgtcggcggcatcgatcttgccggaagcggcgacattcctcctttgttcgcccaagcggccggtgcggatttgctctacgtcggtgctatgacccccacacccgaagccgaggtgattctggtaccggaaaacagcgccattcagcatgttgatgcattgaaagggaagagggttgctttccagaaaggttccagctcgcataatctcgtactgagaacgctgcaaaaagagggtctatccatcaaggatattcagccaatttatctggcccctgccgatgcgtttgccgcgtttcagcaaggcaaggttgacgcttgggctatttgggatccttactactctgcggcgttgatctcggggcgcgccaaagtgttggccgatggtcgccccctgagccagacgggtaaattcttcctgtccacccggttttttggttccacctatccggcgtttttgcagcaaactctaaaaatcgttagcgatgcctatgattatgttcataccgatagagaaaacagtataaagttgctatcgcaggcgataagcattccacgagaagtggtgaaaagctatcttagccactatccgcaggagcaacgtattttccccgtcagcgcagcggtacagcaggcacaacaggaaacagccgacctgttttatgccaacaaactgttacctaaaccggtaacaattaaagatcgaatctggatttcgcctgtgtacgaataa

SEQ ID NO: 194534 - DNA, 894 bp, Klebsiella oxytoca
atgaacgacacctcttctgacgatatccttctgctgaaacaacgccttgccgaacaggaagcgctgaatcgtgccctgctggaaaaactggccgatcgtgaacgcgaaatcgaccacctgcaggcacaactggacaagctccgccggatgaacttcggcagtcgttccgaaaaggtatcccgccgtatcgcacagatggaagctgacctgaaggcgcttcagaaagaaagcgatacactgaccggtcaggtggatgaccctgcagtacagcgccctctgcctcagagtcgcagccgaaaaccgttccccgaatccctccctcgtgacgagaaacggctgttacctgacgagccgtgctgcccggactgcggcggttcgctgagttacctgggtgaggatgccgccgaacagctggagctgatgcgcagcgccttccgggttatccggactgtacgtgaaaagcatgcctgtactcagtgcgatgccatcgtgcaggcccccgcaccttctcggcccatcgagcgggggatagcaggaccggggctgctagcccgcgtgctgagctcaaagtatgccgagcacacccagctgtaccgccaatctgaaatatacggccggcagggcgtggagctgactcgctcactgctgtcgggctgggtggatacgtgttgccggctcctgtcaccgctggaagaggcgcttcaggactatgtgctgactgacggcaagctgcatgctgatgacacacctgtcccggtgctgttgccaagtaataagaaaacgaagaccgggcggttgtggacgtatgtgcgtgatgaccgcaacgccgggtcagcgctggcaccggccgcgtggttcgcgtacagcccggacagaaaaggcatccacccgtag

SEQ ID NO: 194535 - DNA, 1656 bp, Klebsiella oxytoca
atgaatatcctcaactggagactgcgtacccgcatgggtaccggatttgcccttttactgctcctgctcctgcttgtgagccttatttcggcagtggcgctttcggagttgcgcagaacgtcaaatctcattattgacgagtactatccgaccacggtgctggccaataatattattgacgatgccaataaaaactatcttctgaccttccgggccgttgtggcccataatgagcgcgatcgcaataaatacattgatgaactcaatggccagacatccctgaatgcctcacacatggaggcgctgaaaagacgtattgcaggcgatgctcaggccgaaaaaatggttgatgagatggaagatgcagccagaaaagtcacggcatcaaggcaccatgtgtttgccgttcagaagtctgatggagccgatgcggccgaagccctgctggagacggaaaccatcccggcaacggacagttttattcaacagattaccgatatcatcagctatgccgatgagcaggttaaagccggggatgacgaagtggaaagtacataccggtcttcgctctggataaccgatattatcgtcgcactgagcgtatttctgggatgtatcattgcctgggcactcacgcgcagcgtcgtcagaccggtgcaggaagcgcttgcaggtattgaggcttccgggcgtggcgacatgaccatccccttcagagatgaataccatgccgatgaaaccggccggctgctgaccggactgaaagccaccgtcatcagtataagccggatgctcagccaggttcgcgacagcgccctgtctgtctccactgcctcttcccagattgcggccggcaaccaggacctttcctcccgaactgaagagcaggccagtgcgctggcggaaaccgcttcggcgctggaacaactgaccgcgacggtggcaaatacggcagagaatgcgcaacatgtgcagcaactggtcaccgaaagcggcaacatcatgaaacgtaacaacgaagtgatggatgccaccacccgccagatggacggtattcatcaggcgtcgcagaagatgtccgaaatcatcacggtcattgagtccatcgccttccagaccaacattctggcgctgaacgcagcggtggaagccgcccgtgccggcgaatcgggacggggctttgccgtggtggccggggaagtgcgcagtctggcgcagaagagcgccacggcagcaaaagacatcaaaacgctcattgaggaatcagttaaccagacggaggccggtcgtgagctgattgccaccgccagcacggtgacccgggagatgacgcagaacgcacagaatgtggacatgctcatcaatgaaatcgcccgggcggcgatggaacaaagtgacgggatccgtcagattaatgtggcggtaacgcaactcgataccacaacccagcagaatgccgccctggtggaagagtctgccagtgccgcgcagtccatggctgagcaggcagcaatgctgacagagctggtgaacaccttccgtttacgtgaaggcctgacggccatggcagcaccgtcccccgccccggcagttccagaagccgcaacgtttccgtcttcatcccataaaactgcagacaactgggaaacattctga

SEQ ID NO: 194536 - DNA, 1266 bp, Klebsiella oxytoca
atggcgtggctgacaacaaagtatggtttaattaccttccggataatgatttatttaaaactccttttcactgatggagtatttaaaatgaaaacattaagagatgaagttattaccagtacctggagtcgggcagatgctttaaaagtaagggccgacgaccctacgacgacacaacctcttgtctcaattgattttccagttatgagtgatgacgtttttatatgggacactatgccactacgtacgcttgatggaaacatagtttccgtcaacggctggtcggtaattttcacactgacagctgatcgtgaaccgcaaaaatatcttgatgcagaagggaactatgatattgatcgcgactggaacgatcgtcatggtcgcgcacatatttgttactggtacgcaaaagatagtaagaactggatttttggcggccgcgtaatggcggaaggtgtttcacctaccacccgtgaatgggctggcacaccaatactgttaaacgaaaatggtgatattgatctttattatacctgtgtaacgccaggtgcgacaattgctaaagttaaggggagaatttcagctgatggaaatggtgtgtcattacacggatttgacacggtaaaacctttgttctctgctgatggcgtattgtatcaaacagaagagcaaaacacctactggggattccgcgatccttcaccatatattgatccagtgagtggccgtttgtttatggtttttgaaggtaatatcggtggtgaccggggctctcatgttattacgacagaaaatatgggtgacgttcctccgggcttcagtgatgtgggcggagctcgtttccagaccggctgtatcggtattgcggtggcaaaagatttatcaggcgacgactgggaactgctgccaccgcttatttcagctgtgggggttaacgaccagaccgagcgacctcattttgtgttccggaatggtatgtattacctctttaccatcagtcacagtttcacctatgctgatggtttatcaggccctgatggtgtgtatggttttgccagtgagtcactttttggcccctatgcaccgttaaatggttcaggtctggttctcggaaatccgtcatcacagccttatcagacatattcgcattacgtgatgcctaacggccttgtaacgtcgttcattgataccatccctaacagcggtgataagtatcaggggggcataccgggtcggtggaacagaggctccgactgtccagattaa

SEQ ID NO: 194537 - DNA, 273 bp, Klebsiella oxytoca
atgctcgccctgaactccgggcacactgtaggtgatatcggtcacccagacctgattgggctttaccacggtaaattcacgctgcacgcgattaggggcaacaacagaaggcctgccagctatccggcgtggtgctttatagccacgcactgctttgatccggttcagttgcataatgcgacctacacgatttttaccgcaggtttcaccgatttcgctcagatcaccatgaacccgacgatagccatacacgccaccactcagtgcatatga

SEQ ID NO: 194538 - DNA, 636 bp, Klebsiella oxytoca
atgactcaacccaaaagcacactggttcgtgtcgccaatctcctggcaatggacatcaataccggtgaatttcaacccggttcatggctgaaacaggtggagctggctgaacgttaccattgccctcgtagtgaggtacggcgcgccctcgaccaactggttattgaacgacttgtgcagcatgtgccaaaccggggctaccacgtctataccccgaatgaggaacaacgtcgcaacatttccgcaatcagggcaatactggaaagcgcctcggcagaggacatcgttgaacacattcaatcgcatcagttggatactctacgccagtgtgcagagatgtttgatcacaacacccagtacggcacgattttacaacagtatgagtcaaacctggccttccatcgcgctctgcttgccccctgttccaacatggatatgattgaactcatttttgaattacgcagccgggttccatccgccgcgctgggacaatggaactcacatgcaaggatcgtacaatcgtcggaagaacattttgcgatggtgacagcaatagagcatcgggattcggctttgctggcacaactcatgcgacaacacatcctgcaagaagataatccacgcggacgaatttga

SEQ ID NO: 194539 - DNA, 861 bp, Klebsiella oxytoca
atgcaaaatactgatataaaaagaaatgcagaagatgctgccgtgcgtggcctggcgctttactaccgaggcagcaccaccatcttttccagccagcacgatccacgctttcagtattgcctgtatgttccgcctggttttgatgatgacaaaaccggctaccgcctgattgtggccatgcacgggaccggtcgctcaatggtgcagtatcgtgacgctttcgccgagtttgcccgctacaaccgctgcgtcgtgctggctccgctgtttccggttgggccgttaggcgacggcaattcccatggctttaagtacatcatcgagcaggatattcactatgaccaggtgctactggcgatgatcgatgaagtcagcgctctgctggaatatgacttcggcaggtttctgctgtttgggtattccggcggaggacattttgttcaccgctttctctacattcatccggaaaaactgcgcgctgtttctgtcggcgcaccgggttccgttacgttgctcgatgacagcaaagcctggtggcctggcatacagaattttgagcagattttcgggaagccgctgaattacagcgccttgcgtgacgtagctgtacaactggtggtggggaaggtggatctggaaacctgggaaatcacccataagcccggcggtcgctactacatgccgggatgtaatgatgccggagttacccgcattgaacgcaacaccgcgttgctgaatagcctgcgcgaacacggcgtcaacgccgttcaggatattgtcccgaacgtcggccatgacgggatgaaagttctggagcaggtaaaagatttcttcctgcgggttttgcaggctaatcgctga

SEQ ID NO: 194540 - DNA, 1107 bp, Klebsiella oxytoca
gtgacgcaacctttcccattcattgaaatttccggcacgccctatgagcgcggctgccagtatggcgaacaagcaaaagcgcgcattcacgccagcgtcgccatttatggcgaccagcttgacgccctgcacattacacaggcgcagcgcgaagcgctgatcaacagcttcagcgccataatccgcgattttgacgccgattatcttgacgaaatgcggggcattgccgcggcgtcaggcgtgccgctggaagccattgtgatgattaatgcccggaccgaagtgatagcccaggctcgtaacatgcaacgttgtgggacgccgcatgatgacgcaataaaagacggttgcacgggggcggtgatcctgccggaacgcagccatcatgggaagctcatccacgggcagaactgggactggcgcgccgaatgcgcagagagttccgtggtggtcaaaatcaaacgcgagcagggaccggacgtgctcaccttcgttgaggcgggaggccttggacgtagcggaatgaacagcgcgggaattgccattaccgctaactatcttcgctgcgagcgtgactatcagcagcagggtgttcccctgtcgctgattcgacgcaaagcgctggaacaacaacatatggcgctggcgatgaaagtggtcgccaccacgccgaaatcctgctccaacaatatgatcctcagcaccaaagaaggttttgccatcgactttgagtgcgcgccggatgaaagcttcaccctttacccgcaaaacggtctgctggtacatgccaatcactgggacagcctggcggcgcgctgcaaagtgtgcgaagaggggatcgatgcgtcgccggattctctgtatcggggatggcgcgtcagcgaattgctgaaagccatagaaaagcccggcgaagaggcgatgaaaaacgcctttttcgatgatttcggcacgccatattccgtgtgccgcccgccgcgtcccggtttcagcagcgatctctctgccaccgttgcgatgattgttatgacgcctgcggatggtgtgatggatgtagcaccacttccggcgctgaaccgcaactttacacgttacacgctcgactaa

SEQ ID NO: 194541 - DNA, 1545 bp, Klebsiella oxytoca
atgaaaaagtttttatctgcggtagttctgcttatgccgggactgatggcgcaggcggcagacaataatgtgatccgttttgccctgaatcaggatatccgaagcagccagccgggcgtgaaccgtgatggcaacaccgatgatgtattgatgcacgttgtggagggtctggtcgggtatcgcgaagacggcaccgtcgggccgatgcttgcctcatcctgggacgtcagcgatgagggaaaaacctatacctttcatctgcgcgaaggcgtgaagtttcacaatggcgacaccatgacggcgcaggacgttgtatggagctggaaacactggaatgacccgaagactcagtggcgatgtttgcgtgaattcgacggcagcggcctgattcatgtgacggatgtcagtacgccggatagcagcacggtggtgatgaaacttgcaaaaccggtagcgttgtttcttgatacgctggcgcgtaccgactgcggtgccgctgccgttatcagcccaaaatccgtggcgtcagatggctcatggggttcgccgataggtaccggccccttcgtgttcggcgactggaaacatggcgaatatgtctccctgaaacggtttgcggattacagcgctttgccgggtaaacctgatgggtttgtcggcggtaaaaaagcgctggtggatgaagtgcgctttatggccgtaccggatgcggcgacggtaaaagccggtctgcaatctggcgcggtggatctggctcaggtcagcccgattgatggcagcgatttgaaaaaagaccccaatatcgcccttgaagtggcaccgaacgcccagcgtcacgtgatgctgattcagactgacgatccgctgctgaaaaacgtcaagctgcgccaggcgattgcctccgcgctggacagtgaacagatagctttgggcaccagccagaatatggctcacgcatcaaactccaatatttctgtggcctcggcgttttacagcaatgtgcagaaacaaggctacaagtacgatccggcgcgcacccgacagttgctgaaagaggccggttataagggggagccgctggagattattgccaacaaacgcgccacggtaccgagttttgatatggcgattatcattcaggcaatgctgcaaggagcgggcataaatgcgcacgtcacgacgatggagtgggcgacgcagctggaacgttatcagtccgggcgctatcagatgatgaccttcacctattctgcgcgtttcaatcctgcgctggcatttgagcagattaccggcgacaaaaccaaacagaaacgcaaggtatggggcgagccgcaggccattgcgatgaccgataaactggccacccttgacgatccggcgcaaattcaggcgctgacggacaaactccatcagcagatgattgcggatgtcccgctaattatcttctatccggggctggatattgtcgcgcaccgtaaggctatcagcggctataaatcctggctggcagcagcggcgcggttgtggaatgtcagcaaagcctga

SEQ ID NO: 194542 - DNA, 942 bp, Klebsiella oxytoca
atgttgcagtttctgcttacccgaattttaactgccattcccacgttattactggtgacggtgctggtctttttgctcacccgcatggtgccgggcgacccggcgctactgatgctgggagatatggcgacggaagccagcctggctgatttgcgtcacagcatggggctggatcagggaatggtacagcagttcattatctggttcgggaatgtgttgcagggcaattttggccattcgattcagagtggccaggatgtcttaccgcttatcctgcaacgcttcggcgtgacgctcagcgtggtgctggtggcgattgtgatcgcctcgctgctggccatccccgccggaatgctggctgcatggaagcagaactcaacgctggataccgggctggtaatgttttccacttttttgctctccattcccagcttctggatggggctgctcattctgttgctgtttggtctgaagctgggttggttacccgtggtggggtatgtctcgttaagtgacaacctgaaggcaggcgtgttgtatctgctgatgccggtgatgacgcttgtgctggtggaggtcggggcgctggtgcgcatgatgcgcgccagtacgctggaagtgctgcggctggattatgtttcccacgcccgcgctaaagggctgcgcgagagtactgtcctgtcgcggcatgtcttcccgaatgcctttggtccgacgtggacgctgattggcttaacgcttggcaacctgctgagtggcgttgcggtgacggaaacggtgttcagccttccaggtctggggcgcctgctggtcgatgccatttatgctcgtgattatccggttatccagggctgcatgttgtttatcgccacgctctatgtgctgaccaatctgctgattgatgcgctttatccgctctttaacccgagggtttccgcctga

SEQ ID NO: 194543 - DNA, 819 bp, Klebsiella oxytoca
atgaaaagacgaatcgctctcgcgcccaatgcgctgctgggtatgacgttacttggcaccatcgtactggcaggcgtggtgggctttttctggacgccatttgatcctggccggataaacatccttgcacgcctgcaggcacccggcagtcagtttcttctcgggacagatgaatatggccgcgatgtactgagccggctgctggccggagccagcgccagcatgactatctctctggtgacggtaagttttgcgctgctggccggcattgtcctgggccttatcagcggctatctgcgcggcgtgttggaccgcgtcatcatgatggtgaccgatacgctgttggcattccctgggattctgctggccttggggttgttaagcattctcggcaataaccgctacggcatcattctcgcgctggggctggcgtatacaccgtcggtagtgcgaattgtgcgcggcacggtaatggagttgcgtgaagccgattttgtcgccgccgcacggataatgggtcataacgaactgaccattctgtgcaggcacgtcctgcctaattgcctcgcgccgctgactgtgctggcaacctcgatgctcggctgggtgttgatttcagaaagtgccctctcgtttttgggtcttggcgtgccaccaccggaaccgacctggggcaacatgctggcggcaagccgtagctatctggcgcaggcaccctggctggcgctgctgccggggggctgtatttctctggcgttgctgggcgtcaatatgcttggcgatgcgttacgtgattatcttgacccgaggatgcattga

SEQ ID NO: 194544 - DNA, 1641 bp, Klebsiella oxytoca
atgaacaacccgacaccattattgcaggtcaccaatttacgagtaactgcggcggagcgtgaagtggtgaaaggtatctctttttccctggcaccgcgcgaagtgctggccgtggtgggagagtctggcagtggtaagacgctggcgatgcgctccttaattaaactcttgccttcaggtatcagcagcctcgcggattctctgatatttgacggacaggatttacagcaactgagccaggagcaactgcggaaactgcgcggcgcgggtattggcatggtgtttcaggagccgatgacttccctgaacccggcgatgacaataggccgtcagcttgatgaaggtctggtgttgcatagccaactgacggagcgtgaacggcgcaaaaagattattgccatgctggagcgcgtgggcttaacggatgccgcgaatctgttgggttgttatccccatgagttttcagggggaatgcgccagcgcgtgatgattgccgccgtgatgctgctggagccgaaactgattattgccgatgaaccgacgacggcgcttgacgtactggttcaacatgaagtcatggagttgatgttgtcgcttacggctgaaaagggcagtgcggtgatcctcatcagccatgatttatcgatggtggcgcgctatgcctcacgcattatggttatggagcagggggagctggtggagcagaatgatagccagcgcctgttggcggctccccagcatccttatacccgacggctgctggaagccttgccggtgcgccagcccgccccggatcggcaacgattactggcggcggaaagcgtgatcgccctgactgatgtcgagattacctacacggggcgtaaagcgtggtttcgtccggcttcggtaacgaaggcggtgcagggtgttagttttaacgtgcgggcgggggagacggttgcgttggtgggggcgagtggttcaggtaaaaccactatcggcaaattgatcgccgggatgttaaaggccagcagcgggacgctggcatttcgtggacatctggtgacgacgtcggataataagctggtctccacctggcgtcgtgagtgccagatgattcagcaggatccgttctcctcactggatccacgtatgtatattgcacagctcctcgaagagccgcttctgctggtggagaccatgaatcgcagcgcacggcaacagcgtgtgcgggaagtgcttgatgaagtaggtctggacgctctgtttttacatcgctacccgcatcagttgtctggcggacaacgccagagggtagcgatcgcgagggcgataattcgccgtcctgcgttcattattgctgacgaacccacctcggcgctggatatgacggtgcaaaaacagattctgcaactattgaaaaggctgcaggccagttacggatttgcctgtctttttattacgcatgatcttggtgccgtggagcaggttgcggaccgtattatggtcatggaacagggaacgctggtcgagagtggttggagcgacgatgtactggacaaccctcaccatccctatacacagcgtcttctgcgctgcctgccaatgctaaaaccgctggaacagggtggatatcagctacagtgccagtctgcctga

SEQ ID NO: 194545 - DNA, 861 bp, Klebsiella oxytoca
atggatactaaagactggctaattatacgcacggtctgggagttgaaaaacatcactcacgccgcgcagcaactgcaaacttcccaacctgcactgagctaccggctgcggcagattgagcagaaactggacgtccggttatttgatatttcaagtaaagagctgatttttaccccccagggtgaacagattgcctggtatgcacagcgtttccttaaggactggcggcagatgagggagtcgctggcgctggcggatgatcgcctgcgtggtgaaattcgcatcggagcttatagtaactacgcggcttatcgtctgccagctcttatgcgtctctatcatgacacctatcctgaggtagagctgcggctggttacgggatattcacatgagatcatggctcagttgcagcgcggggatatccatctggcacttgtgcgtgaagagtccaactggaaagagggaaagcgtattgtggatcgcaatcactactatgctattaaccgtaatcctttcagaatagaggatttgcccatgttaccgcagatccgcatttccggagtgccctcgccctatgtcggtgacactatcgaccgttggtggaatcaacgttttagcaaggccccacatatcgtgatgacggtagataaaatcgaaatttgtatggaactggttaagcatggcctgggctatgcgcttttggcaaactatttggactttcctccagacctgcattcacaggtactgctcgatgttgatggagctccactgcccaaccactcctggctactgtatcgtaataacgcactcatccccccgcgtctggcacattttatcagactgtttgacgagggaggataa

SEQ ID NO: 194546 - DNA, 1215 bp, Klebsiella oxytoca
atgctacccgtcaccacgcgcgccagacgcgccggaaagcgttttttattgttagataacatgttgcttgagctgggtttttcagcagtattccccctgttgtctgtccactttgtcgaacagttggggtggcaggcagtggtcgtcggcggtgcactggccgtctggcaattcattcagtctggaaccgggatcatcggtggcgccattgctgaccggctaggcgccaaacccacaatggtggttggcctgctgttgagggcgctgggcttcgccgtgatgggtatcgccgacaccggcttgctcctgatgctgggatgtgcactagcggctttagggggcatgctgttctctccctgccgctccgcactggttgtcaaactgctgcgtccggcagaacgggggcgtttctactctattctgatggtggaagacagcgcttttcgcgtgacaggtgccctgcttggcagctggctgttgatgcactacgacttcctccacgtctgtatggcaggggcactgtttttcgttctggccgctgcctggaacgcatggaagttaccggcctataaactgtccagtgtacgctcgccagtactgactggtatggcactgccgctacgcgatcgccattttcgccgctatgttctgacactgaccggttactacattctcaatgtacaggtgatgctgatgctgcctatcgctatccaatccctcgcccatacgccggcggcagtcagttggatgtactcggtagaggcaatcatggcggtgacgctactttacccactggcgcgctggagcgaacgccatttcctgctggaacggcgcctaaccctcggattagggatcatgactatcagcctgttgtgtgtcggtttcactcactcgctgatgccgctgtttgtactggtgtttatcttctttctcggttcacttatcgcagaacccgcgcgggaaactctcagcgcagagctctcggactatcgcgcacgaggcagctacatggggtttagccgcatgggcgcagcggtcggtggcgcaattggctatagcggcggtggctggctgcatgacctgggcagggcgcaagatactcccgccctgccatggctgattctcggagtgattggctttatcaccctgctggtcatccatctgcaattccgccgcaaccctacccatagtatcgtccgggcggaaaattcctga

SEQ ID NO: 194547 - DNA, 1050 bp, Klebsiella oxytoca
atgaacaacatgaaactggcgcaattgcgcgaaagatttggcaatcatattgaagaaggaactatctacaaccccgacttcgccaacgcggcgaaagttcccgccgccagtcgcgctgaggggcacagcaaatggccgctcgccgatcctgccaccttcctcaactgtgcttacgacgcagaggcttacggtaacaagttcgcggatctcgacgtggcattgatcggcgtgccaatggatctgggggcaggcgatcgccccggttgtcgcttcgggccacaagccgttcgatcggtgagccgcgtcgggccctatgatcgcctgttcaacatcgcccctgccggtgaattgcgcgtcaaagacgtcggtgatgtcgcctttaccaacagccgcagtcttgaacagtgtcatgccgacatcgaagcctatttcctgcggattgctgaatcaggtgtcacaccgctgtcagtaggcggcgaccattccatgacctactctattctgcgcgctttgggcaaggatcgcccgctggctctggtgcatttcgatgcacatagcgatacttctggctcatacggcggcaccaagtacggccacggcagcccgttccgccaggcggtgctggatggagtacttaacccggaaaaatgcgtgcagatcggcattcgcggcggcggcgcgtaccacagtgagtttgctcttgaatcgggcatgaccgttatcttcatcgaagacatcattgagcgtggaatcgactacgccattgaaaaaatacacgaagtgatcggcgacagcgaagtgtacatcacctttgacatcgattcggtagaccccggctacgcccccggcaccggcaccccggaagtggggggtatgacgccgcgtgaagtatttcaggtgttgcatgccatggccggtatgaacgtgattggcggtgacgtggtagaagtggcgccgcagtatgacgccacctccaataccgcgcaaattacagctcaggtgcaatttttgcaactttgtctgatagcgctggcgaagcgacataaatag

SEQ ID NO: 194548 - DNA, 768 bp, Klebsiella oxytoca
atggaaaaactggttatcgacaatttcagcaaaagctacggcagcaatcaggtacttcgcggagtttcgctgcgcgcccatgcaggggatgtcgtcagcctcatcggtgccagcggctcgggaaaaagcaccttgctgcgttgcatcaactttctggaacatcccgacgacggcgcattcttctttgatggtcgcttgatcccgatggtgcgcgacaacaaaggcggcatgcgtatcgccgacaacgacatgctgactcatattcgtacccggttgtgcatggtgttccagcacttcaatttgtggagccacctcaatgcactggaaaacataatgttggcaccgctcagcgtgttgaaacaaagcaaagccgaagcgagggagcgagcgcagcactatatcgataaggttggtttgccacagcacgtagcgactgcatacccggcacacatgtcgggtgggcagcaacaacgcgttgcaatcgcccgcgcgcttgcgatggaaccggaagtgatgttgttcgacgagccgacttccgcactcgaccccgagctggtgggagaggtgctgaaagtcatgcaggcgctggcggacgaggggcgcaccatgatcgtggttacgcatgaaatgggatttgcccgccacgtttccagccaggtgttatttctgcatcagggtcttattgaagagcaaggcactcccggcgaggtgttggtcaacccgcagagcgatcgtcttcgaaacttcctgcacggcaatctgaaatag

SEQ ID NO: 194549 - DNA, 714 bp, Klebsiella oxytoca
atgaaagagatcctgcaagagtatggaatggcctatctgtggtatgacggctaccagttttccggcctgctggtcactctctggctgctgatactgtcgctgtcgatcggatttgttctctccctgccactggcggtggcacgcgcgtcaacggtgcgctggttgtcacgcacggtatggtgcttcacctacgtgatgcgtggcacaccgctgtatatccagttgctgattatctacaccggtgtgtacagcctggattttgtccgtgaactaccgccgctgaatgacttcttccgtaacggccttaattgcgcggtgcttacgctcggcctgaacaccaccgcgttcaccaccgaagtgttcgctggagctattaagggaataaattacggtgaagtcgaggctgcacgcgcctacggtctgagcggctatacgctgtaccgaaaggttattcttcccgcagctctgcgccgggcgctgccgctctacagcaatgaagtaatcctcatgctgcacgctacctccatcgcctttaccgcgacagtatcggacttgctcaaagttgcaggagatgtcaacgccgccacctatcagtccttccaggcttacggcatcgctgccgtgatttatctggccaccacctgcatttttatcgccctgttccgacagggtgaaaaacgctggctggcttttacccggccacgcggccagtaa

SEQ ID NO: 194550 - DNA, 693 bp, Klebsiella oxytoca
atgtttattccacagggatacgcccatatgctgctcgacggcatcctgattacagtgcgcctgtcgcttggggcactggtggtatcgatgctacttggtctacttatggcattggccaggatctcagcaagccggacactgaacgctatcgccaccctctataccactgtcattcgtggtattcccgatctggcgctgatgttgttggtatattacagcttacaaatcgggcttaaccaggtgacagattctctgggctggcaacagctcgacatcgatccgttcagcgcaggggtgttcacattgggcgtgatttatggtgcctacttcactgaaaccttccgtggcgccttcatcgcggtaccctgcggacaattagaggcaggtcgcgcattcggccttagcggttggcaatgcttccacctccttatgttcccgcagatgatgcgcttcgccctgcctggcctcagcaataactggttgatactggtaaaagctactgctctggtgtcgctcattggcctgtcggacgtcaccaaagcggcgcagaacgccggaaaaggctcaggccagttgttcttctatcttgtactggcagcgctgttctacctcctggtgaccaccgtttccagcctggtactgtggtggctgagcaagcgctacaacgctggcgtgcgcgaggcagaactatga

SEQ ID NO: 194551 - DNA, 801 bp, Klebsiella oxytoca
atgaatgcattgctacacaaaaaaatcgccatacggttattgatactattattttccaccttacctttattatctcatgcaacctcaagcgatacgctgagatttggtactgcattgggttacgcaccgttcgaatatcgtggcagcgacggtaaaatgaccggttttgaaatcgatttaggcaatgcaatttgtacccaactgaaaaaacagtgcaaatgggtagaaactgaaatttccaccatggtaccagcgttaaaagcccgcaaatacgacgctattcttgcctccatcggcgttaccgaagcgcgcaaaaaattactgttatttaccgataaagtccatggcggtggaacccgcctgattgcaaaagaaaacagtgggttatctccagatggagcacaactgcgaggtaaacgtatcggtgtggaacagggttcaagtgtggaaaacttcgccaggcagcgctgggctccccaaggggttgccgtcgtctcctacggcaaccaggatctggtctacaacgatctaatcgccgggcgcctggatggcatgctgaccagcgaagtgcaaggccaactcggtttccttgacactgataaaggcaaaggctttgccttctccggtcaaagaattcaggacccactgatcggtaccggcgtcagcgccatcgcggtagacaaaactaatactcaactggcaagtgaactcaacagtgctatcgccgccctgcgcgccaacggtacctaccagaaaatcgcttccaaatacttccccccctcaatcgacatatatcagtaa

SEQ ID NO: 194552 - DNA, 165 bp, Klebsiella oxytoca
atgcctgcgaaccgttttcccgccaatatgttgtgtctccagaagcttgaacgatggctgaaagaagttaataaacaatcgattggccatgtacatctggttcatcgcttttactgcgtgctcaccgtcaagacgaccatatcccgccagctttctgaccactga

SEQ ID NO: 194553 - DNA, 945 bp, Klebsiella oxytoca
atgaacttaaatgacaaggttgaaacatatggagtggatgcacttcatttttttcacaaaatacataagcatgaggcgtttttatcctattgtatttgtgctaattctgaatacaaagccagtgcgtttttaccagaacattattatttttgcgaccatatcaaaccaataacagatcttatgttcatactggaatgtgcaagacaggctgagacttatattgtacataaatacgaacgtcaatcagttgatactaagttcattttaaccggatggtcatgcgagttttcagagagctttgcaccagttgttgacttacagggacagtacattacccttaaaataaacacagataacacacgtcgtgtaagagacaaactcctttcacaggaatataaaatcaacgtagtcctaaatgatatgtgtatagcaatgattcacatgtcagtaaaatacatgacatcagaagcgtatcataaaatccggaatgaaataaataacaaaattacaaccagagaacaattagtttttgatcaaacgctgaatgtgccccctaaatatgtatttcgtaaggccggtgaaaatgttgttatcagaatgccagaattcaaaggcgataaggttacctctgtacttacagtaaatatgaataatacggcctattttgaccatgtacaggatcattatcctgcaatgattttaatggaagccggtaaacaaaactgtcagctttgggtttccaggtttagctcaggaaaaacaccagtgttatcggcaatgaaaagcaaatttttcctttatgctgagtttgacaaagaagttcaaatcattgcagtgaaagtaccttgtaagcaagaaaataaaattatgtttaatgttctgttgaagcagggaggagtgaatatagccgaaatgacgtattcattcaaaatgtttgatatgtag

SEQ ID NO: 194554 - DNA, 231 bp, Klebsiella oxytoca
atgacagcggtaacagataaggttgtaaagattcttgtggaaaattttggactcaacgaactggatgtaaaagagaataaggatctcgaagcgcttggtgttgattccattattacgattgaaatccaactcgatctggaacgcgagtttggccttaaaatcccggatggcgatattttgcctagttttacagtgaaagatatttctgaatatattcagaataaggcgtga

SEQ ID NO: 194555 - DNA, 1236 bp, Klebsiella oxytoca
atgccagatagtaataaacgcattgcgattaccgggacaggtttagtatgtccggcagggctcaacgttccctcaagctgggattttgttctcagtggcaagtctgcggcagctaaatgcagacaacttgaagggcttgaaattgattacgcatgcagcatcaatgattttgatcctgatatattactgggacgtagtctggcgaggcgtattgaccggtttatccagttggcactcgttgcctgccgcgaagctttggctgaatcggggctagatccagacaaatggaatggcagacgtgttggtgttgtgaccggaaactcactggcgggtattggacggttcctggagcaacagcaagttctcgaatcagaaggagatcggatggtgtctccttccactattcctggggcaatgatgaacatggtcgcaggccagatcgcgattgagtgtcatgctaccggtcccagcctgctcgtgagtactgcatgcgcatcaggtattactgctattgatacagccagccagtggcttaaagaaggtcgatgtgatgtggtgatcgctggtgccacggaagcgccaattgttcctttgatagttgccggaatgaatcgtctgggggcgctgtcaaaaaatcctgatataaaacatgcaagcagaccatttgaccggaaccgggatgggtttgttattgcagaaggagcaggttttgttgttctggaaaccgaagagcatgctgtcgcaaggggacaggaaatactggcatttgtgagtagtgccggaacctcaactgatgcatatcatgttacgactcctgaacctcagggacgggggttgtctgccgccattcagcaggcgctggacaatgccggattaaaaggaaaggatatccagtatgttaatgctcacggaacatcgacacgtctcaatgatgtcacggagggaagagtcattgaaaaagaaattggacggcatgcccctgtaacatcattaaaaggtgctataggacatacattagcagcagccggagccgtggaaacagtattaactattctttctgttaaacacggtattattccaccaactgcaaaccttatcactttagaccccgaaattaatcttgatgtagtgtgcggtgaacctcgagaaataaaaatccagcatgcattaaaattgtcaatgggctttggtggtcataatggtgcgcttatcatttctgctaacgacaaggactga

SEQ ID NO: 194556 - DNA, 690 bp, Klebsiella oxytoca
atgaatacactgaataaaataaaacttgttgccgttgacgttgacggtgtacttttaaccgatacttacagtcctgctattaaatcatttgtcgaacaacatggtggtgtttataccccagaacttgaacggctggtctggggatccccacatattgctggtggacacaatatgtcgcttgcctgcaaattaccctggtcggcacaaaagaccattgaagcattctttcatcaccatgcgaaatatattgagacaaatcctatcgagattgtccctggtgctgagggttttctgaaattattgcaggagtttaatgtcagggtgacttcctatggtggacggacgaaagaatatatttttgacaaatatatgccttcgctgggaaaatactttgataaagacaaaccttatattgatactaactctatcaggccgggtataatggagataaccagagatatctttaagttaaactttgatgaggtacttttcattgacgacattaacagaatggctgaggttgcaaaattttacaaaaccggttttataggcacgccagtgacagcgtatcagaatgaacaaatgcaggaaacgggtgtgaaatatatcgtcccgtccgtaaaagaaattacccgggatatgctgattaagatagacgtagaactggcgtcaggctgtcactggtcatga

SEQ ID NO: 194557 - DNA, 1026 bp, Klebsiella oxytoca
atgaaacaaatcactcttggacattcagctctgaccgtcacggcagaaggttacggctgtatggggctgtcagagttttacggccccacgtcggaaaacgatgctgaacaaatacttcacagcgtaattgataacggggttaattttcttgataccgctgatatttatggctacggacataatgaaaaactcctcggaaaagttctgcaaaactatgcagaagatgaagtcattttggcgacaaaatgtgggatagtccgggacatcgataatccccgtcatcgtgaagtcaataacagtcgggattacattctgcgttgctttgaacaaagcgccagaaggctgggacgaagaattgatctgtattatctgcaccgggtcattcaggaaccggcctcgctcaaggaggcgatggctgcaatgcaccaattaaggtcagatggccgaattggcgcaattggtctgtcagaggtcagcactgacacaatccggtttgcacacgaacagttactggaattgtccggtggtcagtttggtctgagtgcgatccagacagagtattcactgatgtcgcgcgatattgaaaataatggcgttctggagacctgtaataacctgggcatttctgtcgtggcttacagtcctgtaagtcggggattgctcagtggtaaattgcatgacctgagtactctcgctgaaaatgattcacgccgctatcttcctcgttttatgggaaataaccttaaggaaaacaatgatattgttaatgagttaaagacattcgccacagtcaacggaatgacgccagcacagcttgcgctggcatggatcatgaacaatgaagccggaattattcccatccccggaacccggacaccacagtacctggatgaaaatatccgggcggtggaaatagcgttaacgtcagagcagatttccacgataactgaaatcctctcagggcatgaaaccgcagggacacgatatcccgaagagttcatgaaagcttacggaatgattaaataa

SEQ ID NO: 194558 - DNA, 1182 bp, Klebsiella oxytoca
atgacgggttttacagatatgactgaggagaaatcaggattgcctgtatttcagcttggtattatcggcgcagcgctcttcctttcaatactgactgaggcacttccggccgggtttctccattctctggagcagtcattccgcgtcagcgcttccgaagcaggacagtgggtgacactctatgctgttggttctctgctctctgctgttccgttaacgctggcaacacagcactggtcaagaaaaaaactgctcctaatcacgctggggggatttgccgtatcaaacggcatcaccgcagcggttgattcttttttaatcacgttgttcgcgcggttcatggccgggattttcgctggcctcttatgggcactggctgccgggtatgcgggcaggatggtcacgccgtcccggcagggacgagccataactattgttatgctgggcgttccgctggcgctttctctgggagtcccggcaggaacgttcctggggagtatttacggctggcgtaccgtgttttataccatgacactgctcgccggactgttatttgcggctgggatgctgacattaccggaacaaccggggacaagccatgctgagcgattttctgtcgggaaagtggtatccatacccggtgtcaaaaccatattactcgcgacatttattttctcacttggccataatatgatgtacacatatatatcgccttatctgacagaatcactggatacccgttatatcagtacatttctcctgatatttggggtaatggcggttatcagcatcgttatcacagggatatttattgacagacatcttcggcttcttaccctgagtggtctgtttttatttatggtgtcttccatcattttagcttttttttatcaaaatatttatttcgtgatgagtggtgcttttttatgggggctggggtttggaggcggggcaacgctgtttcagacggcttctgcacgaacatcaggtaaagctgctgatatagcacaatctcttatggtcaccgtatggaatatggccattgccggtggggggcttgtcggaggaatattactgtcatggtccggcgtcctgtcacttcctgtcgtattaaccgttttgctggtattttgccttttcatcgtcagggcaagtaacgcaaagggatttttccggatgtag

SEQ ID NO: 194559 - DNA, 720 bp, Klebsiella oxytoca
atgaatttattgattgatttgcatatccatactcatgcaagcgcacatgcctacagttccgtatatgaacatatgatggaagcaaaacgtaaaaatatgctggcaatgggtatcacagatcatgggccggcacttgatgattctcctcacagatggcatttcctcaacatgaatgccatccccgagcgggttcatggggtgcgtattctgaagggaatagaagccaatatttttgaagatggcaggattgactgtgacgaactcatggctgaaaaacttgattatgttatggctggattccatgccccggtttaccctccgtgttccgacactgtaaagaatacagagtgcctgatgaaagtgataaatcacctggcagtgaaaattattgttcatcccggtaatccgcagttcccggttgattaccgggaaattgctattgaagcagccagaaataatgtcgcgcttgaagtaaacagcgggtccgctgttgctcgtaaaggaagctctccaaattgtcgcaaaattatcggggaagtgatgaatgccggtgggtatatttctgttggttcagattctcatttctgttcccggacaggggatcttgatcacgcaattaacctgcttgaggaacagcaggtcccgacggaaagaattattaattcatcacttgcattaactttatcctttcttgatataaaggaagcattgcactggtag

SEQ ID NO: 194560 - DNA, 882 bp, Klebsiella oxytoca
ttggataataagctactgaaatcattcattatcctggcacaaagtagaagctaccgcgaagccgcagaaaaactgtttattacccagcctgcattaacaaaacagataaacctccttgagcaggagctggatttatctctttttgaacgtgataatcatgggacaaaactgagcacagaaggagaaatgctttatcgtaatgctcttgtgcttgatgaacaaatcaatcactttatatgtgtcgctaaaaaaattcgcaccggaaaaacggggaatcttaatattggatatacttcatcctttctcaatattgttcctgatatggtcaatgcatttaaccgtcagtatcctaacattaatataaaacttactgagatgtcttctgtacagcaggagcaggagttacttaaagggcgtattgatttaggctttatgcgaaaatcagaaaatgattcgctatcttttataccgctcgggaatgactatttatgtgttgtgacacatccggacatcagaaacaggaaaatgaatattaatgaattactcgatgcaaataatcttattttactgagtgagaccagtaatccggaactctaccatattgtcagtgacttcctgaggaaacacaacctcaacgggaaaccttcccagcacctgacaaacgtatacagcgtgctggctctggttggctcaggaatggggatctctgtcctgccatacagtataatctcttttttaaaatcaggctttaattgtcaggcattatccggatgtcagagtgaatggttactgggccttgcatggaataaagaccttgtgctccccctgcgcacggagttcatcaacagtgtggccgaaaacaaccacaatgaggatgtataa

SEQ ID NO: 194561 - DNA, 183 bp, Klebsiella oxytoca
atgataaaatatattattatcggaattttgtccggagggttgttctttagcctatgggtattatggaaaattatattttatggtgtgtcagtgaatattgtttatatgcttcccattattctggtattcgtcacgggtgctgcgggtgttcgcctgataagcaacagaccgtcgccacaataa

SEQ ID NO: 194562 - DNA, 219 bp, Klebsiella oxytoca
atgaatactaactctgttagtaaattacaagttaaatggtggggtgctctactgactgtattttttacaacgcttgtgttttttatttcagatgccattggcgtatctgacaatattcatccggttattcgcccgataattcttatcactattttagttgttatactgtcgggcataaaaataatttatgatcgcccgacgccaggaaagaaaccatga

SEQ ID NO: 194563 - DNA, 465 bp, Klebsiella oxytoca
atgaagatctactggacgcgaaaaagtattcctgaacttgcagagcttcctcgacagctcaggaagaaaaactttaaagatgcctataacgccatatcgactcatattgaatactgggctggggcagcgattgcttttatctggatattgttctttttcagagtatatgattactttttaccaaaccagaatacatttccgcgtgatattatcagaactttatgtgtggtctgtcccggaatcataatctggtatcagtttattatttatggaatgagaaaacattatcgccatatactggaaagaggaaaaaaaacagatgatgaaagtgaatcagagaggttgataagggaagcggacaccagagagtattatcagtggagaaatgtgcgtcgttttatccttgtgctaaccattattattgtctttttatccgtactgatgctggctaaaacagtaaggtag

SEQ ID NO: 194564 - DNA, 756 bp, Klebsiella oxytoca
atgcgtcatgcagttcatcaggggttaatcgacagcaatccggcggccagtcttgatggtgtgacaacgccgcccgtcagacaccactatcctgcgctcccgcttgagcgccttcctgagctgcttgaacgtatcgaaggctatcatcaggggcgcgaactgacccgccttgctgtcctgctgacgctgcatgtattcatccgctcaagtgagctgcgtttcgcccgctggtcagagattgatttcagaaaccgggtctggacgatacccgctacccgcgaagccattgcgggcgtgcgttattctggtcgcggtgccaaaatgcgcacgtcacatatagtccccctgtcagaacagtccatcgccattctgaaacagattaaggagatttccggtgatggtgaactggtcttccccggcgaccataacccgtataagccgatgtgcgaaaacacggtgaacaaggcactgcgcctgatgggatacgacacgaaaaaggatacctgcggtcatggcttccgggcaatagcatgcagtgccctgatggagtctggtttatgggcacaggatgcagtggagcgccagatgagccaccaggagagaaataccgtacgcatggcctatatccaccgggcggaacatctggaagcccgtaaggcaatgatgcagtggtggtcggattatctggatacgtgccgtgaagcctgggtgcctccttacatccggggtctgcaaaacagtaataccgcagcctga

SEQ ID NO: 194565 - DNA, 1221 bp, Klebsiella oxytoca
atgaagccggaacattctcacactgttattgctcctgaaggtcatcacaccgatggacagcaactgacaggaaagattattgcgttactggcaggtctttcggcaatcggcatactgtccactaacattatcctgcctgcatttccggatatcggggagcagttaggtgtgtcctcacgcgagctgggtcttacgctatcgggattttttattacgtttgccctggcgcaactggttgtcggtccgcttgcggatcgtttcgggcgtaagaaactggtactgggcggcctttcggtattcattgtgggaaccgtcgtgggagggcttgccggctcactggaaacgctgatcactggtcgcgttatacaggctctgggtgtgtgcgctgctgcggttctgtctcgcgccattgcgcgtgatttgtttacaggtgaaaaattagcgcgggcactgtctcttactatgatagccacagcggcagcacccggcttctcgcctttagctggcagtgtattagctgccacgctgggctggcgggctatcttcgttgcagtgggtctggccgctttcgctgttgccgtattttatgccagtgcactgggagaaacgcaccccgctgaacggcgtgccccgcataccattcctggtgtgatggtcgcgtacgttaagctggccttaaataggaaatttatccttccggcactgtctgtaagcctgttaatgagtggtctgtttgcatcatttagtgcggcccccgccatcctgatggaggggatcggtttgtcatcattacagaccggtctgtattttgcctcaacagtgtttgtggtctttgctgcaggaatggcatcaccacgtcttgcccaccgctatggagcgcaaaccattacggtggccgggatcctcacggcattatccggcggtggtctgttgctgacggggtcctcagcaccagggctgggctggtataccctgtccatggtcatgttcctctggggtatgggactggctaatccattgtgtactgccatcactatgggcccttttggacatcaggccggtctggcatccgctttgcttggttttctttctatgggagcggcagccgtaacaacatggctggcctctgtgctggttttccccgcagttatctcactgggggtcatacaggcagtagcgtgcctgatatcgctgttactgttcctgttaagaaggaagtaa

SEQ ID NO: 194566 - DNA, 1290 bp, Klebsiella oxytoca
atggcgctcgacagtcacaaacgaatagtcgtcaccggctgtggcattatcagtcctctgggatgtggaacagaaacagtctggcgcaggcttctggaaggtcgctcggggataagcagcctctcctcagagctcggtgaaggaacagggatatccgtcgcagggcgggtgcctgcactttcagaagatccggaggcggggtatgagcctgagcgttttatacccgccaaagaacgcaagaaaatggaccgcttcatagaattcgccctcattgcggccagggaagcgctaacgcaggccggctggcatccgactgatgaataccagcagcaacgtacggcaaccattatcgcatcaggggtgggcgggtttggcgccattgcagaggctgtccggaccaccgatgccagaggaccccggcgattatcaccgttcaccgcgccctcctttctggccaacatggcagcaggtcatatctccatacaacatggtttcaggggaccgctcggcgcaccggtcaccgcatgtgcagcaggcgtgcaggcgattggtgatgcagcccgtcttatcagaagcggtgaagctgatattgccatttgtggcgggacagaagccgcaattgatcgtgtctctctgggatgcttcgccgcggcacgcgcgctttccaccggatttgcagacagacccggtgaagcgtcaaggccctttgacctcgatcgtgacggatttgttatggcggaaggatccggattactggtgattgaaacccttgagcatgcgctggcacgtggtgcgaccccacttgccgaactggtggggtatggtaccagtgctgatgcctggcatctgaccgccggtccggaggacggcagcggtgcccgacgggcaatggaactggcgctgggccaggcagatgtgaaggctgatgatgttcagcatatcaatgcgcatgccacctcgaccccggtgggggacagaggggaactggcggccattaagtctgtgttcgggagtgattccggtgtggccatcagttcgacaaagtctgctaccggccatttgctgggggctgcaggtggcgttgaagccatctttacggtgcttgccctgcgtgaccagatcatcccgcccacgctgaatctgcataacccggatgaggcggggcaggggctgaattttgtggcattaaaggcgcgtcctgctgccataacgcacgccttatcaaacgggttcggcttcgggggcgtcaatgcaagcgttctgtttcgccggtgggaaacctcaccatga

SEQ ID NO: 194567 - DNA, 1107 bp, Klebsiella oxytoca
atgctcaggctcaaacctgtcactattgctttatgcctgctgccgcttgccctggtgggctgcggcgacacttccggcaccgacgacccccgtacccggccacctctggtcagggcggcaaccgtggtgagtgctgacgatgcctcccgcgcttttaccggtgttgttgtcgcccgggttcagagcgacctcggtttcagagtgcagggtaaaatcctcgaacgtctggtggataccgggcagaccgttaaacgcggtcagccattaatgcgcctggatccggttgacctgcgcctgcaggcacaggctcagcaacaggccgtcgcggccgcgcgggcccgggcaaaacaagctgccgctgatgaggtgcgttatcgtggtctggtcgcggcaggggctgtatcggcatcggcttacgatcagataaaggccgccgcggatacggccagagcggaactgagtgcggctcaggcccaggcgaatgtggcgcaaaatgcgacgggctacgctgtattgcttgccgatgccgacggcgtggtcgtggatacgctggccgaacccggccaggttgtcagcgccggccaacctgtggtcaggctggccagggccggtcagcgtgaggccatcgtgcagttgcccgaaacgctacggccagccccaggaagcgaggctcaggcaacgctctacggtaccggaaaacagtcttctcctgcgaagctgcgcctgctttccgatgcggctgacccggtaacccgtaccttcgaggcgagatatgtgcttgagggggcgctggcaggcgcaccgctcggctccaccgtgacgctccatcttgcggaagataaaacagcccatcaggtgatgcaggtgcctttggctgccatctatgatccaggaaaagggccgggcgtctggagtatttcaggtaaacccgccagagtgtcatggcgctccgttcaggtgctgggactgggggacgatgcggcaagggtgaccggttcccttaaaccaggagaacaggtggttgccctgggggcgcatttactgcacgacggtgaggccgtccgcaccgaacagcgcgacgtcggcgtcgccgggagccagccatga

SEQ ID NO: 194568 - DNA, 615 bp, Klebsiella oxytoca
atgaccaagcagacaaaagtacagcccacacgagggccatcggaccacagcgtccgcgatcaggtcgtggaagccgcgactgagcatttcgggcattttggctatgagaaaaccaccgtctctgacctggccagggcaatcggtttttccaaggcttatatctataagtttttcgactccaagcaggcgatcggcgaggtgatctgcagcaaccggctgtcgatgatcatggcgattgtcgactcggcgattgcagacgcgccgaccgcctctgaaaaattaagacgtttattcagggcgctgaccgaagccggcagtgacttgttttttcacgatcgcaggctttacgacattgcagcggtggctgcccgcgataagtggccctcagcggagaggcatgaagagcgtctgcgacagctgattgagcacatccttgttgaagggcggcagacgggagagtttgaacgcaaaacgccgctggatgaggctgcagatgcaatatacctggtcatgcggccttatgtcagtccggttcagttgcagtacaatctggaaacggcaccggcggcggcggcgctcctgtcatcactcatcctgagaagtctgtcaccctga

SEQ ID NO: 194569 - DNA, 1458 bp, Klebsiella oxytoca
atgttcacccaacgaactcttgcactggtggtgagcagcagcttactggcgggttgcgccgtcgggccggattatcatcagcccgacgcgccactggcgaaacgctatcaggcacagtctgccgtccagcagagaaacgcctccagacccgccagttttgccgtctggtgggaaggcttcggcgatcctctgttaagtcagtatgttaccgacgccctcgcccagaatctcgatctcgcgcaggccacggcacgcatggcgcaggcccgcgccggactgagcatggccaccgctgcgttgttaccgtcggggaacatcagcgggcaggccgcacgcgcctatcagtcggccgaaaccccgctgggtcaggttctcagcgcgacgccggattataatcgctacggcaacagctatgaaaccgatctgaatgccagctgggagattgatattttcggggggctgcgccgcggacgtcaggctgccctcgcggactatcaggcttctgaggcgggtgtcaccgcgacccgcctggccgtcgccgctcagactgccgatatctatatcaccctgcgcggattacaggcccggctgaccatcgcagagaaacaggtcagtacccggcaggacctgctggaaaaggtccaactcctgaacgctaaaggactggctccggcgtatcaggttcgccagaccgaaggggaactggcgcaggttcaggcaaccgtgccggttctccggacggggcttgatgcggcgatgaatgcattagatgtcatgctcggcacgcctcccggcacccatcgcagtcagttagcgttgccgggtgccataccgcaggcaccacagatcacctcaacaggcacccctgccgacctgctgcgccgcagacccgatattatcgtggcggaacgccatctcgccgcctcgagtgcacgtataggcgtcgccatcagtgagtattatccgaagttctcactcagcgcattgctcggcagcgccacggccgtctcgagcggcaacatgttcaccggcggggccagtcagtcagccggcgtgctcggtctgcgctggcgactcttcgattttggtcgcatcaatgcacaaatagaccaggcgaaggggcaggaagccgaagcgctcgccgcctatcgtctggctgtattacgtgccactgaagatgtcgaaaatgccttctccgccctgatcaaccgtgaagcacaggcagcaatgctggctaacggtgaatccgctctggccagcgcccgcgaatcgtcttttatcgcctggcagcagggaacggccagcctgattgacgtccttcgtaacgatgaaaccctgttgcaggcttctgatgcaaggatacaggcccggacagaatctgcccgtgcagcagtggctgcgttcagggcactcggtggtggctggcagccaccggaaaccgcgataaaggcaccataa

SEQ ID NO: 194570 - DNA, 789 bp, Klebsiella oxytoca
atgaaaagaacaggcattctggatgtggacgtgttaactgaaaagctggtccggggattgtttcttgccgcacctgatgcacaggtatttctgttgtcgggaaacaatgaacgggcgcgtaagctggaaagagaatatccctgctggaccttagatacttatcaggatgtcatcgatgaggctgatgtcatcattaccggcgtggatcgtcatgctctggatgaaattgcaaacaaggtgcaattgagaagcacgcaaacactggtgtcactggtgcccgggctcccgatacagcacctgcaaacgctgttcagacacaatgactgtgtcagactgatgctgaccttagccgctgaaatcaataaatcaagcgtgctcctgactcccgctgaccaggaggtacaacgcttattttccctgctggggccactgaccgtattgcctgacgagtcggactttgattcagcaacggtaaacctctgcatgaccagtggcttctgtttcctggcggaggggttacagtgctggctgaccgcgaaagggatggcggatgacactgcacggcaactggttcttaacgggctgaaaggctgtactgaatatgcaaattttcgcttgtccaccaaccagggcgatttaggggatctggggcatgatatgtcatcagcggttccctttatgttgcaggggattgaagttctggcccagatgcaggcgcttaccccatggcgtgctgcttccgatacgcttttatcagccattcagagaaaaaccggctctttgaaatga

SEQ ID NO: 194571 - DNA, 786 bp, Klebsiella oxytoca
atgacagcaaataatactacatgggtgcttatcacgggagcttctggtgggtttggtgaagagttcgcacgccaatatgcagcacagggaaaatcgctcatcctggtggcgaggcggctcaatcagcttgaaattctggccgaagaattacgcgagcgctttaaggttgatgtgattgtggaacaggtggatctttccgtcatttacgctatcagtgatttgcaccgtcgtctgcaggagcgcgacattcaggtcgatatattaatcaataatgccggtcacggtttacagggcagttttctggagcagtcactggatgacgcactgaatatgatcagtctggacatttccagtctgacagccatgacccgtctttttgccgccgatatgcgcatcagaggcagggggcatattctgatggtcgccagtctgttgtcctggcagggggtgaagaattttgccgtttactctgccgcaaaagcgtatgtgctcaggttttcagacgccctgcaccgcgagctgaaaaatgacgggatcgttgtcaccgcactttgtccgggcatctccgacaccggttttgcttctgctgcaaggcagaaactgacccctgcgttaaaagtggcgatgatgaaacctgaaccagtggtgcaggcgggtatacgtgccctggaagccgggcgaatgagcgttatacccggcctgggcaacaaggcgattaccgtgctgacctgggccacccctcgctggttgcatcaggccatcatgtcccgcgtgatgggggtgtaa

SEQ ID NO: 194572 - DNA, 1011 bp, Klebsiella oxytoca
atgctagcaattccctttccctggtacaccctgtctattttgcttattttactgttgaaggtttgccagcagcgccccgcgggctatcgcaacagcgcgatttttattgtgggttgttcgctgctggtactgatgtcagccctgcgctggcagtttgatcttattcagctgcgccagctgcagtctgtcatggcgattaccctgccaccgttggcctggcactgctttgcctgctttacaggacagcgcttgcagcaaaaaatggccgcttttgtgggaccgccgacactcgctctggcgctgaaccttattgctccggcaaccacggatgcagtgctgatgctgctctatatcggctacggttgcaccctgattcgaacggcgctgcaggagggcgatacgtttattttcaggcgacttagcgacagcgcttcaacctcatcactcgcttttatcgcggggggggttctctgtttttccgggctgaccgatctggccatcgcgctcaatttccattttaatcagggccagcaggcgccgctgatggttgcaatctcgcaggctattctgctgccatttatctgttttgccattgtcggtaacagccgtccgtcactcccggacggagagtcggtattgccccccgaagaaagtaaagagagcaataatgaagaattcgtctcgacttatcagctagtcaacacgctggtaagcgagcagaatctgtatctgaatcccgacctgacgctgaatacgctggcgagaaaaaccgggggccccgcgcggcagatttcaaaagcggtgaacctaacgcgcggctgcaatgtctcacagaggatcaacggcttgcgcatcgactatgcgcagcagcttctacggaatacggccctgccggtaacggaagtgatgctggaagcgggttttgccaccaaatcaaactttcatcgcgagtttcttcgtatcagcggtataaccccgacggattaccgccggacagcggttgaaagttga

SEQ ID NO: 194573 - DNA, 321 bp, Klebsiella oxytoca
atgacggctcaggcggacagcgatgagttacccgccaggctggagtcgggctacctggctgaatatatccctgccgcggtaaggcgggtagagagtgtcgaaggcgccacgcactttagttttatgcagcagtgcaaaccgggtgcaatggcattaatagcagaaaaagaaccgggcgaagagattgtctgccgtgatgggggcacccgtagtcgggatgatattcaccgtcagctcgtccgggatatcagcgccttcctcaatcaggccctcaactttcaaccgctgtccggcggtaatccgtcggggttataccgctga

SEQ ID NO: 194574 - DNA, 276 bp, Klebsiella oxytoca
atgtcgttctcaccggacagcagactgaccatcaaagcactggaaatggtgtgggaaactcgcggtaaaccagccaaggtgatgctccatagcggattcagggacgcactgaacctgtactgcagcaatggctggacagagatagacaacaacatcgcggagaacgcgctgcgtggtgttgccctgggccggaagaactggctgttcgcgggttcagatgtgggcggagagcgttcagctgttctgttctcactgaacgtattagacgtcaactag

SEQ ID NO: 194575 - DNA, 123 bp, Klebsiella oxytoca
atgatatttaaaaagctgaagaatggggagggactgaatgacaaggaaactattctccttcagaaacttcgcaagcaaatgggctcgaaaataatgcctgcccgttataaatctcgtccttag

SEQ ID NO: 194576 - DNA, 246 bp, Klebsiella oxytoca
atgacttcagaacacacgagttacggctggcttttcaaaacacaggaagaggaaatttccggagatattattattgatctgccacatctgcctccggagcttaaaccggttgtgctccagattatactgaatcagattgaccgcgatacggcagagaaaaaactggccgaattaatacagcaacttgagtttgatatcaccgctgccgaactgtcagcgtatctttttaaaccgggccatgcctga

SEQ ID NO: 194577 - DNA, 417 bp, Klebsiella oxytoca
gtgaacaaaacctacatgctcgacaccaacatctgctcgttcatcatgcgcgagcagccggaagccgtcattaagcgtctggagcaggccgtcctgcgcaatcaccgcatcgtggtctcggcgatcacctacgccgagatgcgctttggcgccatcggcaggaaagcctcaccccgccacgggcagctggtcgacgcattctgcgcccgcctcgatgccgtgctgccctgggatcgggtggcggtggatgccaccacgacgatcaaggcggcactagccgcggccgggacaccgattggcccgaacgacaccgcgattgccgggcacgccatcgccgccggcgccatcctggtgacgaataacacgcgggaatttgtacgggtgccggacctggtgctggaagactgggtgaagtga

SEQ ID NO: 194578 - DNA, 231 bp, Klebsiella oxytoca
atgcgcacagtttcgatatttaaaaacggcaataaccgcgccatccgtctgccccgcgacctggattttgagggggtcagtgagctggagatcgtccgggaaggggacagcatcatcctgcgtcctgtccggccgacctggggctcgttcgcgcagctggaaaaggccgatccggactttatggcggagcgcgaggacgttgtcaccgacgaaggacgatttaacctgtga

SEQ ID NO: 194579 - DNA, 1356 bp, Klebsiella oxytoca
atggcgacacgttctaccatcatggataccaacagctttcgcgcagagcatgcggatgctctggatgcccagacgcgaaggctgaccgacagacgcggccaactgctgggcgagtcctaccgtctgttttatcgtaatccggtgcatctggtgcgcggcgaagggcagtatctctgggatgcggcgggagagaagtatctcgacgtctataacaacgtcgccagcatcggccactgccacccggctgtgattgctgccgtgcacgagcaaatgagccagctcaacacccacacacgctatctgcacgagcgtatcctggactacactgccgaactactgaccaccgtgcctgacgccatcaataaggcgatgtatatgtgcaccggctccgaagctaacgacctggcaatccgcattgctaaggcctggagcggcggctcagggatcatcgtcagccaggaggcctatcatggtaccagcgagctgacctctggcgcctccccggcgctcggcagcggtcagccgctggcacccaccacccggctggtgccgccgccggatcgctatcgggtggacgcctccgatctcggcatctggtgggcgcaggagatccagaagcaaatcgatgacatggccgtccacggcatcaagtttgccggacttatggtggactcgattttctcctccgatggtgtactgcctggtccgcagggcttcctgaagccggcactcgacgtggtgcacgctaacggcgggatctttattgctgacgaagtgcagccgggttttgcccgcaccggagagagtttctggggctttggccgccacggcattgtgccggacgtggtgacacttggaaaaccgatgggaaatggcatcccggtctccgggttgctggcaaaagccgacgtactggccgccttcagtgacgatattccttacttcaacaccttcggcggcaaccctgtgtcgatggccgccgcccaggccgtgctgcaggttattcgcgaggagaagttgcaggagcacagcctcagggtcggtgagctgttacgtaacgagctggcgctgctggcagatcgccacccgaacgtcggcgacgtgcgcggtgccgggctgtttaccggcttcgagctggtaagcaatcgtgagagcaaaacgccggacaaagcgctggcgttggatgttatcgaacgcttgcgcgccgagcgagtgttgacctccgtggctgggccctatggcaacgtgctgaagctacgcccgccgatggcgttccagacagaggatatcgactggctggtaggatcgcttgataaagtactgatggcttgcacggcgaataaacagcaaagctga

SEQ ID NO: 194580 - DNA, 1017 bp, Klebsiella oxytoca
atgaaacgcttttcatttcgccgtaccagcctgatggccacctgtgctctcgcaacgctctccggagcggcgcatgcgggaaccattaccgtatatacctcgctggaagaggatgagattaaggactacgtcgagagtgcaaaaaaggatatgccggatctgaccatcaacgtactacgcctctctacgggcgatctgggtccgcgcattctcgcggaggctaaaaatccgcagaatgacgttatctggggatgggcgctgaccaacgtgatggacccccgtattgagggcttactggaaccctacaccgcaaaaggtagtgaaaagcttggtgccgcctcccgcgcaccggaccataagtggtttgccaccactggctatatggcggcgttctgcgttaacaccgaagccctgaaggcaaagaacttaccggtaccggagacctggcaggatttgactaatccggtttataaaggcgaggtggtgatgccgaacccggtgtcctccggcactggatatctgcagattgcggccttgcttcagtcgaagggcgatgagaagggatgggcgttcctgaaatcgctggacggcaatatcgcccagtacaccaagtctggctcccgtccctgcaaagccgcgcgcaccggtgagtacgcaattggtgtctcgttggcctttgccgcgatgcagtccattgaagaaggctatcccgttgagatggtcatcccgaaagacggtgcaggctacgagctggaagcctccggcctgatgaaggcatcgaaaaataaggccgatgctaaacgcttcctcgactggacgctctccggtaacgctgccacccggtacaccaaatacaaggagattgtcaccattccgggtgtaccgcagtcgcaggctgcaaaggctgcgggcctgccggcggacctctctaaggtgctctatccggtggacttcgccaaaagcgccaaagagcgcgataccattctcgccacctggcagaagacaatcggtcgttaa

SEQ ID NO: 194581 - DNA, 999 bp, Klebsiella oxytoca
atggctttggtaatcgaaaatctctacaaaacttttgacggctacgttgccctggatcgcatcaacctgtcagtcgataaagcggagtttgtctgtctgctcggtcccagcggctgcggcaagacaacactgctacgcattatcgccggtctgctgggagctgacggcggtaaaatcagcctcgacggcagggatctggtcaacgttccggcccgtgatcgcggatttggcatagtctttcaatcctattcgctgtttccgcatatgaccattgcccaaaacatcggttatggcctgaaaatacgcaacacaccgactgctgaaatcgaggctcgggtcagcgatctgctggaaacggtgaagcttgctggcttcggtcatcgctacccggcccaactttcggggggacagcagcagcgggtggcgatcgcccgtgcgctggcggtcagcccctccctgctgttgctcgacgaaccgctctctgcgctggacgcacgggtgcgagccggactccggcaggagctgcgcgaggtacagcagcacctcggcataccgaccttgatggtaactcacgatcaggaggaggcgatgagcatggcggataaaatcgtctgcatgcagggaggtcgcattatgcaggaaggaagcccgcgcgagctatacaccacgccgcacacacgatttgtggccgaatttatgggtcacagcaacctgctgccgcaggcggtggtgcaacactggatgccggacttgctcgcaggcggccagccggaggatgccgagctatttatccgcccggagcgcattggcattcgccaggctccggatgcggaagggatggtggtgagcaccagcttcctcggtagcattcagcgagtgcaggtgctgtggcgatctcagccgctgctggtcgaaaccagcagcgccgtggggctggcggctggggaccgggttactctctcttttgacgcgcaggactgcgcatgggtgcaggcatga

SEQ ID NO: 194582 - DNA, 1659 bp, Klebsiella oxytoca
atgggtgcaggcatgagcagatcacttcttcctccgcaatcagcggctgaccgctggctctcccgcctctgcctttgcctaccgctgctggcgctgctggcctttttcggcggaccaatgctcagcatcctctggcacagcctggtggacgaccgcagcggcgccgtcggccttaataactacgtgacgctgtttgacgctcccggcgtctggcgggcgctcggcaacagcctgcttctgggcatcgcaaccacgattattaccctgctactgggttttatcgtcgcttacggcctgcagtttaccgtgatgcctgcgaagcgctttatcacgttcgctaccgcgctgccagtgctggcgccttctctggtactggggctggggcttatttttctgctcggacgcaacggtatcgtcggtaatattctgggagtgaggctggatatttacggctttcacggcctgctgattgccgacgtgctatatgccctgccgcaggctgtgctgataattcaggctgctctgcgccacagcgacgcccgtcagtatgaggcggccggtgtgctgggggccagcggctggcgacagtttctcgatatcaccctaccgggcgtgcgctttggtttgctcagtgccgggttcgtggtgttcacgattaccattaccgattttggcaacgctgtggtgatcggtggcgacttcccggtgctggcgactgagatttacagccaggtcagtgggcagatgaaatttggtatgggagcggtagtcggcattctgctgctgctgccggcggcggcggcaatctggattgagcgggcggcggccaggcggcagaaaatgatcggcactgcttcggctcagccctacgttccgacgccgcagcgcgggcgcgatattctgttctggctgctgaacatgctgatttctctggcaatcgtcgccaccattaccacggtggtgatggccagtctgatccggctttggccctaccggctggacctgaccctcaaacactacaatattgacctggcggggggctacacgccgctgtggacctctgttgggatctcggcactggcggccattgtcggcacgttgctgttgttcctgctcaccttcggcattcgccgccagccagggcgaaccgcagacttcgctacactgctcagcgcgctgccggtgggcgtacccgggctggtactggggctggcctacgtctttacctttaacagtgccgatctgccctggggtatgctctatggcaccgcgttactggtggcgctgtgtaactactaccactaccacacccagggcttcaccaccatgatgatgggcatgcgccacgtgcccggttcgatggaggatgccaccaacgtactcggcggcggggtggtacgtataatgcgcgacgtctacctgccggcgatgcgggtgacgattatctcggtggcgatgttcctgtttatgcgctcaatggtgacgctctcggcggtgattttcctcgtcacgccctcgctgccgctcggcgcggtaacggtgatgcgcctcgacgaagcgggcttcacctcccaggcggcggctttttctacgtgcatcatggggattgtcgctataatggcgctgctcctaaacctgttaaccggcaagcgccgatag

SEQ ID NO: 194583 - DNA, 771 bp, Klebsiella oxytoca; identical to SEQ ID NO: 145161

SEQ ID NO: 194584 - DNA, 429 bp, Klebsiella oxytoca
atggccatttcagctcgtaatcagctcgtcggaatagtgagttcaacagaacacggtgcagttaacgatgaagtcgaattaacactggcaggtggagcaaagctgattgctattgtcacatctggcagcaaagatgtgctcgggctattgccgggtaaagaagctatcgcgctgataaaggctccttgggttacgctggcgaccgaaagctgtggacttaaattctctgcccgcaatcagtttgcaggtgaggtgagcaaggtaacggaaggtgcggtaaatgcgaccgttcatgtaaatgccgatgccggatttgaaatcgtggcagtcatcaccaatgaaagctgcgaagtgttacagctggcagtgggcgtacgtgtgatagcactgatcaaagcctcttctgttcttattgccacacgaatgtaa

SEQ ID NO: 194585 - DNA, 1710 bp, Klebsiella oxytoca
atggagcctgtattaaatatttttacgaccagtcatgacgaataccatactgatgaaactgcttcaacatttggcattctgcagacactccctgaacacatcccgtcaaaagaaaaccatattgtccctggtgaaataattgaagagtggataagtaataaatatggtgctctgattaaacaactgacagacaggatctcaaataatgcactccggaatcttttgcggacaggtcaggacaatccctgtgattttcgcgagattattacagaagtcatgacatcccggttaatcagaagagggaccctcagcgcagaggctcgagcgcaacgagtggcagatattcagactgactcagccggtcgggtgacgttctccatattgttgttacctttccggacaccgtcgccactcaaacatgactctttattaccggacctgggggagtactacaccctgagtgtactctatgcccttgctgccagctgccggcaggtccagctcagtctgtttaatatggctcattccgtctccgaaacacttaaagcacagggaactgatccctggacattgttacggcaagccggagaacgtacatccggtaaacgcggagaagccatgactcttattgaagaggatttgagacttaaatttttcgggaaggaatacatccgccggcgaaaattcatccgctcaatactgcagaatgacacatgtctgaattatgaatacccggaacatctatcctcatttttacttctgctttctgatgctgaaatgtcccctgtacagttcagacactggatacaggcagatattactccggtacatatttatgctattcaggatgaatatcgctacccgtgcttcgatatgcttgacagaaagatgatacgggactatcgcgacgatctcctggcttttatggataccgtcaatatggacaatcagttactgtcacttatccgttacgaagatatccagaataatttatcatggaaaacccggtattttaatgatcttgaatacaccaccaaacttaatgctttgatggcgtgtgtcagtgattctgaagggttgtaccaggcagaaggaaggggggcttttcttacgactttgcgtgagcaggatccccgccttcagcagttgtttgaaccgcttctctttgcactaccctaccctctccttgaaacgtatgcccgggagcagtcgcttgagtacggcgagttttactgtcagttcatgaataatatctatacccctcagaaagaagatgtcgagttattaagacgggtgatcctgaatcaggtgctgcatgcggttgccagatacgttgcagcctatgaaagcaatactgcaggtaaaaatacgaccggtttcgatgatgtacgttccctgttcccggaaaccctgcgcatgtcgatacaccgtaaggatgagaaacacgggcattactctgtgcagatatcgccttcctcctcccgggtaccctggcatggtgtggctgttctggaacccacacaaaacgggtttctgctggatgtccgtctggaaagagaggttcgcgcagccggatataccggagtcagtccaaccggacgtgagcagtgtccccttttttttgtccctcccggcatcagtctggaacagttaacgcagcgtttaaccgatgattctttcgctttactgtcgttgagttcatccctgtag

SEQ ID NO: 194586 - DNA, 1236 bp, Klebsiella oxytoca
atgcgatatatacctggcaggatcccagtgatacttgctgtcagtaatctgttttttacctgtgccgtgtctgttgacctgaccattgccaccctggtgggctatcagctggcaccgactgatgaactggccactgttccgtttgcacttatcacggtcgccggtgcgttctcgagtctgtttgcggccggcatgattggtcggggaaacgaaaaactcgcgtttattctgggttctttatacggtaccgcaggcggattactgtctttcctcgctgtgctgaagggcagttttttactcttttgcactggctgctttctggtgggggtctatcaggctttcagccagtactatcgtctggttgctgccgatcactccccgcctgaagtgaaagggcagtcaatctctctggttatgattggcggcgttgtggcagcaatcctcgggccattgctgacgattgttgcacgggatatccccggtctccctcgctttgccggtgtttatctcgttgtggcgggactggggattctgtctgcacttaacctggctctgttcctcgatcgttcaaaaagagacgtctcctccccggactcccgggcgatccagagagtatcgccaaccagccgggagttaatgaaacgtccggattatcgtacggcctggtttcatctggttattggctccttcgtcatgctttttctgatgacggcggcccccctctccgttactcaccaccactcgatgaatgatggtgcactggtcattcagttgcatctgctggggatgtatgtcccttcactgtttaccggtctcctgatacgaaaagtggggctcaccgttctgttgtacgcggggattgcgcttaacctggccgctgtcgtgataaacctgacaggggaaacgatgctggcatacggcttaagtctgcttctggtgggggtcggatggaactttatgtttgttggcggctcgacgctgctcagtttgtcctaccgtgataatgagcgaaaaaaagcgcagggtctggccgaaaccagccgtttcattttctccgcgatagccacatccggagcgggcgtgatgctggccttgctgggatggaagctgctgggtctgatgatgataccggctttactggtatgcctggcctccacctggcagtacagtcggaccatacggaaagaaaggactggcacgtcacgccctgctgcagacggttcttcaacccggtaa

SEQ ID NO: 194587 - DNA, 123 bp, Klebsiella oxytoca
atggcaaatcagattaacccggcatggggaatggggctgaagggtagggaaagtgtactgcaatgggtcaacctgcattccagttgggcgacattgctttccggggagtccaatcatgaatga

SEQ ID NO: 194588 - DNA, 384 bp, Klebsiella oxytoca
atgaatgacgtagcccaggtacagttagctgcgcatcggttagtggatgctttttctcgaaatgatacatcggcttattttgcatcatttacggaagatgccacctttgttttttacaaccaggaacaaccattactctcccgccatgcctggtttacacaatggacagactggcagaaggaagggtttgccatcgttgagtgcgtttcaagccgtgcgcacgtgcagatcgatggcgatatggccgtattttttcatgatgttgacacgcttgttcagagtggcggacaacagagccgactcgcggaacgggaaaccattatttttcgccgaacccagcaaggctggttagcctgccatgagcatttatccgcacgcctctga

SEQ ID NO: 194589 - DNA, 1479 bp, Klebsiella oxytoca
atgacacagtcaaaaagcaagattgaaactttcggaattgagcaaattccggatgagggtcgtgatgctacaccactggatctcttccgtctgacttttggtggggccaatacttttgccaccgccgtgctggggagtttcccggtgctttttggtctttctttccaggcgggtttactggctattctttccggggttgttatcggagggataatactggcgccaatggggctttttggagccattaatggtaccaataattcagtctcctcaggtgcgcattttggcgttcacggaaggattgtcggctcatttttatcgttgctcaccgcggtcgcttttttctctctgtccgtgtggagttcgggtgatgcgcttattggcggaacgcaccatttattcggactttcggaaaatgatggtgttttaggtattgcttatggccttttcgctatactggttttggttgtctgcatctatggctttcgtttcatgctgtggataaataaaatcgctgtttttgcatccagtatcatgtttctgctggggatttttgccttttacggtgtgtttgacccggattatcgcggaagtttacaactgggacaaacgggcttctggggagcctttgttggctcaacgctgttgaccatgagcaacccgatctcctttggcgctttcctcggagactggtcgcgttatattccaaaagaaacctcccgcttgcgtatcatgtgggctgtatttgccgctcaagtggcgacgctagtaccgtttatctttggcttatgcaccgcaacaatcgtcgcggcccatgcacctcaatacatcgccagcaacaactacgtgggtggattgttggcggtaacaccgggctggttctttctcccggtatgcgtgattgccatcgttggcggtttatctacgggaaccacggcgctttacggtaccggcctggatatgtccagtatatttcctcgcctgcttagtcgcgtgcaggcaacgctcctgattggaattatcgcgattgcttttatctttatcgggcgttttgctttcaacctggtgcaaagtgtatcgacttttgccgtactgattgtgacatgcacatcgccgtggatggtcattatgattataggaatgattgcatgtcggggagcctaccatagtgatgatctccacgtgttttcccgcggtcagcgaggagggcggtactggtttcaccatggttggaactggcgggggctgggtgcctggatccccagtgcaatagtgggactgtgcctggttaacattccagggcagtttgttggtccactaggagagctggcaggtggtattgatgtcagccttccggcgactctgggattggctgccctgctctacctcgtgttgttgcgtatattccctgagcaatctgttttgactgactcatcttctaagatatacacggcaaaaacacaaggtggtgttcaatga

SEQ ID NO: 194590 - DNA, 1395 bp, Klebsiella oxytoca
atggtattcgacccctcgactgctgagccttttgcatgcgtatctacggcttctgcggaagatattgatgacgcagtatctgctgctcgtgccgcgtttcccggatggagtaatacctcatcgcaggagcgcgccaaactactcaggggctttgctcagcagatggaaggctgccgtgcagagttactggagttgcagagccgcaataatggaaaacctcgccacgaggccgaggtcgacctcaatgatgcgatagcaacatttttgtattacgcagacctggctgatcgactcgatgccctgcagggcagcaacgtagaattaccttccccaggatattctgcccgtttgcgtcatgatccactaggagttgttgcactgattgttccctggaattttccattagtgaccagcgcatggaaaattgcaccagccctggctgcgggttgtactgttgtccttaaaacctctgaaatcaccccacttgcagagcttgaatatggattgattgcagatgttctgggtctacctcccggcgtgcttaatattctgagcggcgagagtgaaagtgggcggatattgagtcagcaccccaatatagacaagctttcctttacggggagtaccgcggttggaagtatggtcatgatggccgcggcgaaacggtgtctaccgataacgctggagttaggaggaaaatcccccatcattgtatttgacgactgtgatttggaccgggcggttgaatgggtcatgtctggcattacctggaatgcgggacaaatgtgttctgccacatctcgcctgttagttcaggagagtattgcggaggcgctttactcccggttagcctctgccatgcaggaaataaggattggtgctccccgagaggcgggagtcgctatggggccgctgacgagtgaagcacaatggcaaaaagttcagtcgtactttgccgtagctcgtgatgaaaagctctcatgtccggcgggaggccagtcactatcttctgtggggtggtttgttaccccgaccttatatactgacgtaccgttatccagcaggctttggcaggaagagatatttggaccggtactgtgcggtcaccgctttaccgatgaggccgaagctattcggctggccaataattccgattttggattagttgcgaccattgtcactgcagatagcgtgcgcgcccagcgagttgctaacgctctggccgtcggccatgtctggattaattctgtgcagtctgtgtttgttgaaacatcctggggtggaattaagggaagcggtattggccgggagcttgggccatggggactggcttcgtaccagtccgttaagcatgttgttgaggcggtaaacacagtgttgacggttaatctgtaa

SEQ ID NO: 194591 - DNA, 1737 bp, Klebsiella oxytoca
atgtttatattaataactacccttttggtcatgcttttagtcatgctgatctcttccctgtttactcgaaagtatcacgatccgacagcccatggttattttatggcgggcggtaagctaagttatggatatattgctggctcaatgatgctgacaaatatttctatcgaccaacttattggattgaacggcgattcgtatgctcataatctcagtgccattgcctgggaagcaactgcggttattgcgatggttgcgttagcgctattctttcttccacgctacatgcagggtggattcaccacgttacctgaatttattgcttcacactacgacacggcaacaagacgctgtatcagtattctgctgattctaacttatacttttgtactcaatccggcgtctttgtatctgggggctatcacgctgaatcagatttttgatatccagatgttgttgggcttgacctatccagcgaccatttcgttgcttatcgctataaccggcgttatcggcgctgcttatgccatactgggaggacttcgggcggtagccatttcagacacgattaacggtatttttctgttgtttataacattactggtaccggtactggggttttatgcgctgggaaaaggttcttttttggcagggacggagatcgtcttgcatcagtctgcagaaaaactgaacatgattggtggaacaaaggataatgtcccttttggtacgctgtttaccgggatgttactggctaatttattttactggtgcactaatcaggcaacaattcagaaaagtatggcagcaaaaaatctggaagaaggacaaaaaggggttttactgaccggtttcttcaaacttacgctacccctaattttgatgatgccggggatcattgcatggcacttgttcaaagataatccagtttctcattccgaccttgcttatcctcaacttgtagcattgcttctaccctggtggatgaaaggcttttttgttgctgtaattctgggtacggtaatgagtcatttcaatgccataatcaatgcatcagcgacattactcacttacgattttttcaaacctgcagttccacgtgctaccgatcttcaactggttaaattcggtaaaatgaccagtatcgtcgtggcgctggcttctatcgtggctgcacctttattgatgtatgcaccagaagggatctacacggtattacgtcgctttactggtttctttaatatgccggtaattgctatcgttctttacgctttctttagaagttcatacgccagggcccgggcagcaaaaatcgtactcgctttccacgcgttgatgtatggtgttttcgttctgggactcaagctcgatgagcgatggaatatcagttttattcatattatggggatattgtttgtcattgagttcacattactggaaatcatcgggcgaatgacgaccggaggaccgagcccacaaaaaaatggggtattaataaatataaatctgacggaatggcggcatgcaaaaagcgtaagtattttacttattgcatttcttatttccctgtacctgacattttcccccctgggcgtggctacccagccccacaatattgagccatattatatgtttcttaccagtatctggattgtagcaatcacattaataggctattcagagagaaaacataggagcaagataaggtcggcaaacaaaaataacattcctggttga

SEQ ID NO: 194592 - DNA, 1026 bp, Klebsiella oxytoca
atgacttatcaagctgccacttcgcgttatgatacgatgacctaccgccgggcaggcaacagtggattacaactacctcttatttccctgggtttatggcacaatttcggagaagcgacccctatagaacagcaacgggaaatgttacgtaccgcattcgatctcggtatcacccattttgaccttgcgaataattatgggacgccatacggtagcgctgaaaccaattttgggaccatcttccgtcaggatttccgttgctatcgtgatgaaatgattatctcgacaaaagctggctttgacatgtggcctggcccttatggtcagggcggcagttcacgtaaatatttgatggcaagcttggatcaaagtctccagcgtttagggctggattatgtcgatattttttattcacaccgattcgatcctgatacatctctcgaagaaactgcaggagctttagccagtgctgtttctcaagggaaagcactctacgtaggtatttcatcttattccccttcacagacggctaaaattgcacggcttttgggggaatggaacgttcctcttctcattcatcagccagcatataacatgttcaatcgttggattgaacctcaattattgaatgtctgcaaacaagaaggcgcggggatcatagcgtttagcgcacttgcacaaggtgtgctcaccggaaaatacaatcgcaattacaatctacatgttaataaaacagcaagaacgactatcgacataaacgatctttcggaaataaatcttaaacgtatttcatcccttggggaaattgcccgtaaacgtggacaaacactggcacaactggcacttgcatgggtactacgcgatcccagagtgacatctactttgatcggtgcaagcagtcggtcacaaatcatggaaaatgtaaagacgctggataatcttgcgttcagtccagaagaactagcggccattgaccaatacgccattgatggtgccatcagctttggccggcaacaaacagtctga

SEQ ID NO: 194593 - DNA, 786 bp, Klebsiella oxytoca
atgaaacttaaaattgctttaaaaatccagactattatcgttatgttaatccatgtatcaccgttatttgccagcgagacttcttctgtatttactcccgtacaggaaaaacggattggcgaaatagccgcggattatatgcgcgcacatccggatattcttatccagatgagtgagtcccttcagctggagcagcaggaaaaacaaacacgggaattaaaatcggctgcactggaacaacagtcgaaaatactgagtaatataaatatcccgtcctggggacctgcaaatggtgatgtaatggtggtcgagttttttgactaccagtgtatctggtgtagccggttcgcgccggagctggataagatcataaagagcaacactgatgtgcgttacttctttatggaatggccggtgttcggcagtcggtggcctgaatctttgctggctgccaggaccgggctgcaggtgtggaaagaaaaaggggccgatacatacctggaatatcataatgacatctacgggacaggattgaatgaaggaaatcggacgaaagatagtattgagaaaatatctggtagtgtcgcatttgaatcagaaactattgatgatatcaatatcacggtgaaaaatatcaatgatattgccataagtattgggctgaccggaacgcctggcattattgtgatgccggtaaaagatgctgtggtgggtaatgtcactgtatttcccgggatgactgaaacagaggatatccaggccgcaataaataaagctcgtctctga

SEQ ID NO: 194594 - DNA, 270 bp, Klebsiella oxytoca
atgttcaactatttcctgctgaggactgagcagcagctattttgttatctttacgggggcgtttttgcactatttctgaaaatattatatccgcctttttacacatggagtggcccgctccttgtgatgctgccggttgcgttgttctgggggggactggctctgtacacccgacatattgacctgttgaggaaaatggaggtttccccgctggtcagtatcctcgacggtattcaggtggtagccagttgggtcagcaggttcctctga

SEQ ID NO: 194595 - DNA, 279 bp, Klebsiella oxytoca
atgggttttgtaaataacatcacgtacaagaaaagaccactacccgaagccgccacttccgaaaatttttgcacaaaagatttagagtttttctgtccattctatgttgtttccgaagaaggacggttactcaaagataatcaggatggatcctacaccgatttaaacttcacagggaaactttatgtaaactgcgaagataaagactataacgcatattggtttagttttgatgaaacaggaaatctgtacgagatcagcctaattctagatgaataa

SEQ ID NO: 194596 - DNA, 390 bp, Klebsiella oxytoca
atgaaaattaaattatgcggggaaggtatgaaaacagtgtcaggggcggtggtgtatcttgtggtatgttttctggtctttacaggatggctggtctgctttgcgcagcatgtccccctgaacgggcttgagcatgatttgacactaatgtatctgcttaatttattttatgtttatgttttgatggaacccttctaccagttctttcaggtgactgaatattttaaagcaattctggttctggaagataacagcggccagtcgataactttttacaatgaaacccctgttatttggatatatagtctgtccgcactcttaacttttgtgatttacatcatatatgcaaaatggttcactcataaccgactgaaaggaaagtatctataa

SEQ ID NO: 194597 - DNA, 543 bp, Klebsiella oxytoca
atgtggataaacatgatattaataataaatattatcggacagatgtttagagatatgacactttttgttgatgatgattctactgcttatgtaatttatgagtcggaggggaattactcgatacaaattgcagaattggatgatagctataagggcgtcactgggagatattcaagagttttagtaggtttaatgaacgaagcccctacgatgtttaaatacaaaagtaaatattatatgattacatctgggctaaaagggtttagccctactgacgcacggagttcctatagtgataatatatttggaccgtgggtttctttaggtaatcctgttcgctctgatgatgttgataatattaaaaaaactttttcctctcaaggaaccttcgtaatacagaatgttggctctaataacacatatatttttatggcagatcggtggcaaagtaatagtttgaaagatagttcatatatctggttaccaattgattgggataacaatattccggtaattagatggaaggctaattggaaatattga

SEQ ID NO: 194598 - DNA, 561 bp, Klebsiella oxytoca
atgaaaattaatttatttagtttgtttagaaaaaagaatgaattccaggatgaatttccttttgtacaatttagtgctttgccaaagggatgggatgtatatccttcatttgtttctttagaaaaaaacaatatatatgctcactcaacgcgatttatgattaatcctgaagatctatcagttattgagtgtttaattaggttgttttttaatgaaaaagtggaaataaatgagaggaaaaagaaaattgtagatcataataaagctctcatttgttataaatttaaagagtttggacaggatatagtaaggcttatcactaatgataatgaatttgtcaaatgtctttgtgagaaaggcttagagccgccagggccagaaacggtattccctgataaaaacctcggtgattatggtagtctgcaaggagagatggcgttttggtgggatgtatattgggaaccattttggaatagtttgagggaagatgaaaaaaaacaatatctcgaacgaagtaatttttcggttgatactattgaatttctggagtgccgtcattaa

SEQ ID NO: 194599 - DNA, 885 bp, Klebsiella oxytoca
atgactgagtattcaacgttaactaatgaaactccacattcaacgtacgacgtaactggtttgttaatgcccgctcgagcgtttttttttactgttgttgatgagccaggtaaagacggttttttagttagaaaaatatatgcttcaaactctgatccttacctttcaaaaatggatttgtcagaagcgaaaatactttcagagactaatccggaacgatatggtttaattccaaagaatttttctgctccctactctgtagcagagcatgtgatgggggataatgcatcggcgtatatctctactagttctgcatttccggaaggatccccaagatttgaaggtaaaacaattatcgttgatattgataaagctgttaaatcaggtgcaaaattaattactacagaagagatacttaggagtcttgacgattataagaaacaatatccccacctggagaaacgcattgataaaatagcaacttatgttaaggatatagataaagaagtattgctgcacggtgaaaaaataccagctgctgcagtttttactccagaaacattaaaatacacaaagtattttacgcgcgctgctcgtgtggtacaggtgacagggattgtcttcacagcctatgatctagagcaggcgtctgaaaaatcgcttaaaaacggtagcgtgaaaccgatagctgctgaggtcatcagacaagcaggaggatgggggatggcagttgccggagcaaaaataggtacagtggcaggtgcggcggttggtattgagacagggccaggggcggttctgacaggactcgttggcggaattatattcggaactgcaggctactttggagccgattgggtggcggattatattgatgaaaattaa

SEQ ID NO: 194600 - DNA, 1284 bp, Klebsiella oxytoca
gtgaagccggacttcgaccgggagagcacggagccgggctacggctatctgtggctgcggatggcgaagccgtactctggtgatacatacggctggcacaccccgctcaccgacggcaccgaagtggcgattgcgtacagcaacggcgatatcgacctgccgtacattgcgtatgcgctgcacgactctgagcacccggaccacgtcacccgtgacaatcacacccgcaacgtgctgcgcaccccggcgaacaacaagctgcggatggaggataagcacggtgaggagcacatcaaacttgccacggagtacggcaagacccagctcaacagcgggcacctggtggatgcacaggggcaacgtcgcggcacgggcaccgagctgcgcaccgacgagtggggaaccttgagagccgggaagggactgtttgtcagcgcggatgcgcaggtgaaggcgcagggtgacgcactggatataagcgctgcgctgaaggaaatcgaccggctgaatcagcaactgcaacagctggaaatcgccgctgaacaggcgcaggcgctgaaggcggatgttgacagccagatagagatgtttgagcagcggctgaaaccgctcaatgaggcgctgctgatgtcggccccggaagggatggccctgaccagtggtgaagatatgcagctggccgctgaacggaaccttgcgctaaacgccggagaagacttcagtgttggagtgatgggcaatgcgaccgctttgatcggggagaagctggggctctttgcccgcaccggtcaactgagcctgaaatccggggaagggccaatagatgtccaggcacaaaacgccagtatgcggttgtttgctgagaagacgctgacgctgagttcagcgggtgacatttcctttgccggaaaaaaacgtatcacgctgatcggcggcggaagctatctgcgacttgaggcgggaaaggtcgagtacggcacgacagcgacgtatataaggaaggtgaagcggacgatggcggctggtgcaaattcaacaccaacgtcatcaatatcgatgccattagttgaagatttaatcagggatggattcttcgatgaacaattccggatcttgaatgatagtggtaagcctatggccaatgttccgtattttatctctagcgaaagtggtgaaacatttaaaggtatcaccgacaatcaaggtctatgcaaacgcgttttttcaaaggaatcatccaaacttaccgtctggttaggtgtccaggctctggagaaatggtag

SEQ ID NO: 194601 - DNA, 642 bp, Klebsiella oxytoca
atgacagatttatcctggaaacgctatgggggaataccattgcctgaaagctttacacatcaggttgatattacctctggaaagcatacatcatttattcctgagggtctgaccccaggtcatgccgagttttcttcctgtgacagtaatattttctacttatcctgccattcattatcgaaaatgcatggcaaaatcatcatgcatgcaccgggtcgcctgatcaaagtgcagatatccaataacgggcccatacagaaggagtctttttcaagcccggattttctgagaatcacttcacataaagccttctcactggacggggaatgttatattgcggtcacggtatatccgaactggctgtacattttctcagatccagggatggttttgctcaggcgcatcaagctgtttgattatgaaaatgtctctgcgatcccctatcatgtctgcagtcctggtcctcaggtccctatctggctcgagataacatccgatggtaaatatatcattctggtttccaatcgggttatttacatttattctgtcagagccaaccagacccatactattgatggctatcattcagataacagttttattggtacaggccatcttagtatgaacaaagcacattgctaa

SEQ ID NO: 194602 - DNA, 846 bp, Klebsiella oxytoca
ttgcagaatattttacgttctgattttaatttcacgaaaatgcacgggctggggaatgattttatcatcattgaccagcgttcatcatttcaccccttaaccacagcctttgtcagcgccatctcagacaggcattttggtgttggatgcgaccaggtggtcgagatcatgaattccgacgaggcagatgcagagctcacattctggaactctgatggttcactggctgaaacctgcggcaatgccacacgatgtgttgcagaccttctgatgagagagtcggagcgtgagagtctctgcctcagaacccgccgtggacttctgtcctgtacccgaaacctgcacggccatgtcgttgttaatatgggtacacccgttctcgactggatgaatgttccactggccagtgatgtggatacgttacatttgcctcttccgggtgatcctgttgccacgggtctcggaaatccgcactgtagtttttttgttgaaagtatctcggacattaatatccacactgaagggcctcgctttgaaatacatccgttatttcctctgaaaaccaatgttcagttctcccagatcatctctcgttctgagatcaaaacgcgtatctgggaacgaggcgcgggcttaacactggcctcaggatcaggagcttgtgccgccgttgttgccggtattcgtcgtggatatctggatcatcatgtctccgtcagactcgatggtggacagcttgatatttcatgggatggttcacctgaaagcggggtgttcatggcgggtccctgcagttacatttttgctggttctttttttgaacgctatctctctgagcaacactag

SEQ ID NO: 194603 - DNA, 411 bp, Klebsiella oxytoca
atggaaacccaatcctggcgaaaagaaccccgtaagaattattcgaatgacttcaagctccgtatggttgaactggcttcccaaccaggagcctgcgttgctcagattgcccgtgagaacggcgttaatgataacgtcatcttcaaatggctgcggctctggcagaatgaaggccgcatatcgcgccgccttccggccgtcgtgacttcatcactaccaacgatgctgcctgtcgaggtgatacctgacccggcgccaacaggtgagacgaatactgacccgggtcagttctcagctctgaatgcctcctcctgttgtgttgagttccgccacggcaaaatgacgcttgagaacccgtcaccagagttactggccgtgctgcttcgcgagctgaccgggagaagtcaatga

SEQ ID NO: 194604 - DNA, 1443 bp, Klebsiella oxytoca
atgacccaccacattgaaggtctgggcagatatcaggcaaccatgtttcctgaattgctggatgattttatcactgaagataatcccgtcagagcggttgatgtatttgtcgatggattacagtttgatgtccttggttttgagagcgttcatgcaaagcagacagggcgacccggataccatccggcaaccatgctaaagctctatatttatggatacctgaaccgtattcagtcttcccggcggttagaaaaagaaacccatcgaaacgttgagctgatgtggttacttgagcgattaactcctgactttaagaccattgctgacttcagaaaaaataatggtaaaggtatcaggaatgcctgcagggcctttattgacctgtgtcggcaaatgcaaatgtttacagatgtggttattgctattgacggcagtaagttcaaagcggtaaacagcaagcagaacaacttcacgccccaaaaagctaaagatcatattgtgcgagttgaacaaagcatcagtcattacctgagtgagctggatgaagccgacaaaaacgcaaagtccgatgccagtataaaattaacggcaattaaactggagtggcttcaaaatcgcttacaggagcttcagcaaatccaggaaaccgttggtcagcagccagataatcaactgtctttaactgatcctgattcccgactgatgaagacaaataatatgaaccggcaagtttgctacaacgtgcaaacagccgtggatacgaagaatcatctaatagtggctcataaagtcactaacacaacagatcggggccagcttggttctgtgacaataatggctcaggaggccgttggcaaagcggatataaccatactggcagacaaaggttattacagccgcagtgatattaaagcagtccaggacagcggtgcgatggccttagtaccaaaaggtgatacctcgggagctgaccgcaaaggcctctataatcgctcaatgtttaaatatgaccagaaaaaagacatttatatctgcccggtgggtagtgagcttcagaatagatttacggtaattgaagatggtttagaactgcaaatgtactttaataatatcgcatgtcgtgattgcagccagcggtcaaaatgcactacatcaaaacgcgatccaaggcgtatacgacgttgggttcatgaagctgaaatggaggatatgcagaccagacttgacgtatcgccacaaactccagttctgagaaaacaaacggtagagcacccattcgggacaattaaaatgtggatgggggcgactcacttcctgatgcgacgatttaaaaatgtcagcacagaaattagtctacatgtgcttgcctataacctgaaaagaatgatgagcatctggggcactgaagggctgaccgttaagttgcgggagcaattcaattaa

SEQ ID NO: 194605 - DNA, 435 bp, Klebsiella oxytoca; identical to SEQ ID NO: 180801

SEQ ID NO: 194606 - DNA, 318 bp, Klebsiella oxytoca
atggctacatacggcgctggctttacgcttacgtttgctattggtatggccgaatttattgtggtaggtattctgcctgaaattgcgacagcactgaccattgatctaccccgtgccggcaaccttgtgggtttggcagaatcgtttgtgaaaacgttcaagcgtgattacgtgtatgtgaatgatctgccggatgcggtaaccgtcatggaaaaactgacggaatggatggaagactataataactggcatccccataaaggtctgaaaatgcagtcaccgagagagtacagaagttcgctgctggctataaattaa

SEQ ID NO: 194607 - DNA, 129 bp, Klebsiella oxytoca
atgaggaagctgaccgttaagccgctttcttttgggtatagcgtcgtggacagccattcatctgtcctgtgtttcaacctgccgtatgaagcaaaaacccccgccatttctgacgagggttttctttga

SEQ ID NO: 194608 - DNA, 378 bp, Klebsiella oxytoca
atgctgggggctttacgaatgaatgctaaagcgaaattacttattgtggggggatcgctggcgctggtcgccggcgttttctatgcgggatatctgaaaggctggtacgcgcattctgagcacgttaatagcctggcgaagacgcgggaaaagaagcaggaaagggctgtagcagctggagagcagaaggcggcgacggcgaacgccgaagccaaagtgatttaccgtaccgtttatcgtgatgtggtgaaatatgtcaatgatccgaatcgtactgtgtgcaagtttgatagtgacgctgtgcagctgcgccaacgagcaatcgacgcggccaactccatccccggatttgatgaaccggccgtgcaagctaagtaa

SEQ ID NO: 194609 - DNA, 129 bp, Klebsiella oxytoca
atggaagaaaactatctgtcagaggaaaatcttgagtatcggcaggaatcagtagccattgaagaaaacaatgttgaaatcagcgacgctgaaaagcttgctgttgatttggatatcctacctggttga

SEQ ID NO: 194610 - DNA, 153 bp, Klebsiella oxytoca
atgacgaacgtgcaaacgggcttactttacttcagcgtagtggtatcggctctatatctggtagcgggcggttacaagtcaatccgggcctactttcagaaaaagtttgatgatgctgtcgcagccaaagcatcggaaaccaccgagaaataa

SEQ ID NO: 194611 - DNA, 531 bp, Klebsiella oxytoca
gtgaaaccagaatccatcgccgcggcagttattatgcttcttcttatcatcgggctcacaatcgccgcagggctgggctatcgatatagctcggcatccaggagagctgaaacggctgaaagtcaggtgacgctgcaggcaagggttatccaaatacaggcggataatatcgctgcttttcaaactataagcggcgatgtccaggaaaaaaacagggcggtagatgccggtacagaggaaaaaatcattgaatatcgaacgattctcaagcgcgaaaaaacgtgtgatatgcctgttcctgctgacgtttctggtgggctgctcgaatacacgaacagtttacgttccagcgcagtgcacaccaataccagcggatctgacaagcccagtactggcaccattaccgccggcgaactgacatattgtcaggctgttttgtggataaccccattgcttgcagctattgaaaaagcaaataaccagctggctggtattcgccagattgaacagaaaagacaggagacaaaatga

SEQ ID NO: 194612 - DNA, 540 bp, Klebsiella oxytoca
atggcttcgaccaaagcaaagctcagtgcagccatgctggcgctaattgccgccggtgcatccgcgccaacgctcatggatcagttcttgaacgagaaagagggcaacagtctaactgcataccttgacgggtctggtgtctggactatttgtcggggggcaacccgcattgacggcaagccagtaacgaaggggatgaagttgacgcaggccaaatgcgaccaggtgaacgctattgaacgtaacaaggccctggcatgggttgaccagaacatcagagtcccgctgacggcaccacagaaagttggtatcgccagcttctgcccgtacaacatcgggccggggaaatgtttccccagcacgttctaccgcaagctgaatgcgggcgaccgtaaaggggcgtgctctgaaattcgtcgttggatctttgatggtggccgtgactgccgcctcaccaaaggccagaagaaaggttgctacggtcaggttgagcgacgtgaccaggaaagcgccttgacatgttgggggatcgataagtga

SEQ ID NO: 194613 - DNA, 132 bp, Klebsiella oxytoca
atgaaaaaaataatcgctctgttactggttgcagtatttggtgtgatgtcagtgtcggcgatggcttgcccgaaaggcacccacccacatggcggcactggttctcatcataaaggcggtacctgttcctga

SEQ ID NO: 194614 - DNA, 546 bp, Klebsiella oxytoca
atgaacgggaaaatagctaaaaatttcaattcggtatcgctggcagcagtgtttgtgctggcgctatcgccggacgcctttgcggaaaaagatgcgctgataagcgtcacgacgagttcaagcagcgacgcttcaggccctgcatttttaaattacgctaaagagcagcaggcgcaggaaagtcgtgagcctgttaagcccgtggaggaaaaaagcaataaaacaaaaacaaccaataaaaaaagcgttcagagtaccaatgatatctcccgccaggctgcaataatttctcaaaaagataaactcatccgccagcttcgacagcagctggaagctaaacctgtgacgattaatgccgcagcagataaccaaaaagagctgactgataaaattcagctgcttgagaaaaaattagcggctgctgtagccgaaaaacaacgattaatagataaagagctaacggccgcagctgaaataaaacagagcgtgggccagcgtaacgcctccgaaaataaaatagtgcagcaagaaaaaagctattattag

SEQ ID NO: 194615 - DNA, 447 bp, Klebsiella oxytoca
atgacagaaagcagtattagcgaacgtgaatcccaggatcacggtgatacccggcgtcgtatatgggcaatcgtaggggcatcatcagggaatttggttgaatggtttgatttctacgtctattcattttgctcactctactttgcgcatatcttctttccttctggcaacaccactacgcaattgttacaaactgcaggggtcttcgctgctggttttctgatgcgtccgatcgggggctggatattcgggcgtattgccgatcgccgtggacgtaaaacctccatgcttatctctgtttgcatgatgtgttttggttctctggtgattgcctgcttgccgggttatgcaacgatagggacctgggctccggctctgctattgttggctcgtttattccagggtctgtccgttgcggagaatacggtaccagcgctacctatatga

SEQ ID NO: 194616 - DNA, 1911 bp, Klebsiella oxytoca
atgcgatttcccaatcaacgtttagcgcagctgtttactctgttgcaaaacgaaacgctgccgcaggaggagctggcgcagcggctgtcggtttctacacgcacggtgcgcgcggacattaccgcgctgaacgcgctgctgcagcactacggcgcgcagttcaccctcactcgcggcagcggttatcagctggtgatccacgatccgtcgcgctatcagacgctggaagagagcgcgccgaaagcgcagcacatcccgcgaaccgcggcggatcgcagccactttttgctggtgcgctttttaacctccgcgttttctatcaagctggaggacctggccgatgcgtggttcgtcagccgcgccaccttacagggcgacatggttgacgtacgcgaacgttttcagcgttatcagctcaccctcgagacccgtccgcgccacggcatgaagctgttcgggagcgaggtctccattcgcgcttgcctgaccgatctgctgtgggagctgagccagcaggggccgctgaacccgcttatcggcgaagaggcgtttgacgccagcgtaccggcgctgctggcaggcgtgctgcaggagacgttgacccgccatcacgtgcgcctgactgacgcgggagaacgttttgtctgcctgtacggcgcggttgccgtgcgccgcgtgagcgaagggtatccgctggccgactttagcgccgaggatgtggcgcagaacgtgcgcgacgccgcccgcgagctggcgagcaccctgcaacagctggcgggtaaaccgcttgccgcggcggaagaggagtggctgtgcgtccatcttgccgcccgtcaggtgcaggacgtcgatccgggcaccatcagcgccgacgacgacgaagcgctggtgaactacatcctgcgctatatcaatcagcaatataactacaatctgctggacgacgcccagctgcatgcggatttactgacccatattaagaccatgatcacccgcgtgcgctaccagataatgatccccaatccgctgctcgataacatcaagcagcactatccgatggcgtgggacatgaccctggcggcggtatccagctggggaaaatataccccctacgccatcagcgaaaatgagatcggctttctggtgctgcatatcggcgtcgggctggagcgccattacaatatcggctaccagcgtcagccgcaggtgctgctggtgtgcgataccagcaacgcgatggtgcggatgattgaagccatcctgcagcggaagtatccgcagctggaaattgccgccaccctctcgcagcgcgaatatgaacagcggcaagaagtcgcggaagattttgtcatctccaccgtgcgcatcagcgagaaagataaaccggtggtgaccattgcgccgtttcccaccgactatcagctcgaccaaatcggcaagctggtgctggtggaccgcacgcgtccgtggatgctgaataagtattttgatgaggcccactttcaggtaattgatgctccgatggatcggcagacgctgtttgccacgctgtgccagcagctgcagcgggaggggtttgtcggcgcggagtttcatgattcggtggtggagcgtgaggctatcgtcagcaccatgctcggcgacggcatcgcgctgccccacgcccttgggctgctggcgaaaaagaccgtggtttataccgtgattgcgccgcacggcattgcctggggcgatgaaaccgcgcatatcatcttcctgcttgccatcagcaaaagcgagtatgaagaagcgatggcgatctacgatattttcgttaccttcctgcgcgaacgcgctatggcccgcctggccgtcacccgcagctttgatgagtttaaagcggtggcgatggagtgcgtcagccgattttga

SEQ ID NO: 194617 - DNA, 636 bp, Klebsiella oxytoca
gtgagctttatcgacggcgacccggataagccgctcattaccggctgtgtgtacaacggcgcgaatgccctgccgtatgcgctaccggcgaatcaaactcagtcgggcattaaaacccacagcgaacaaggctttaacgaactgcgcttcgacgacaaaaaagatgccgagctgctggcgatgcaggcgcagaaggattttcaggtcaccgtgctgaacgacagtacaaccatcgttggccatgatgagatcctgagtgtgaaaaataaacgcagcgtaacggtgaagggcgatcaggaacacgctatcgacggtaatgagacgcataaggtaaaaggcaactacacgctcaatgttgacggtaatctgacgattaaggtcagcggcacgctcaccctcgagagcggcaaaaccctggacataaagagtggggcgggtcttaacgccagcgcgtcaggcagcatgaagctggatgccgccagcatcgccagtgaagccaaatcctcactgtcccagaaagccgtaaccatcagccaggaagcaagagcgacgcttaccagcaaagccagtgccacccagaccgttgacggcggcgggatgctggtgattaaaggtggcctggtgaaaattaactga

SEQ ID NO: 194618 - DNA, 165 bp, Klebsiella oxytoca
atgaaaaaaatcaaatatgcgccacttgccgctctgtttattttaccctgttttgttagccccgtgctcgcggaaaagaccgtggccggcgtcattcatttttacgggcgggtggtggaagcgccctgtcagcttagggaaggtgcgaacaagttcctgatatga

SEQ ID NO: 194619 - DNA, 666 bp, Klebsiella oxytoca
ttggataataaacctctgagttttctttacaatgaagtgattaacaaatatcagaatgcggatagatttattctacttgatgacgatagcttgctagatgctaattttttcttcgatattgattctaatctctcctcgggtaatgaagtggatttacaagtgccaaagatcattgacaataaaactgaaatagagttttatccaagatacaatggcgtgcctgttaaggaacaataccaacataaaagtaaagaaaaatattttttttattcgataggttcaggtttggttatttataaaagtcttgtggataaaatgaaagatttttatccggatttatttgatacgaggtttgctttatatggagttgatgttagcctttttagaagaattaaagtgattgagagtaacggtgtttgcgtaaatatccaagttgtctcaaaaattaatcactccttatctcgaaccgagactgttatgcctgcttggcgatataaagaaaggctgttcgactctgttttatcaactaaatattattcacgtaataaactttatctcttttatcattttgtaaggttaattttaattgaagtttcgaagctaaatttcaataatattaaattaatatttacaactttttatactggaaaacatccccgaacttag

SEQ ID NO: 194620 - DNA, 1080 bp, Klebsiella oxytoca
atgagtaaaaaaatactttttgttacaatgcatttgcctagtgtttccgttcctgaggcgggtcagaagctagcttattcacgtctatgtagcctttccgaaaaaaataatgcgaaagatattgatttaatatctatttataatgaaagggaggagtcttatattaatttagctgattatcagcaattgaattcgactaatcttctaaaaattaccaatattagaaggcttattaattttttatctaatttttacctacctgtgaatatagccgctaaaactgactccaggataaagtcgttagtaaaatgcaaggagtatgattatattcatatcgaatttgaacaaggtatatcaaatattccggtggaattatgggctaaatgtaatctagttttacatgatgtgctctcacaatcgttatatcgattctatataggagagcggaattttttaaaaaaaatcctctattattttagatataagcaaatgatttcttgggaacaaaaagtatttaatcggataggtgaaatcaccgtgcttaatgataaagataaggacatagttaaaacgattattaataagcaaaatgttaaagtaaatgttgattaccccaaagtttcaggagtattccatagcgttaatcgagataatgtaatatcaaataacattattttttggggggcaatgaaccgtaaggaaaatatcgatgctgttttgtggtttctaaatgagatatttcctcttataatcaaaaaaatacctgactctaccttttatatagtaggagctaatccaccagaagaaatagtacagatgcagtcggaaaagatacaggtaacggggtttgttgaatcacctattcctttttttgagaaagcggccttatctgttgtaccactccgttttggcgctggtataaaattaaaagtgctggaaactttaacggcaaaaatacctactctagctactgatgtcggtgctgaaggtatagataatataaatgagtgtctttttgtcgaaaatgaacctgaaaaatttgcagctcaggctgttaaaattttagaaagcgggagttag

SEQ ID NO: 194621 - DNA, 225 bp, Klebsiella oxytoca
atggaaggtaaaaatattggaagcattgctcttaaagaagggcaaactacgaaaattctacttaatcgaattgctcgatttcgtattgagatgatcaacggaacagtagtagagggtgatattcctgcaaattctgaatttatggtaacgcctgttggtggtgatatcgtgaatttttcaatcaattatcacgacatacctgacaaaccttttgcggttgattaa

SEQ ID NO: 194622 - DNA, 330 bp, Klebsiella oxytoca
atgaaaaaattagctttagtgttgatgttaacagtttcttttggcgccgcttcagccactacaatttccatcccgaccgattcgaaagccaaatacaccatcattgataaaagcttaaatggttccatggcaaccatcacgaccatgagagaggggccctcagggatatcctactcacagcgcctgtatgactgcacatcttggtcggtgaagtatcttggtgatggtgacacgctggagcagatgaaagcgtccaagcctgacgaaggtatgtcttcaattgttgataattcaatagcgtattatataggccaacgggcctgtaaataa

SEQ ID NO: 194623 - DNA, 144 bp, Klebsiella oxytoca
atgaccattaaaaacgaagtgttcatagccatgcctaaaacgaagccagaagcgctacaagaggcgatgataaagtacgcgtcctggtacacggtgattttgggtgtttttgggcgatttctagggccattctgggtacgatag

SEQ ID NO: 194624 - DNA, 201 bp, Klebsiella oxytoca
atggctttatttaaggttacttatctggttaatggggatccaactttcagggatgtcaatgtcagtagcgataaagaattaaccaaatttgatgaagaggttattcaggcagcgatgcgtgattctgttcattacaccccagcttcaagcgcaacatctatcaatggactgagagttgtaatggttaccgcaatcaattag

SEQ ID NO: 194625 - DNA, 987 bp, Klebsiella oxytoca
atgacaccggagcagacggtaaaggtggggctgccgatagttccgcgcagcaaggttgacccgacgcgatcggctaagcaggtcagcgcgatgttccaggatatcgaggaccggtatctcggcatcaagcgcgctctgaaatcgttcttcgaccagcgcctgaccgggagagagcgagaggttaacagccacaaatggcacttcctgtgccacgttaacggcgaagatcagacgctctaccaggtaaatgccgggcggttcatctacgacatgtcgccgcaggagatggccgacctgatgggcatcgtacagaccatcctggacgattacctgctggaaggtggagagcaaaacctctgggcgatggactatgtcaccaaagaggcgcagcgcggcacgctggaagcgttcaacaacctgtctcagcagtctccggtctacgccagccagacaacgctgcagatgctgctgtccagccccgcctaccagaaccagatcgccgccgcttacatcagtacgtatagcgactggaagctggaaagcgaccgggcgcgcggcgacctcgcaaacgttatagccgatgccattggccgaggcgtgaatccgcgcgagacggcgcaggtgataagcaagcgcctggacgtctcaatgagtcgcgccaagaacatggcgcagactgagcaggttggcgcgctgcgccaggcgcaatggaacgaaacggactgggctgcggatcggcttggcctgaataccggcctgctgtggctatctgcgctcaaaccgaccacgcgcagctggcatgccagccgtcacggaaaggtctacaccaccgagcaggtgcgagacttctacgccgagaacggcaaccggtacaactgctattgcagccagattccggtgctgctaaacgacgacggcagcattttcaatcaggggttagctgagaagctggcgaacgagcgccagctttggaagggggctaattga

SEQ ID NO: 194626 - DNA, 627 bp, Klebsiella oxytoca
atgaatactaggccatacccgccagctaacttcatcaactccgacaactggcagccatacacccgcctcattcctgccagcgaagtgagtgagtgggtaaaccggcaaatcctcagcgataccggcaacatccacaaccctgaccatgaacacctggttgatgcagatctctgtttcatatgggcctctggctcgttcgccaaaagtggccgcattgtgctgggccagtgtgagcaggtaatgctccgtgcaggcggctggcagaaggccagaatggagcagcagatgcatgaatggttcggtcgtataccgaagttcatcatcaccctggctgccgactactgcgagcaatgcaacgatctggagttctgcgcactggttgagcatgagctttaccacattgcccaggctaccgatgactatggtgcgccgaagttcaacaaagataccgggatgccggtgctgaaacttcgcggccacgatgtcgaggagttcgttggtgtggttcggcgttacggcgccagcaaagacgtgcaggaaatggtggatgcggcgaacaggccggcggaggttgctcatatcgatgttgccagagcgtgcgggacatgcatgctgaagctggcttaa

SEQ ID NO: 194627 - DNA, 612 bp, Klebsiella oxytoca
atgagtattgcgataattttaagaaaccaaatggctcctaacatatttcgagatcttctgcttaggggaataaagctccctaaccttactgaaataatcttttgcagtggtttctatcaggaaagtagaaactcgaattataatgtttcattagagggtggccttgcacatagtttatccaactccagagccaaagtaataactgttggggttcatagttatgcatggaggcagtctttcgtagatttcaataaagcgctaaccaccgcaggggttaacgttacaaccagaaaagtacggggtgacaaatggcatgcgaaagtttttattgccagcactaaaaacggaccagtgttctccctgatcggcagtagcaatatgacaagaccagccttttctacgtcaaagccttttaactatgaagcggacgtcgccttatgggtcccacaggctaaaggagttagcacagcaatacaaagcgttctgtcggaaagtagtccattcgacgttattcggaccacttatagtccaaataaaaatggtggtctaagtgtgaaggatagattaactcagttacgacaggacatcctagactcgactgacgcattctaa

SEQ ID NO: 194628 - DNA, 354 bp, Klebsiella oxytoca
atgacaactgatatcaccgaaatggcgcagagagccagaatcaacgctgagtgtggtgagcatctttccccagcggagaccatggagctggtagaggcgctggagagggcgcatcagaccgaaaaaacacttaaaagtcgaaaccgtaggctggatgggattatttctgccgcagagaagcgcgtcgccgatctggagtcccgactaggctctgctgacaaattacaggacagtgcgtttcgtagcggtttgcagcacggatttagtctcgggcagacagatgaccaaaaaggctatgaacagagtatggctgcttatagcccagccgctggcatcaagtgggaggctgagtag

SEQ ID NO: 194629 - DNA, 270 bp, Klebsiella oxytoca
atgagcaagtcatacgtcgtaattatccggcacgcctggtgtaacgaaggtggtcacggtatcgaatattcatctgacctgattcattacgaaacccgtaaagatgctatttcgcatggttttcggactgtggatagcgacgatttcaacatcggcgtaattgaaggtggaagtttagtttcgtttgactggatggataatccggttggcgaaagccaggacacgctggcgcagattgccgagctaatcggtctggagcgtgcagcatga

SEQ ID NO: 194630 - DNA, 654 bp, Klebsiella oxytoca
atggaaattttttgggttgtggtgggcgttgtggttgtgattttgtacctcatcaaccagaacaaaaccagagtgacaaacagaactgagataaccagagatcgcaagataaaaacggatgacggcgaaatcagcatacgtgaacgacaggttatagacagtgtatcaacccaatacactaaaccaaatacagtgaacgtcgcacagccggattatgacaacgcggtgatatctgattactacaaacaactagctaagcaaaaagctattgagtctctaaggcaaaaccaaacacagcctgttgcatcaagcagacctgtggagaagatagtcaacccattgccaagagttgagcagaaacaaatcacacctaaaaccgaatctgcgccggtggaacacagaaaagtgtgtaccagatgcagtcgcaatctaccgatggataagttcagaaagtcgagcaagtcccatcatgatggttacaccacatggtgcgcccattgtcttgatggccccaaaaacactaggcacaccaaatggtgtccaatttgcgagatccgccgcaaacgaaccagttactataagaatgctaacaatgcggacggattgatgtcatggtgtaaaagttgctgggattcttatcgcggaagaagttaa

SEQ ID NO: 194631 - DNA, 1707 bp, Klebsiella oxytoca
atgccaatattcgttgatgatggtgacgcaggttcaggcctgcagcagccaggtagtaactttgaaagcggatttggtcaggctttgggggctgctttttctgaaggaatgcgctcaggaccagccaacgctggaagtcggttttttgaatccgaggcctatgctaatgatcctacatctcctttagtagatcagcagacggctcagcaaaagtttgactctctgggcatcaaaaatatcaaagtacccgaacagggtgtaacacaagcgtatctggaccatgtaaccgagacaagccgggcgacacaggagcggcgagcaatattgcagtccgcgccttccggcgtagcaacacctcttatttttaccgcggggctggctggcgcaatgacggacccaggtaaccttgctctggggtttgttccaggtcttggggaggtgagagcggccagcgttgcaggtcgatttgcacagcgatttgtacagggtgccagcgccggtgccgtccagtctctggttgctgaacctattaataccctggcatcagcgtctgaaggtgatgattacaccctcggccaggcagtggaaaatttcttcatgaacacgatagccggcggtggattgcatgcctttggcggtgccattcgtgattcaatagccgccaggcgtcagcagcgtttacagcaggataacccgcaggcggtttctgacgctgcgccagcagggcaggcggatatcgttaatgccgctgggctcaccccggacaacacccctgtattgcgtgacagttttgccgacgcacagactgacctggcccgaaccattaacactggccttgatgattatgcttggcagcgtgcatggaacgaaactattcagccctatcgtgattctctctccgggcagcttggcggacagtcgccccgcattgccgacatcaaccggcagattgccgaaaatgaagtctcattgcagcagtcagatcagcaattccgtgacctggcaaaacagtatcagggccagcgcatgagccgaaaacaggcggaagcccgtgcgcgaaaagatattgagcaaatccgccagaacactgaggaatcgacatcacggttacgcgaagaaatttctgccaaccgggacgcagaaatctcacgcggcaaattacgccagcttgagcgtggggaaattccggatgatcttgcaagtctgattgaagctagggccgggcaaatcaaacaagggttgcaggtttctccgctggctggcggtgtaagaaccgcgtctgagcgtttcagcgatgcgaatatctttgttcgccagaatgcactgaggtctgcgattcgccaggcagtagacggttacaatcctgatattgaggattttttccgtcttgcagatccggcagaacgtagcgctgcactgaatcgcctgaagatgcaggctgataaccagcggcattctgatgcggccgcacgtgcagccagcacagatgcagaacaaaccatccagcagcgcggagacgacgaactgcgggcagcgcaggaagacctgcagtctgaaatggaactggcccaggcgcattttaatgggctggaaaatcaggcagaaataaacgcccaccttgccgaaattcaggctggggccggggatatgagttttgctcaggctgcacgcgcatttgctgcctgtatgttgaggagagccatctaa

SEQ ID NO: 194632 - DNA, 2715 bp, Klebsiella oxytoca
atgccacaacttcctttttacaaccgtcaggtgacgactcagggcctcggagcgggtcctgttaacctccccaactctactactgatcagcagtttttagacgaagggtccgacgcagcgtcgagagctgcggtatcaatccagtcccatctggatgatacttctgtacaggataatctcctgaagcttacgtatagccgttacaaccttgcagaagaacaacaaaagaaattggggattaatgccgatggatcatctgatcaagcactttcccagtttgacgattacgccgccaccctcaggcaaaatatccctcagtcccgtatggaggagtgggacagacaggctgccatcactcgccttcaactccagagcacaaccgacacacatgagcttgaccagcaccaggcattcaagcgtgggcagtacgaaggtaaccgggaaatggctatcgcagatgcccagacgttccgtgctgatacgccaaactatcaattaaccctagccagaatgaaagataacatcacttcttatgggcaatctaacggttggtcgcaggagctgatagatggtgaaattcgtaaaactgagcagcagatgtccagcaatgcaattcagtcatttgcagcagatcagcgtgctcagcaattagcaaacccagctaccttcacgccaggaaacattactccagggagtgtctggtcttcgatgacctactttgaatcaaaggggcagcagtttgatggcaacgggaagacgcttacgtcgtctgctggcgccatgggtgttgcacagatgcttccatccacggcagaagaagtagccagaaagcatggtattgcatgggatccgcagaggtttatgaatgatgccagctataacatgaatctgggacaattgtatcaccaggacttgacacaaaaatatggtggtaatcaggctctaactgtcgctgcatataacgcgggccctggtgctgttgatgactggattaacggaactaacaaaacaggtaaaaataatagtcttgttcgcctgggaaatcccaataaaggtgaaatttctaacgatcagtttattgcaggtatcccattcaacgagaccagggattacacgatgggcgtattaagccgcgctcaaatactgacaccgcagaatgacctgcaacaaataacctctatgccatggtatcagactgccagcccggaacaaaaaagcgcgctcattggacaaatggcatctgaggtaaaccgccaacgcgcgtacggcatgcagaacctgcaggacaccatgcaaaacaacatggctcagatgcagaatgggatcatgcccacgcgtgacgtcactcgccaggaatatctctcctatctgccgcagggggcaactgcaccacaacttgagcaattcaaccgccagtatgatgaatatgaagcgacaaaagcgctggtgccaacctataacacgataatgacgcagcctgtcgcgatggcgcagcagagtgttcaggcgctatacccgcaacccaacgacccggattttgatcgtaagatgtctttgtaccagaaagcttccgcccagttgcagcaggtaactcaacagcgcaaaagtgatcccggcgcgtggtttatgaaaaactcgccacttgtgcagcaggcatataactcatggcaacaaaaccccgccgatcctactatggcacagtcatttattgcttcggtgcagtcagagaaaagccgattcggtatcagcagtcagaaggtgctgcctgactcgatagcgcaggctatggctgaaggatttaacaacaacaaagaaacaacggttgaatccatcaggcagcagctgaacgcgtttgggccatattcgcaggcggttggccgacagattatggggcaaagtaaaaatggtcctctggttggtgcattatcagctggaaatccgcgggcaagtgtaccgttgtggcaggaaagaaacacgccaacggcaagcctgaaggagtccgtgattgcgaaaaatgggaaagggtcggatacctcagtagcgcaagaatgggcagatgcgtctgcagatttccggcaaactatgcttgtgcagccaggcggtgcaggaagctggtccacactggacgaacagggtcagcggctgacgatgatcaacgtgttgcgtggaatggatgccggcgctgcggcaaagcaggccgctgccgatatgttcactagtcaatacactgtcaacgatacgtatcgcgttccaacgtatcttggctatcagcctgattatattgcccgcggcgctagtctgtttaaagacaaactgacagccgatcagcttcagcctcttaattttggtagtaaaacgcctgacgaattcaccaaatcgcagacgctttacgaggtgaaaaataacgctcactgggtgaataattccgatgattccgggctggtgctttaccttggaaacaacgtacagaatgatgccgacggcaatccggttaccgtcagctttgccgatctcgacaaaatggcgaaagctgatccctcctggtggcagagcgttaaaaaattcgcatcccaggagacgccgtatacaccaggaactgaacgagatgcgcgcgcgcagaaacttcagggattacgtgaaacgtacggcggccagtcgcaaagcggcccatccttttctgaaggaatgagggacaccaatgccaatattcgttga

SEQ ID NO: 194633 - DNA, 372 bp, Klebsiella oxytoca
atgaatcagctgaccaaaaccaaaccgatccttttaacctacgcacaacgcgaagcactggaaattatccagagtgaagagcgggcgcgttctccttacggcgctgcgccgtctatccccgaactggtgcgtagcctgcttgatatagcgttaaaggatgtctacgcgggcattgaaaagcagaaagaaatgaaggcgcagcaggaagatttggaaaaactgctagccaccgcgccggtagcagaagaagcgacaaaggattttcttgctacacgtaattctctgctccagcaggaacatggggcagcccccggctcattaaattacatgggcgcaactatgcttactgaaacaaaaccagaggaagcgtaa

SEQ ID NO: 194634 - DNA, 432 bp, Klebsiella oxytoca
atgatcgttccgtttgagccttggcacctggtagccattacgccgcaaccacatcagatcggccgtatcaggactgaacagcacgccgggaacattgccagtgtcggcgcgtttacctgtctgcacaatggccagcctgtggctataggcggcatcgtacccgcggaaaagtacggactggtatttgactccggcatagggtacgcctggatgatgatttcggccgggattactcacctctggccggagatattcagggcaacgcgccgggaattacgccgggcgctggcgaactatcaccgcatcgaggccagcaccacattcccggaaggcgaaagaatgctggcgatgctgggtatgcgatgtgaggggcatctgaataaatttaaccacaggggagaggattcttccctgtgggcgataacgaggtga

SEQ ID NO: 194635 - DNA, 402 bp, Klebsiella oxytoca
atgactgagcctgtaatcgtccatcttgaggagttccaccttaatgaaatattcccggactcattaccgccggaggctgttgcgtcgctggtatctttcccatcgtttgcgatggaatacggggaaaaaacacttgccgctggtggcgccattcagttagccccgggcagggtcagactctggttacataccgtaccaggtgcagaacagttcccagttcatattttccgtgctgcactgcgatttaccgaaatagcgttatccgaaaattatcgagtggaatgtatctgcgccgataacctgtctgcccgcgttgcaaaaatgctcagttaccagcaggacgctattatccgcaattaccagcctggctgtgacgccagattattttcaatcgtgaggtga

SEQ ID NO: 194636 - DNA, 753 bp, Klebsiella oxytoca
atgaatctgtttgaacgcttaatcctgcgccgtctgatgaatgcaaccattgaaggcggggaaggtggtggcgctgccgcaggtgttgattctgccgcccagcagcagaatagcgatgcggcccagcaacaaaaccttttaaatccaggcgctcagcaacagcaggggggagagggacagcagcaacagcagcaagccgcccaacagcagtcgcagaccaccgcgccgttcctcgaaaaacttccagaggatagcgacgaaaaaggctggcaggaactttacgagaagttggggcgcccggaaaaagttgaagactacggtattaagccaccggaaggcagcgatgggacatttttaaatacggccttgagctggatgcatgaaagcgggctcaataaaaagcaggctgaaaccgtaattaataaattcaacgaatatgcagccgaacaacaaaaaagtgcccaggaaaatattgcaaatcaaaatgctgctaaccgggaaaaggttatcaagtcctggggaagtgaagttgaggcaaatacagcgatccttcagaacgccgtgcaacgatttttccccgatgctgtgattgaaaaattcaacactgcgggattactcaatgacccagaccttgtgaatgcagtcctggcgatcggtaaagcgctaggtgaagacaaaacagttacagccgcagcgacgggtaatgcagcagaaaaagacattgcccaccgcatgtggccgaacatgcaataa

SEQ ID NO: 194637 - DNA, 261 bp, Klebsiella oxytoca
gtgaaaaaactgcatgagttagacaccagtattcaggtggagatcgtcaaaagtgctggcgctgtcctggctaaaaattttggctggcccggcggttcggacggaacgcaggcagctaaagacattgtcacatctgtcgtggatgcattcctgtcgctttacccggaagaaaaaccacacgatgaaaaaattgaagagccaaaaagcgatcccgaagaaattcagcagaagcggaaatacacccgtcgtaacacggagtaa

SEQ ID NO: 194638 - DNA, 303 bp, Klebsiella oxytoca
atgactaaagacgataaagactggctgtcagacgtagccgaattgggttgcattgtctgtcgcaatctcggtttcggttccactccggcagaaattcaccacatccgaaccgggcagggcgccggccagcgcgcaaatcacaaaagaaccttgcctctttgccctgcacatcaccgcactggcggttttggcgtggcaattcatgccggacaaaagacatgggagggcaaatacggtaccgaactggagttgctcgatcaggtgacgactgaagtgaaggtattgcgcctatgtcgggtttaa

SEQ ID NO: 194639 - DNA, 486 bp, Klebsiella oxytoca; identical to SEQ ID NO: 128128

SEQ ID NO: 194640 - DNA, 1791 bp, Klebsiella oxytoca
atgggggaaagctcatccctgtcgagcatttttgatagcgtgccctttacaggggttcagctggcgacagacgaggacatgatcccggaaagcctacgcggtttcgcgccaattgttcgcggtattgccagaactaacgcccgtgtcgttatcaaacagaatggttatcagatttaccaggcttttgttgctcccggtgcctttgaaataaccgacctctactctaccggtggtaacggcgacctgtatgttacggtcgaagaagccgatggttcccgtcaaaacttcgtcgtgccatacgcttctctgccgctgatgctcagagaaggccagatggagtacgaaattaccagtggtcaatatcgtccctacgacgacaatgtagatgaaaaaccctttacgcaggccaccatcagctatggcgcattaagcaatacaacgttttataccggtattcaggcagcatctaactatcaggctctggcattgggcgttgggcaaaaccttggcgatatcggcgcactttcagccgacgttaccgaagcgtggtctaagaagaaagatgcggataaaacgtccggccagtcctggcgcatccgatatggtaaaaatattctcgaaaccggtaccaatattaccgttgctggttatcgctattccacttccggatttaatactcttaccgatgttatgaattcctataacaaccgctacggtggttatacttctcactcgatacgtaaccgcaccaatattaccgtcagccaaagcctgggttctgggttaggcagtctttccgtatccggcatattcgaggactattgggatagcaatcgccgcaacaactcattaaacgttggctacaacggcggattccgacgcttcaactattatgcaggctatagctatagccgttattcttggggtaacgatagctcaagccgtactgtagaagacgatcacgttatttcatttaatatcaccgtaccgctaagcgactggctaccgaatacctatgcaacctataacgttaccaacagtagtcctggctctaccgatcaatatgtttcgctgagcggtaccgcactggagagcaataatctggactggaacgtacaacagggttatagcaatcgagaagatgcgagcggtggcgtatacggtaactatagaggatctatgggttcggttaacggtggttatagctacagcaaaaatagccaactaattaactatggcatgagcggcggtgtattagttcatgctgacggtattaccttaggtcaggaaatgtcagaaacctcagtactagttaaagctcccggtctaagccacgttcgcctggaaaatgatgtgaccattgaaaccgattatcgtggttatgcgattcttccgtacgtaactccgtatcatcgcactagtgttactttggacagcacatctcttagcgataatatggaactgccgaacacaacccagaaagttgtgccaacccgagccgccatcgcaagagctaatttcgaaggcaatattggtcgtcgcgcattcctgatcttgaaaagatcatcaggagaaaatgttccttatggtgcaacggtaacctctacgcttgataaaaatgcgcaggccagcatcgtttccgatggaggcatggtctatatgtccgggctaaaagacagcggcgatgtttatgcacagtgggggacaaaaacaggccaacagtgtaaggcaaattatagcttagccgctacaaccgagggtatttcgcagaccactgcgacttgccgttga

SEQ ID NO: 194641 - DNA, 366 bp, Klebsiella oxytoca; identical to SEQ ID NO: 189932

SEQ ID NO: 194642 - DNA, 186 bp, Klebsiella oxytoca
atgaatacattaattgctattatattgtataacaaagaaataaaaaactctttaactattaatagcttattgaataactcatatcaaaattatgaccttgttgtaattaataatggtcctgatagaataaattataaaatatttgaagaagcactacccccgggaaaaattaaaaattttttctga

SEQ ID NO: 194643 - DNA, 408 bp, Klebsiella oxytoca
atgatgatccatatatcacccgttctggtgtgtgaagctgacatgatcggtaatgactccaatttactgatagtgttttatgttcagatagtgcccgatgactttgtcatgcagctccaccgatttggagaacgacagggacttccgtcccagccttgccagatgttgtctcagattcaggttatgtcgctcaatgcgctgagtgtaacgcttgctgataacgtgcagctttcccttcaggcgggattcatacagcggtcagccatccgtcatccataccacgacctcaaaggccgacagcaggctcagaagacgctccagtgtggccagagtgcgttcaccgaagacgtgggctaccaccaccctgcgtatcctgtcatacgcgtaaaacagccagcgctgacgtga

SEQ ID NO: 194644 - DNA, 1251 bp, Klebsiella oxytoca; identical to SEQ ID NO: 193791

SEQ ID NO: 194645 - DNA, 342 bp, Klebsiella oxytoca
gtggaatgggaaaacctgcagcgcaaaaaacagcaactgaaaccgctggagatggacgaactgatcgcaaaagcgtggcggtttgtgcgtgagcgttttcgcagctaccaggctgaacgaaaatctcacggccggaagcgggatactgcacggcgggatgcatcacggcagcgtcatgacatcgagacgcgcgtgcgtcagcaactgacccgcgaatacgccaccggccgcttcaggggcgataaagaagcgctgaagcgtgaggttgagcgccgtgtgcaggagcgcatgctgctgtcgcgcggaaacaactacacgcggctggccactgcccccctataa

SEQ ID NO: 194646 - DNA, 504 bp, Klebsiella oxytoca
atggccacttatttgaccggcgtttatgcctcagcaatgaccgcgcagaccagtgtgtcacgtattttctatgccatggggcgagaaggcgtactaccacgcaaagtgttcttccatctgcatcgcaaattccacacaccgtggcgggccattttgttcgttgccaccatctcgctgctggccctgttccttgacctgaacttagtggtatcgatgataagctttggtgccctcggtgctttcacctttgttaatttgagtgtgataaagcactttattatcaatgagaaacaccgcggtactgcggctatgtttaagtacgggctattacccatgatgggattcgtcatgtcggtgtggctgtgggttcaccttgagcaacgggcgcttgaagtcggcttattgtggctattggcaggctttatctacttgttgtggctgactcgcggctggcgtaaatcgccgccatccgttaatccagatgatatttcacacctgttgtaa

SEQ ID NO: 194647 - DNA, 948 bp, Klebsiella oxytoca; identical to SEQ ID NO: 129172

SEQ ID NO: 194648 - DNA, 378 bp, Klebsiella oxytoca
atggacgaacagtggggatacgtcggggctaaatcgcgccagcgctggctgttttacgcgtatgacaggctccggaagacggttgtggcgcacgtattcggtgaacgcactctggccacactggagcgtcttctgagcctgctgtcggcctttgaggtcgtggtatggatgacggatggctggccgctgtatgaatcccgcctgaagggaaagctgcacgttatcagcaagcgttacactcagcgcattgagcgacataacctgaatctgcgacaacatctggcaaggctgggacggaagtcactgtcgttctcaaaatcggtggagctgcatgacaaggtcatcgggcattatctgaacataaaacactatcattaa

SEQ ID NO: 194649 - DNA, 276 bp, Klebsiella oxytoca
gtggcttctgtttctatcagctgtccctcctgttcagctactgacggggtggtgcgtaacggcaaaagcaccgccggacatcagcgctatctctgctctcactgccgtaaaacatggcaactgcagttcacttacaccgcctctcagcccggtacgcaccagaaaatcattgatatggccatgaatggcgttggatgccgggcaaccgcccgcattatgggcgttggcctcaacacgattttccgccatttaaaaaactcaggccgcagtcggtaa

SEQ ID NO: 194650 - DNA, 144 bp, Klebsiella oxytoca
atgaccgtcaccaaaaaggggccaccatgccccgcttacatcgacccggaggccctggagcgggctatcgccgccgctcgcaaaatccgggaagccaacccggagcgctacaaacccatccccgtccagccgaaacttttctga

SEQ ID NO: 194651 - DNA, 567 bp, Klebsiella oxytoca
gtggctaaataccagattgattctattcagaactggccttcatttgaacatgatggttctacttattctctttcacacctcgatgctcatgagatcatgtataagggtgataagcaggatttcacctttgtggttacctatggtttacattgtttcgctaaagaagatacgccttatgtcatcccggttgtatatcaggacgggcgagaagaaaaaaccatatgtatggagcgctatgaggcgtccaagcacatccgtcatatcttggttaatctgccagatatgcgattgtttcatacggcatcagagaagtatttcacgctggatatgatgaatagtgctacggggcagcttgaaccttacaaaatttgcattgcgttctacaaagagaagcgcttactacgtatgcatattctttctgcctttttcgttcgttacggtccaggttttcccggtgagcctatcccaaataaggctgtcagtttgtttaaggtcgcgactgatacggcaagcaggcagaaaaaacatgcttggataccaaaggaagcgaacaaccgtatcaaatga

SEQ ID NO: 194652 - DNA, 1467 bp, Klebsiella oxytoca
atggctacagattcaaatggtcaccaacaggttggcagcattactcatgaggtttatatagtgttaagacacaatgtgaaatgggtatcactgtctcagtgctttaagatatcttgtcagcttttaggtttggttgtttttgctcgctacctaacacctgaagagattggggttatgtcgttgactcttgtcgttgtgaactttgtaaatatattacgcgatatggggtcttcagcggcaattatacagagagtgtatattgacgataggttgaaaaattctgtttttgtatttaatgtgctcattggttgttttttattttttattttttattttttatctaatgatatatctagtttttttaagaaagtggagttggcaggcacaataaaagcaatatcctttgcatttatatttaacagtgtaacgtcagtgcaccttgcattactggagagggcgtcaaaattcaaagttgttgcgattatagaatcattctcatcaattatttcacttctttttggcattgcattagcaattaaaggttttggtgtatatagtttagttgggcaaacattgatgtattctctgctgacatcaattatgtttcatatgttctcaggatggaaaccggcatttacatttgactttagggatataaagtcaatatttaattttagttcaaatattgtcgcatttaattttgtgaattttttttctagaaacagtgatcaaataataataggtaagtttttttcagcttcaatacttgggcaatattcaatggcttataaagtaatgctattcccaattcaaagcgtaactgcggttttaacaagatcattgtatcctgtgcttagtcgcttgcaggaatcaaaacaagatgcattatcagcataccttaatgtattaaaagtaatttcattagttgttactcctatgatgcttggtctttcatcagttagtcatgaattagttaatatcgcttttggtaaacaatgggtgctcctgccaaatttactgacgtggttatccatagtaggtattttacaggcaatggtaagcactacaggttctgtatttatgtctcaaggggatgctagaacattatttataatatcagtatttaactctattttgcaggttggctcttttattattggtgttaattacaatatagaaacactggttattttatacatgatagctaatttcattatgtttttacctaatatgtatttatccgtaaaaactcttaatggtagcattcttgatgtgttgcgttgtgtttacaagcctgttttttcaggggttattatgtttatttcaataaaggttctgtcttgcttttctttacatttttccaatgtgagttttttacttatcaaaataggttttggttttcttgtctatacgtcacttattctttttttggatagaaagttagtgaagatgatatttaaaatgtaa

SEQ ID NO: 194653 - DNA, 180 bp, Klebsiella oxytoca
atggacagctacagccagcagctggcgagcctgaaagcgaaaagcggcgcgggggtgacgatttacagcgacgacacgcgccggaacacctacctggtggtgctgccgaagcaggcgcacggcgtggaaacctacacatcgacgaccgacaacaccgtggtgaaatacacagcgaaataa

SEQ ID NO: 194654 - DNA, 234 bp, Klebsiella oxytoca
atgaccgagatggaaaaacagcttctgagcgccttagagagcttacagacaagctacgagcaacagcagcaggcgtggcaggacagctacagcagcttgcagcacatgttcgaggctacctcgcaggcgctgacgcacagcgaccgggtgtgtcagcacttgagcagtcaggtggacagcttgcgcgcgcaggtcgagagcttgagcgggaacgtcagccgcttgatgcgctga

SEQ ID NO: 194655 - DNA, 333 bp, Klebsiella oxytoca
gtgagtcacgcgattgagtttatcgagaccccgatgtttacccgtcagataaaacagatcgccacggatgaagaactcagggagctgcaaaagacgctgattgagtcaccggataaaggcgatctcatccagaaaaccggtgggctgcgcaaaatcagaatggcgacgggcaaccagggaaaaagcggcagtgcgagggttatttactttctggccaccgccgaggtgatttatctggtgatggcctacccgaaaagcaccaaagacagcctgacggacgcggagaaagccgtgctgaagtcgctgacccaacaactgaaagacgaggtgtga

SEQ ID NO: 194656 - DNA, 285 bp, Klebsiella oxytoca
atgagtttttttgacgagctgaaagcatcgctggaagaagccgttgaaatcaaaaacggcgtcagagagcctgcccgcgtcacccgttacgagctggcagacgtgaaagccatcagggcacagctgaacgtatctcagagcgagatggcaaaagtactgggaaccagcctcgacactatcaagagctgggaaaccggacgccgtaatccgaccggactggcggcgaaggtgctggcaaccatccaggcgaacccgaaattcttccaggagctggcggcgcactaa

SEQ ID NO: 194657 - DNA, 918 bp, Klebsiella oxytoca
ttgcataacgccgcactcgaactcttcaacgaccgcttaccgcacaagccgtacttttcggacgatctgcacttcggtgtacgcattgcaggtaaggaacgcgccattctggcgaaatatatccagttcaatcagcctcacgctatgttctggctgggcttcgacgtcgatcgcgccggtgccgccatcgactggagcgaccgtaacgcccccgcgcccacgctgaccatcaccaaccccgacaacggacacgcacacctgctgtacgcgctgaaaacctcgatacgcaccgcgccggacggaaaaatgaagccgctgcgctacgccgctgccgtggagaacgcgctacgcaaaaaattagaggctgacgcggggtattcaggactaatctgcaaaaatccgaaccacggccactggaaaattgccgtgtggcagccggaactctacacgctggactggctggccgactttctcgacctgaacgcggcgaacgataaagaaatcgtcgccgactacggcttaggccgtaactgcaccctgttcgacagaacccgtaagtgggcatatcgcgccatccgtcagggctggcctgagtatgagcagtggctgaaagcctgctacgaacgcgccagcgcctacaacctgcaatttgcagttcctctggatgattcagaggttatgactgtggccaaaagtattgctaaatggactctttctaaatttagttatgaatcttttactagatatgtagaaaaaactcattcatctagcattcaatcagcaagaggtaaaaaaggcggggtaattagtagtggtggagggagacctaaagggacaatcagtcagacatcagaaagaacactaaagccatgggttagcatgggaattagcagggcttctttttataggaaaaaatag

SEQ ID NO: 194658 - DNA, 477 bp, Klebsiella oxytoca
atggaattaaaggattttatttcaataggcattgctgcaattagtgtaattatatccttgctggcattaaataagtcatcaaaagcctcatctgcggctttgagcattcaacatgcaagtgttgagcttgagattagaaatgccatagaaaactcaaaaaaccagatacagaatctgtccataacctttgcaccactgaaggtaaaatcaaacagaacaccagatgaggatgcgctttttgattttcatcagaaagccctgaactcaggtatagaaagtcttctgaaccagtatgatgacgcgtgcgcaaagtacattgatggaaaaatagacaagcaccgttttaaaaaaacctacaataaagaaattagaaacatcgttgaaaataaagagttcgaggagtatttcaatcctacgacatctaattacaaaccaatacttattgtatataaggaatggtttgatctcgaatgttaa

SEQ ID NO: 194659 - DNA, 327 bp, Klebsiella oxytoca
atggctgaaatgaacaacaaagaaagagctgctctttactatcagagacttttaacttcaccaaatagaaaaattgagtctcagagaataatggctgagattgatcagctttattggactcataataacaatcctttaactaaggctgagaagctagctttaattagggaaattgaagagctaatcaaaggaaagcgtaggccaactcgcgacagcattgaaaagcgaggtgggttagaaaacctagatgaatcattttcagtcaatgcttcaaacaacgatgatctaattgatttaatagtagcaatgaaaggaagagtgcaataa

SEQ ID NO: 194660 - DNA, 327 bp, Klebsiella oxytoca
atggaaaagcgaacgaaagagatcaaaatccggctcaccgaaaccgagcatcagcgattgcttgatcgctgcgaccggactcatcttgcggagtggctgcgtcagcttggtttgggagaacacatctcacgcaagcgtcgtgtgcctgaggtggcgcccgaactgctgcggcaggtcagcgggattggcaacaatttgaaccagatagcccgtcgcctgaaccagactgattccctgacgccgactgaacgtgcctcgctgctcgtcgtactgaccagccttgaccgtcagcttggcgacctgctggagcagaaccgtgatcgttaa

SEQ ID NO: 194661 - DNA, 621 bp, Klebsiella oxytoca
atgccagtcagcctgccgttctgctcgcggatagcgttgctgatgctctgcgagcttgattgcagttccgcgctgatagacgtctccagcctcgcgaactcgcgcttcacgctctgctcggtatcctgcgcctgctgcttcgatttctcctcgaagcccttcgccaaatttaaaatctcgctcatatatcattcctttcagccggatatttcggccgccgtccgggtcggcaatgctgatgctgcttttcgtttcccgcgccacggtcaggccgtagctttccagctgcgtcaccacgtcctgccggctgcggatcacgccctgctgcatcaggttcatcaggccggcggtgattttctctgccgcctgctgtttgtcgcggggaagatcgctggcctgcgtcagcgggcggcggtaagtcggatcgttcgggtcgcgcagccccagccggtcgttggtcagggtctgccaggcgttgacacgggggcggtcagcgcggtcaaagtagggttgcaggcgtttgccgctctgcaattcgatgttcgggatgacaaaattcagctcaagccgtcccttgtcgcgatgctccacccacagacaggcgtactggtcgcggtctag

SEQ ID NO: 194662 - DNA, 492 bp, Klebsiella oxytoca
atgaacagtcttttaacgctggcgaaggacttagagcagaaatcgaaagcgcagcagcagactaccggcgagatgctgaaagccgcattcagcgagcacgagaagtctgtcagagcggaactgaacgaaagcgagaagagaatcagcgccgccatcctcgaccacgaccggaagctgtcctcagccatgagccagcgcacgaaaggcatggtgcgcatggtcagccagacgtggctgaccatcgtcctggtgtccgcgctgctgatagcgtcgagcgcgggcattctgtggtggcaggggcagcagatgctcgacaattacatgagcatccgggagcagaaggacgctctggagaagctgaacgcgagaacgtggggcgtgacttatcaggaatccagcgacggccgccggttcctgagcatgccgaaaggaacggaaccgcaaataattccctacgaggggacgaactgggttctgctgaaacaggggtga

SEQ ID NO: 194663 - DNA, 636 bp, Klebsiella oxytoca; identical to SEQ ID NO: 188184

SEQ ID NO: 194664 - DNA, 1002 bp, Klebsiella oxytoca
gtgattcagattccgacagcgactcggatagcgacagcgactccgattctgacagtgactcggattcggacagtgattcagactccgacagcgattcggattccgacagcgattctgactctgacagcgactccgactctgacagcgattcagactctgacagcgattcggattctgacagcgactcggattctgacagtgactcggattctgacagcgattcggattctgacagtgattcagactctgacagcgattccgactccgacagtgactccgattctgacagcgactctgacagcgattctgatagcgacagcgactcagactctgacagcgactccgactccgacagtgactccgattctgacagcgactctgactccgacagcgattccgattcggattcagacagcgactccgatgcagacagtgactccgattctgacagcgactcggactctgacagcgattccgattccgacagtgattcggattctgacagcgactccgactctgacagcgactcggattccgacagtgactcggattccgacagtgactccgattccgacagcgattctgactcggacagcgactcggattcggacagcgactcggattccgacagcgactcggattccgacagcgattcggattccgacagtgactcagactccgacagcgactcggattctgacagtgattccgactctgacagcgattcggattcggacagcgactcggatagcgacagcgattcggattccgacagcgattcggattctgacagcgattctgactctgacagcgactccgattccgatagtgactcggatagcgacagcgactcggattcagacagcgattcggattcagacagcgactccgattccgacagcgactcggactctgacagcgattctgactcggacagcgactcggactctgacagcgactcggatattccgcaggccaacgcggataccaatactgcgctga

SEQ ID NO: 194665 - DNA, 1299 bp, Klebsiella oxytoca
atgaaagctcgtttaataccaccgcacgaaaactgcactggcaatgttttatggcgaaaagaggattttattaataaagtcgacgatatctcaacatctctaaaaaagttaagagatatgggatattgggccagtgcctatcctgaaggagatggcattacatttaaatacaccaaggatagttatcaaaaaagcagtatcgaaattctagaagacttctcaatatgctttgagtgggtagaaatagagttagctaaatcaagaagctctaacctagaattagctgaattagagggtaaaaacaaaaatatggagtgcatagttattgtgccgattgagaagattttcattcaggaaaccattgagatcggaaagtatattttttattgcggaagacaatttgatgaagagtcacataagcgattatcagagcaagatggttcgtatatacagtttaactgtgacctaccatatattgatttattaaaacttaattcaagcattgatcataacagccatgttataaacatgtgtttgtctatagctgaatatgcgcttgatttagtcagattttctcacagctcatttacaagtatggaatatacccctaatcctgcaggtcaacgctctgacggattttatgatgtagaaatcattcctcgtgagatgactcatcttaaaccaattaagataagtggaatatcaagaccccttgccgtgagtaataattggctaggccctcaggttgacagcttgtattaccctgggttgcaatatttatcttctatctacgatggaatcgttgaaaatgaactttcaaaattagttagctccgtagttagggcatgtaggcaatctttttattcaattggcgcggaatcacaatttctaaacctggtctttgcacttgatggtcttgctaatattgacccagattggaaaggatggaagcaaaggacctacattgcagcacttacatgtaataactcactaatcaaatttaagaaaaacctagaagtttacgacgagttatatactgacgtaagaaacaagcttgttcatgatggtaaagatttttacgaacttaacgtcaacgcgaacgaatcctctgaacaaatctttaagtatattaagataattataatactcatcgaaagtaacggcttttccactttgcaaggattaagagattatgcagttcacctacttcagcaggagggttatagaactgcttctgttgagataattgacaaagtatctcttttaagaggaaagaaacctaattatccttcatggtga

SEQ ID NO: 194666 - DNA, 1029 bp, Klebsiella oxytoca
atggtaaaaaagagaaaattaagagtttggatatataaggtaattaaaatggatctttacgaagctcgaatgatggataaaggagaattacatgttcatttgaatggattggtaagcactcaagtaattaggggggtcctagaaaaaaatattattgaaatgcctgaacactttaatatagatactgacttgaatgtaacacacccagcaagatcactagtggattatttaaagccatggcagtttttaaggctcattcctgcgagtcgctttgatttatctattatgattgagagtgcattttcaaatctaattgctgagaatattaagtttgttgaattaagaaatagcattatatacatagcactccttaataacatttctgtttccgaagcattgaagtgggttttagatgatattgactttttttctaaaaaattcaacattcaagccgggcttattctaactattacgcgtggtgaatatgctcccgaacatcttcgttctcttcttggtgcttacaaaaatctaggatgtccagcaggggtgattggtttggacttggctggtaatgaagatataacaccaccacctgagactgcaagtttatttagaagtgctaaagacaaatatggactaggcataacaattcatgcgggtgagactggaaatgctgataacataaggaatgccataattagttatggagctgatcgtatcggacatggtactgctgttataagatctccggagataatggatttgattagagaactggacatttgcattgaggtttgtcctattagtaatcgtttgacaggtgcagtctctaatgtcgatcctcatccagttggcgaaatgattaaccataatattccgtttgtgatttgctcagataatccagctattcacagatcaagcttgagcgaagattatgtcgtatttatgcaagagaccaagaattttatagtcatggataatatgtatgaaactcaaaagcgatatagctttcttaaaggtgtgaaatga

SEQ ID NO: 194667 - DNA, 915 bp, Klebsiella oxytoca
atgaaaaccgatctgtttatttcatacgcttggacttcagatgtccatcgggaatgggttcgactaattgcaagccatctcgaccttattggttatacggttaaaatcgatgaatctgtaaagtatggttcaagcttatctggtttcatgcgagaggttatcgaaaccgatcatgtgctgttgattgtcgacgataactatgttgaacgagctaataacaaaccgaattcaggggttggtatcgaaaacaaatggataagcgaagcttttacgacaaagcactcgacttggttgtcggttatctttgttcgaaatcctgagcgaaaactacctaactggcttgaggggcataatcctaagggcttcgactttaattctaatcctgatagaaatgaatttcctggttctatacagatcgatgctatttggcgttggcttgtaggactgccagcagataaaaagcatgcgactccattatcggtttatcgtcaacgtattgcacggcttgaacatattgatattcttcgcgccccttcgcattatgcgaatccagcactcaaaggacgcgagatttttcgcttcaaagactatgctcactatacggttggtaacagtgagtatcagtttaaaatagtatttagtgcatgctcagacaatagtgtttacctctatatagatggtggactcaaagccgtcgggctgattacagctgcagattttgatccactgactgtcaattctttcttaactccaggccgttatgttactccggctgtagggcaaaaggctgtcctactaaacaccaatggggttctctgcgttgtaacaattgataatgtgcaacgtgagattaattcagcagagtatgttcatccacatgtggagttctcatatgaaatacttgaaaagcactag

SEQ ID NO: 194668 - DNA, 960 bp, Klebsiella oxytoca
atgtcagaaaataaaaaatggaaggaaaaattaatatcttcaagcttccctcttgaataccttgtatcaaggaagttggccgccttagatattgctgtgcaaaatgaatttacttactcacgtgacgacgctgggattttaaaagatttttcaattgatctgcagggcaattattggaatgaagaatgcacatttaatttaatattccttatagaatgcaagcaaaggcatgataagaataaatggttgtttatgagagatccaaatatttcagacttcagttctcataccttaggctataccatacgaactgtcgataacttcactcgtatgatagtgccgacagagtcgacgtatgctctagatgaaaaaattgattttgttgttaaaggtctggaaattgatactagcaacggcaatgtatatgacaacgaattaaaacatgggctttcccagctagcatatgccttgccggatgtcatgataaaaaatatttcacactgcattcactcgcataaggaagataatattccatttttcttcgtacccatactgctaacaacttcagaattatttgtcactcatgacgacttttctttagagaaaatcagaggagcgcaagagttagaggatatatctgagaaagttgcttatgtaataatggaaaatcaacacactccaggtttcggttctcacagagcaaaaagattttctgcctatgattattttttagattctccacaactcggtttcataaactctctcagagaaaagcatggagaatatactcacactctcccaatggagagaatcatggacttagctaataacccccatcagcctttccctgaatatttctcacaaatacttgtatgctcattatcaagtcttgactcattaattatggaaattattgagatcgtcgaaaatgcaatgaaagatgctaagaagctagcttaa

SEQ ID NO: 194669 - DNA, 231 bp, Klebsiella oxytoca
atgtctttgcttaaagaactggatttacgcattagcgcaaacggcggtcttattgtttcctgccagccggtacccggtagcccattggataagccggagatcgtggctgcgatggcgctggcagcggagcaggccggcgcagtcgcgttgcgcattgaaggtgtagagaacctacgcgcgacccggtcgcgggtgaggggcctgttatcggcattattaaacgtgatttag

SEQ ID NO: 194670 - DNA, 591 bp, Klebsiella oxytoca
atgagcagaccgagcattatcccgggtgactgtctgacggagctgacgcatgcggaaattgcccgctacagccgccacctgctgctgccggaagtcgggcttgaggggcaaaagcggctgaaggccgcccgcgtattgcttatcggcaccggcgggttgggggcgccggtggcgctttatctggctgcggcgggggtcggtaagctggggattgtcgattttgattttgtcgacgtctccaacctgcaaaggcagatcattcacaacaccaaagatatcaaccgacccaaagtggcttcggcgaaagacaagattaaagccatcaaccccgagatacaggtggtgacctataacaccaccctgagcagcaaaaacgcgctcgaaattattggggaatatgacctcgtcgtcgacggtacggataattatcccacccgttatctgatcaacgacgcctgcgttttgctgggtaaaccgctggtctatggctccattttccagttcgaagggcaggccagcgtcttttatgccggggaaggcccgtgtatgaccggatacataggtgacagatcagaccgggaacataggtaa

SEQ ID NO: 194671 - DNA, 747 bp, Klebsiella oxytoca
atgaaaaaaaatcttaatttttcagagtggctaggtttagtaacatccgtgtcggcgctatattcttatatatattactataagtattggaggtttttcgggattaatgcttatgattacttcagctatattgatgctttacaacattcgataccatcaatcattatggtattaaccctttctcaggcgttaattttgagttttacgtaccatattttttttgataggaaggcaattgtttcgttttatagatattcatatttcctggcaaaaacaaaccattataaaaatgtgcttaaacaatctattgtcttatttgttctgattattttatttgattattttttacgttggtttttaaattctggaatgttatcatcaactgcagcctttattgtggtggttattctatctattgtgcttataaccgtcggggcattgtcattttcgtatttctttatgcttaatggtattcgtcgaggggctggaattaaaaacaacttgattgttttttatttttttcaaataccgttattgatgtttttttcttcgtttaatcttcctatggttagcgcattttattttaagacacatgaaaatgctcaagtggtcttcaaagaagatggagtaataaaaacaaaaaggttattaggtataactaaggattattttattatgatggatgatgggagaggcattgttaggaaaacagatgcattacaatatgtcatttataatgagaattaa

SEQ ID NO: 194672 - DNA, 1017 bp, Klebsiella oxytoca
atgaacgccgtgattaattttgaatatttggtatcgcctgcattaagtgatgatttttatttcgataaggttgttgataatctaaggatattgtctgagttgttatcttccggtgtttattctatttatttagaaaaagatataatttcaaaaatgcgttgtcatgattatttcccaagcgaacgtatttttcagcgtaaaatatctcaattaagagaggggacggccttttgttcaagtgatattgttcgtattatccatacaattataaaacactcggaagagttagaggaacaacatattgttgaatggcataaagaaccagaagttgagagtgatattttttcgatttcgaaggagcgaatgaaagaactgcatgaaatatattgctcgatggctgtggatggtttttttaatcaatcacaattaattccaatgtattaccatcctctgaatccacaactatctcaaacgataagctttaagggtattattaaggatatcgagcctgcatgtatacatatgttgccactggacttttataactgcttaaacattatatctaatgttgatgatgtttttgcggaaatggatggctatgaactatataaaaatgctgatactgaacttgaatataagtttgcattctatgtcggtgttgttggtttaattaaaaaaaatgcattgaaagcgactattgattgggatgatttcaaaattggccgattttttgtaaaatctttaaaggaaaatcaatcctttcaggaacaacaatatagttctgtagtatatagttcaattgtaaatttattggcggatacaggtgcgaatgaaataaaacccttttatactacagcaaccagcagtgtgcagagaaaatcaggtgatttcttggcgtacagagttcatataaccaaggcaggaagagcactacgattgctattttggaaggatgattatgaaatggttatttccaatgttggaaataaaagtgaactattaatctatgaaccatag

SEQ ID NO: 194673 - DNA, 1947 bp, Klebsiella oxytoca
atgttaactgaactaaatataaaaaatttcaaatcaataaaaatgagccaaccaattgatttgaatagattttctatactttgtggttcgaatagtagcggtaaaagttctcttatacaggttattttgttgatttgtcagagcttttcaaacagatatcaaaatgattcaattattctcaatggtcatcttgtgcgccttggtgcattcttggatataaaaaatcatttttcagatgatgacgtaattaatatttcttttacgctccctattaaaaccactacttataaaggtcaggattctaagatctttaagtgtgatctttgcatagggctcgatagcgggaaaacaggagcggatgaatatcaccctttaatcttatcgaataaggtttcaattcatgtgtcagatggtgaaggggggtatattgaaacggataatattcaagttgagtataataataatgcttacgcaaaagattggccatactctgttatttcgtttaaatcatctgaaatgaatagaattgaggttgaatatccagattttgaagtgttaggaacatatcgcggagaacttctcccacattatattgcattaaaatttaattatgttaaaaaaattagttcgaatatactggattttgtaacaaatactttaagcagcaataatattaaaagttcgattacctatatagatgaagaatacctggttttgccaagggaatttttacttgagattttaagaattatcaaaaaagaacggcaggttatttatgattctatcactgtgccagataagtatctacagcgcggcatgatgcatgaaattagtttgaatctcgaagagaatgaatttatatctaaattaaaagaagatatagtgagagcaaactttaatctgagtgctgatgtatttcctgatgctttttttaatagagataagatttctatagttgactggcgtgaatttataagcgaacttgatgataaagcgagaaagtcattaattgatttaattactaggaatcgacttgtcttacaagatatttggtgtgatgcgatgcctaataaaactgacgttgctgtctataatgcaaaggaattcttagatgctgaatacagcttaaatatgtatttctctcgctcagttaaataccttggtccattacgaatggaacctcaagcattatatacttcatttgggcatttagatcctaatactgtaggacttaaaggagagtataccgctgcagttttacataaaaatcgcgataaacatatcgaatatttatcaccgagcatagttaatggtagtttggctttaaaacctaaaagtgaattatttaaatatgcgtgtttggaatggttgtcttatcttggtgtaattcaagattttaagacaagtgataagggtaaattaggttacgaattaaatgttaaaattaataaagatgaggagtggcaagatttaacacatgtcggtgttggagttagtcaagtgttgccaatagttattatgttcttgttatctgatgaagatgatatccttattttcgaacagcctgagcttcatttgcatccgcaggttcaatcgagattgtgtgatttatttattgctatagctagggcggaaagacaatgtataattgaaactcatagtgaataccttattaataggctaagattacggatagcacaggagatagatgaaacaattaaaaatgacgtgtcgatgttttttatcaataaagaacatggcgtttctgattttaaaatggttgaaattaataagtatggtagtgtcattgactggcctgttgatttctttgatcagacggacagagaaatagaacgtattctatttgaagctagcttgaaaagaaaaaaagagaaaaaacaaatcaaaagtttcagcttcgaggtcaaaaatgaacgccgtgattaa

SEQ ID NO: 194674 - DNA, 1497 bp, Klebsiella oxytoca
atggcgatgtatgaagtcggtaccgtcacgggtgccgcgtcgcaggcacgggtgacaggtgcgacaacaaaatggtcacaggaggcgctggggatactgcccgggtcgattctagtggtctaccgcagcggtagtgctgacctgtatgcgatcaaatccgtggacagcgacacgcaactgacgctgacccggaatatcaccaccgcattttccggtgccagttacggcattattaccgctgaaaccgccagcacctcgtcgtttgctaaccagctggccagcgcgtttgcattctggcgtagtgtagtggagggctggtcgatggccctgaccggcagcggcaatatcaccctgcctgacccgatcacaggaaagcaggtgaccgtgccggcgatagccgggatggcgaaggcctcggatcttaacgcgctggcaaaactcaccggaggaaacaaactcgacggctcgcaggttataaccagcgataatgccggttttatactcggtaagaactcagatctggctctgctcaaaaaacaggggcaaggcgggacaattgccgttggctcgggaacaccgtttagggttcagcgttcaagagcgaccactgtatcaccgtcagacacctatgatgacatcctcgttattggcaccaacaaccagacgacgttgcccggagatttggttgtcggtggtggtttcgataatacggcaaagggcaagctgtattcccaggcgttagagctgtcgatgggcactccgtacatcgactttcattttaactacagcaccgacgacttcaccgggcggattatggccactgccgccgatcaaattagtgtacaaggtagtcattggcgagttgacagggatcttcgtgttggtggtatggcagatattggagggtgggcgcaatgcggagtcgacctttcggccaacagaacagactttggttcccctgctgatggttcgttggtttcaggcggacgtattcgatccagaatgctgggacgcggcggtaacggtgacacctccggagcgtggggtggtttctaccttgaagaatacgttgggtacaaccaccgggtggtactgtatatggacggttttgacagaaaagatgcctggctcttttacaccggtgggacaatctccacccctaaaggcgatgttatgaccactggctcagacgtgcggctgaaaaaggattttacggaatcccaggaaggggcctccaggcgtattaacgcgctgggggtatgtgagttcaacatgaaaggcgaaacacgccgtaggcgtggatttattgctcaacaagctgaaaaagttgacccgatttacacctttcaaagcggcgatgtagaaattgatggcgagaagatcaatatccttaacgtagaccatacggccatcatcgcggatcttgttcttacggtgcaggagttaacaaaacaagttcgtgatttgaacaagcaggttcaaacaaaagagtactga

SEQ ID NO: 194675 - DNA, 633 bp, Klebsiella oxytoca
atgactgagcgcggaatgatttttaacggggagatggtacgggcgctgctcgacggccggaagacgcagacccggcggcctatcaaatggaaacagactcggttcactgaaattggtgagcgcgaagacggtagcaaatggccgtggagcgaagatgcagagcatgcttgcgacttctggcacccatgcccgttcggcgccgtcggcgaccgcatctgggtgcgtgaaacttgggcagaggctggagccagcgcaccggacctcaaactttatcgtgcgaattaccctgagcatgttccgtcgatttatgaaaacgtgccgccggctgaagaaattcgctggacgccatccatccacatgccgcgctgggccagccgcattctgttggaaatcaccgacgtgcgcgttgagcgtcttaactcaatacacgatgtcgatgctatgcgagaaggaatacagaatctgacgacatgttcacacgctgatttcggcattcctggcgtcgtaaatgcgcagcatcctgtacgagcgtttcaactgctatgggaatcaatctacggcgctgacagctggcgcgctaacccatgggtctgggtgatcgagttcaagcgcgttgaaggcggtgcagcatga

SEQ ID NO: 194676 - DNA, 222 bp, Klebsiella oxytoca
atgacgccagaagaacaggaaaacatcctccgcgcccaggctcgtcgctgcgcagaagagataaccaaagcgatgagcgtaaagcctaaaccgaagtggaactctgtatgcccccccatccttcgcaagcactacgagaaggtccggccgatgggtgtcagcctggtgaaatttgtcagtgttattgggcggctcagcggccgctatggagtggaatcatga

SEQ ID NO: 194677 - DNA, 624 bp, Klebsiella oxytoca
atgatggaacaacgcaccccagaatggtttgccgctcgctgcggaaaagtcacagccagccgccttgctgacgtcatggccagaaccaagtctggctatgcagcaagccgacagaactacatggccgagctgatttgccagcgcctcaccgggaagcttgaagaaggtttctccaacgccgcaatgatacgcggaacagaactcgagccggtagcacgcgagatgtatgcgctgaatgagttcgatgccgaaatcactgaagtggggcttatcgatcacccaactataccaggattcgcagcaagtcctgatgggcttgttaatggtgatgggcttatcgaaattaagtgccccaacacctggactcatcttgagaccttaaaaactggcgagccaaaacgccagtacctgttgcagatgcacgctcagatgatgtgcacagggcgcaaatggtgtgatttcgttagtttcgacgatcgtctaccgccagacctcgcctatttcaaaaagcgcattcacttcgacgaagcactggcaaatgagattcagtccgaagtgaaaaagttcttggaagagctggagaaagagatttccagcataaaaaaccacgaccatgccgcatga

SEQ ID NO: 194678 - DNA, 747 bp, Klebsiella oxytoca
atgagcacagcactttctacaatggccgggaagcttgcctcccgcctcggcatggatgccggaactgacctgatgaacacgctgaaaaatacagcatttaagggtgggaatgtcactgatgagcagttcactgcgctgcttatcgtcgccaatcagtacggactgaatccgtggacaaaagagatttatgcattcccggataaaggcggaattgttcctgtagtcggcgttgacggctgggctcgaatcatcaacgaacatcctcagtttgatggaatggagtttgcctacgacaaggaggaaggcgcttgtacctgcaagatataccggaaagaccgcacacatccgaccatcgttactgagtacatgggagagtgcaaacgcaacactcagccatggcagtcccaccctacccgcatgcttcgtcacaagacgctgatccagtgtgcgcgtctcgcatttgggtttgctggcatcttcgatcagggcgaagccgagcgtgtcattgaagggagtacggcagaggttcatgtagggcatgagtcggatggtcgtcgcccggaactgatcgcaaaaggcgagtctgccgcacgccttggaactgttaagtaccaggaattctgggttgcgttaagcgcagaagagaaacaggttatcggcgcggttgagaagcgtcgcatgtatgacatgagccttgcagtcgacaacgcagaacctgtcgatgccgcagcgccggaggataaatga

SEQ ID NO: 194679 - DNA, 456 bp, Klebsiella oxytoca
atgactatcacaccacaggcagtaaacgagctcatagcctccctggagagcgcaggcgagctgtcaatcaaagagacaaaggttatggcgctggcgaaagcgtaccagcagctggctgcggagaatgcgttcattctccagttgatgcatgagcaggccggttgtttcaatgccgccctgatcgaagggttccataatttggttatggaatcaggaagtgagggactgattgatgtttatcagcgtcgcttgcagcctgcaatccaatgcgtgccgccaacccccgccaccgatcgcatcgtagccgggattaaggctgatggggcgaaattcattttccaaagcattcttgataatcctgccgtaaccgaccttggctctcttgtcgactggctggagcagcacgacaatgatagcgccgcagcagtgcgggctatgcgcgagggggccaaatga

SEQ ID NO: 194680 - DNA, 501 bp, Klebsiella oxytoca
atgaccaatatcaccgaactggcgcagaacctggaatcggcagcagagaagtggcaagaggcatgggataaatatgacgaagtcgaaatcactattgccgagtttatacgtgccgctgaacaatacgaaagcatagtgaaagaccctgccaacgccctcgcgctggtagatgcgctggagaaggggcagcagaagattgatgaactggagaacgatgaagttcgtcagcgctttgctaacgcagagcaccaactctacatggctgaactggctaaaaataatctgagagccagtcgtaaggcgcagttccgcaagcgcaaggcggctgagcaacgaatcgccgagctggagtcccgcaccgtgaagctgccgaagctcaaaatgctcgaagactatctcgcagaagtggctattgaagagagaaaaaagattttggtcggagtgaaactggagtttcatcgtgcgctgaccgacgctggcatcaaggtggaggctgagtga

SEQ ID NO: 194681 - DNA, 513 bp, Klebsiella oxytoca
atggcactgacacacgatgaactttgccagatagcctgccgctttctgcaaaacaacggtttcaaggtggcgttccacgaccgctttatcgcagccgttgccacaggtgagcagcctgacgcgatcggcttccgtaacctggcctcctgtttgattgaagttaagtgttcccgcgcagactttttggcggacaagaaaaagccattcagaagaatgccgaaccagggcatgggcgactggcgctttttcatggcagagccgggttttatcgaggtgtccgacttgccgcccggctggggcctcctgcacgtcaggaacgggcgcgtatacaaagtccacggctggccaggaaacgcgctgtggtgctctcgggagcataagccgtttcaggccaacaaacaggccgagtgcgattacatgtacagcgccctgcgcaggatggacctgcgcggccacctcaaagaagtttataacggcgtaatcgttaacaaatcagaaggaaacgcggcatga

SEQ ID NO: 194682 - DNA, 249 bp, Klebsiella oxytoca
atgtcaaagctaactgagcacgaagtgatgtcagcattggagaggcatggaaactgcatgacctatcagctagccaatatcatcacagcaaggcgtggttacaaagaccacgtcaaaacaccacaggcgctacgctttctgaaaaagatggagagcgctggaaaagtgaaaagagtgaagagcgtatacgcggctcaaatatgctgggcgctggccaacgttccgaaggaggaggctaataatgtctaa

SEQ ID NO: 194683 - DNA, 213 bp, Klebsiella oxytoca
atgtctaacctgaagcctggcaatgtttatatcgaaatatctcacaatcaggccggaggcctttccctctgcgtaagcaatgacgatggtgggtatcgcatctccggtgcgaaggtcggcggctgtgaaactctgaagtgctttgaggttaatgccgatgagctaatcgagcaaattcgcgagcatgcaaatacagaaggggccgacaaatga

SEQ ID NO: 194684 - DNA, 189 bp, Klebsiella oxytoca
atgtcgtacttcttcctgattttcgtcatcagcagccaatcatcgaatatgcaggtagtgccaatgcagagcatggagcagtgcaacgctgccattaaggcgatgaagattgctgaagacaaacgaacctggcacgacgtttcgcccgacattgatagcgtgcagtgcgtggaggtgactggtgactaa

SEQ ID NO: 194685 - DNA, 414 bp, Klebsiella oxytoca
atggaaaatccagccagcctgttgcgacgtctgaacccttactgtgcacgtgcgatggaagtggcagcttcgctctgccagacccgcgctcacgcggaaatcgtgcctgagcactggctgctgaagctgctggagctgggagagggggacctgacggtgctggcacggcgttacgaatgggatatggacgccatctggcaggatttgctggcatttctcgacacgctgccccgttcggtgcgcagccgtccgcagctctcagacagtattcagaccctgatgcaggacgcctggctgcatgcctcgctggcgggtgaagagcacatccgcagcattcacctgctgatggcgctggtcgataaacctaaactggcacactgcgatggactgtggccgctgctgaccctcgggtag

SEQ ID NO: 194686 - DNA, 1023 bp, Klebsiella oxytoca
atgaaaaaattactcctttttattagcttgctgtttatcaacctgccagtactggctgactgtaattacgatggagcggatattgctgtaaaagtaaggtttaattcatcaaaaattttatcggaccctagtgtacctgccggtagcgtgctggcagtgaggactgtgggtggcgtgtcaagcgcaaaaatgttttacaactgtaaagcaaatgatatttacgccatcatcgcctcaccttcagtaaatcaggtagctggggttaccggggttcttggtggaccagtttatgaaactggaataccaggtattggttttgaaatttctgaggcaatagttggagccaacggtcatcctgtaccggcaactttgggtacggtttcggcatatggacttaatgatgctggcgtccaacaaatgactgtttggttaattaaaaccaaagacaatgtcgataccagcgtgactagcgcaaaagaaatttctgtatcatatcgagcaggcagtgttaaccaggtaaacgccaactcaacggtagctcgtttagtgcgtgtggatattgtgcttggtccattcatattcagagaaacatcatgtaatgtgctcccaagaggggggagtacaataaacctatcaagtatagaggcatcacagcttaaaagtattacgcagggagcagctactggtaagcaaaaggaattcacgattgatatctcctgtcctgatacatctattggcactaaatatatttattggtttaaccctataaccgagagctcgacatcaaaagatggtgtattacttaactccatttctgataccgctggaggtgccaaagatgttggcttcatactcaagcaggggactaaccctatcaagttttttgattatacaagctacactattgcaagcataaaaaagagccaatcactaaactttactgcagattactacaaattctcaaacagtataatatcaggcaacgtacacgccatttttgagataattattcaggaagaataa

SEQ ID NO: 194687 - DNA, 258 bp, Klebsiella oxytoca
atgctttatagttatctctatagaaatctgttatttagagctgaaaccaccagcagtaccatcaataatgccattaatcatgtcggttacctgtccattgatataatcagcgccattataggcaccttgcattccaccccaaacagctccttggatagcaccccagatagaaccaacagcagttgtaattatacccaagccaataattccaccaccagaaccgttaccggtcactcccccttgcagtccaaatattga

SEQ ID NO: 194688 - DNA, 447 bp, Klebsiella oxytoca
atggcccagcttcagcatcaccgggtccgcatagtcagcagaaaaagcaacatctacagtcccgtcaaagttcttcgtggcgaggatttgagtgaagtcgctggaaacacgaaggcgagtctgcatttcaggtgcagtatttttcagggttgcgatactgtcgcgcagttctgcctgcccaacccctctgatagccggaacagaagccagttcgatggatttctgagacggcatctgccgtccagttgctacaagcgtcccggcggtgttaatgacctcgatagcgagcgcggaatcatcagggctgcggtaatacgtggtgctcccctcagggatattgacgatatcggcctgggccgcttcaagcgtctggtactgcttactcagcggaatgatgttttgccggacttcatcattcttcgccatcatctggcgccaggtatctag

SEQ ID NO: 194689 - DNA, 288 bp, Klebsiella oxytoca
atggttaaggtgttggtttatggtggtggacacaatggcactgttcgggaggccgatcccgtaaattcaactgtaagaattccccgaggggactggattcgtgaccgcaatgaataccaaacaggcggaacagttgagcctgtcaactacgatgaagagttttcaatacgtgagtttgaatatgctgaagggcgagtttatttaatcgccgagcatgaaataaccattccagatgttgagctcatgaagcgtatagacgtaatggtcagcttaaaatatctgccatga

SEQ ID NO: 194690 - DNA, 189 bp, Klebsiella oxytoca; identical to SEQ ID NO: 194684

SEQ ID NO: 194691 - DNA, 399 bp, Klebsiella oxytoca
atggacgccaaacctgtggcttggcagtggttttattacaaacagtggcatgtcacaaatgacgaggagcgtgcgcgagatgtagcctggatggggaatgtcaaggtacatccgctatacacgggcgccatgctgcagcatcaaccccaaaacgaaaaacaaaatattcctgaaattattccgggatggattcccgtaggtgctcggatgccggagcggggtgttgatgttttggcttgcaaagttagcccgattggcggttacgaggaaattgaaacagctcagtggcatggcggaatgaaaggtaatcagcctgtttttatcataggcgccgatactatcgagccagcattctggatgccgctgccagccgccccgcaggaggtgaaaggtgagtag

SEQ ID NO: 194692 - DNA, 678 bp, Klebsiella oxytoca
gtgactccgactcggattccgacagcgattcggactctgacagcgactccgactccgacagcgactctgactccgacagcgattcggattccgacagcgactcggattcagacagcgactcggactccgacagtgactcggattctgacagtgactcggattctgacagcgattcggactctgacagcgattcggattctgacagtgactccgattccgacagcgattctgattcggacagcgactcggattctgacagcgactcggattctgacagtgactccgactcggattccgacagcgattccgactccgatagtgactccgactccgactcggactctgacagcgactcggactccgacagcgactccgattctgacagcgactccgacagcgactccgattctgacagcgactccgacagcgactccgattctgacagcgactccgacagcgactccgattctgacagcgactccgacagcgactccgattctgacagcgactccgacagcgactccgattctgacagcgactccgacagcgactcggactctgactctgacagtgattcggactctgactctgacagtgattcggattcagacagcgatgccgactctgatagcgactcggatatcccgcaggccaatgcggataccaataccgcgctga

SEQ ID NO: 194693 - DNA, 900 bp, Klebsiella oxytoca
atgttgataccgaaattttttatgtggagtgaatgctcctttcaggagtatgagtccgcatgttatgcgtttggttataattgcgagtcatcccctgagtttatttctttcaaaatgcgaaacaatgccgcactgaaattttatgcttacaagaaaaaaggggaaatactgggtagcgtttgtattgaaaatggctgggtagcaaatgactacaaaaatcccaacagagaattacccggtctacttacccctaaatcatctatttttgtaccaatctgctcctcacttaagaaaaaggtcattcttccgttccggacaaaatgtcttcaccctctacaacaagatgtttttcttaatacctcatataatattttcaacaaacgtcacgccgctttttcgaaaaaccccacaattgatttttcgaaaaaaaccatatccacaagggagcgagaaatcagaaaattcctcgacagcggcggcttattcatggatattgatcagcttactggtgaacatatctttaaagtatatgaaaccttatatgaagcaaggcgcaataaaaaaatacgcatgccgggtgtcaatctaaaattttttcaggaatttgagaacagttttaaggggcatgtgatgttctggcatggcgagcccattgcgatacagttgttattatcagtctctggcaaagccggaatgtttgtggacttcatcaatatcggttatcgaaaagatatcaatgccggttccctggggactatgctcatgtggaaaaatctcaccgcactataccaagaagccgccgagaataatctgaatctgtactactcatatggcatgatgtcaggtgaatacaaaacccgatggtgtcacccggtttcattgggacgatcaatcatctga

SEQ ID NO: 194694 - DNA, 2127 bp, Klebsiella oxytoca
atgaataagattatttttgagggaatagccacccataatttaaaaaatttagatgttactataccatttaatacaataaccgctatttatggccgttcgggcgcaggaaaaagttctttagcattttcatcaatttatcaattatgcaaagatgagtttgatgctgtagaaaacggttatttgaatgaaagtgattataaagttgtaaatttcagtgggttaattcccgctgttgcaataccacaaagaaacacaaataacaaccctcgttcaactatatattcatatctgaatatagctcaagctttgtcatctttaaaaatcaaaagaaacgtagcagtacctaattttgataaattaaaaataaacaattataaaaatgaatgtcctcactgcttaggccttggcgagatagttagtgtggatgaatctgaattaattaatgaaaaatgtagactagatcaaaaaccatttttatgttggcggactggtgagttatctgattattatcaccaattacttatggtctattgtgataaaaataatataaaagtagatgatacttttgattcactatcacttgaaaagaaaaacctaatattatatggagaaagcgctgagaaattatcttttagatttaaacacaaaggaaaaacgaagcaaagaagagcgttttataaaggcgtaatgtcttttgctaattcgaatataggacggagccaaaacaattcaaagtataaaaaggaagtaaattgctcattttgtaatggaagcagaattaaccaagaaacagcccaacttgatgttttaggatttacatttgatgattttttactatctcctatatctgaattatgtaataccctgaaaaaaactttaggtgactcagtattaattagagtgttgtccgcaataaataatatgggattgggatatttaaatttgtctcgttcaattcccagtctttctgggggggaaatacaaaaacttattttcagcaggcttttaacatctaatacaacaggtattctgattgttatcgatgaaatatcatcccaaattaaccctgtcgattttgaagatatctttcaaaagttaaaaaaattatcagaaaaaaacacagttattttagtagagcactcgcagtatttcatagatcttgctgatcagcaaatccatgttggtaaatacgctggttcttctggtggggaaatttgtgaaaaagaaaaaattcagccactaaggaacctcaatcccaaaaataatatatctgattactattattttgaagggcttaataaaaataacgtcattaatcaaaatatacgtatccctaaagagtgtgttactgttttttctggaatctccggatcggggaaatcatctttagctaaagctatttgtagccttaccgattcgatttatataagccaaaaattatcatcatatacaggacgttctactgtcgcaactatcacggatttgaataaattaattgcagaatttttctccgatacaacaaaattagatatagagtattttcttccaaacaaacttggtggatgtaaagtttgtgaaggtaagggcgtgataaaatatgaaaggggttttgaaaaggatatctacatatcatgtcataaatgtgagggtaagctgtttgaccacaatatagatgaagtaaagtctcagattaatggtatgaatataatagatgtatatgatactgagttgaaagagttaagctctttttttaataacactaagattaatactattcttgaaactatccattatcttggaatatcacatttgaaacttaatagaaaaacgcagtccctgtcaggtggtgaaatgcgtagaataaaattatgtgaaatactatctaagtccagaaaaacaaacaaaatattgtttattgatgaacctgtcgctggacttgattctgagacggcttcgaaggtgctgaattttatatatcaaaaatctaaattattcaatgcaattgtcattatagagcataggcctgaggcagatgactatgccgactttaaagtactaattggtcctttgtcaggaaaggaaggtgggagagttatagaacaaaatatcattgaatcagttagatga

SEQ ID NO: 194695 - DNA, 792 bp, Klebsiella oxytoca
atgatcaatacatttgaagactactgtcataccaccagtgaggttttagaatgtataattaatcttaaaaaatcaaaagtaatgattgtaggtattggagcagtcggtagtaatgtggcaacgtatcttgctcattgcaatgttggttcgataatttttgtggatcacgataatgtagatataagtaatttacatcgtcagttttattttgaagatgcaattaactctgataaaaatatggcgttactcaactctttgaaaaagatatctccagatattaatattgacattatcaatgacattatcgatgatgatttttttaaaagaaatattctaccctctgatatagatttgataataaactgcgctgatgaacctaatgtggattacaccagtaaaataatcgccctctttagtatgactcataatatcccacatatagttggcgggggatataatcttcatcaaacccttatcggtcagacaattattccatttaagtcagcatgttttaattgttttaacctatttttgggaaaaataaatagcaaagaccttgtcaatgtgaagaaattgcaccgggtaaaacgaaaattaggttcattttcaccactatcaggtctggctgcaagccttgcaagcttggacgctataaaattacttgccgggaaagtagagcacttgcaacaagaaaataaaagggtcgaatttagtcttagaagtttatcttttaacgtccaagatgttccacgtgatcctgaatgtgattggtgtagaggaaagtatgaataa

SEQ ID NO: 194696 - DNA, 1125 bp, Klebsiella oxytoca
atggactccaaaaaatacaaaataaaagaaactgtagatatttttatatcgagtgaagataatactgataatgttaaactcacattccatgtgatgacaacgcgtgatagattagaaataaaaaccaataaaaatgtcgctcgatttattgccagccttgatggtataaaaactataaatgatatagttactgagatggggtccctacgctcaaaagatgtcgataaattaattgcttttttactaaatcatcattttatttatgatgtaaataacatttgcgatattgaacctcgtttttcacgacaaattacattttgggacgattttgtccttgaacgacctggtgtagacactcagcatattttggagagcaaaaaggttgttttatttgggtgtggagctgttggagcaaaaattatagaaatacttgtccgcgctggtgttaaaaatatagttttggttgattataagtcccttacaaagtcaaatgcagcaaggcattgttattataactataagaaaatcggaaaaccaaaggttgatgtcctgtcagaatttttgagttggatcgatagtagagtaattataacaaaacattttgaaaaacttatacctactactaatctatcctctatcattcctgatgatacagatctgattattaatacttgtgatgagccttatataggtcatacttctttaaaacttggtcgatatgcacaagcaagagctattccgctgtatgtatcaggtggatttgacgcccacttaatgagttcaggagaattaatattccctccacatacaccctgtatagattgtgcccaaaatacattttcaaaggcattaaaaggatggaagcctgtatatagcatagtcaataatcctcaactggatctttcaaaatctgtctatgataattatattcccggagggcctggtggattagcaatgatgaatggtttttcagctaacctaagttgcatgaaattaattcacttcctgttggatgattcagcgttttcatatgtaaatagtcggtatgaataccttccaaacgaaggcaaaatgactaattttgaattggtaaaacaaagtggatgcaaaatttgtaatgaataa

SEQ ID NO: 194697 - DNA, 201 bp, Klebsiella oxytoca
atgcagtgtttagatttaacatttgaagtcatcagcaataccaatgctaccgccaactatacggggggttgctctggagagcgtagcgactgttgtactcgtgtatgcacacgagctggtaacgacgagcaaaactcagcgtcgaatttagatgcttgggaaaaatacttggaggttaacgccggcgttctccaatattaa

SEQ ID NO: 194698 - DNA, 1140 bp, Klebsiella oxytoca
gtgaatattataccgattcggggcgatgccgaatggaccgctttggaattctttgctggtatcggcctggcgagagctgggatggagcaggcgggaatcaagactgtttggtctaatgactatgacctgaacaaaaaatcgatgtatgaaggccattggaaaactcacaagctttttctggcagacattcataccctgaatagcgaagaccttccaactgcagatgttgcctgggcctcttctccctgcactgatcttagtctggcgggtaagcgtgtcggcctgcggggaggccgggaatcgtccgccttcttcggttttactgatttgcttgcagggatgaatgaacgcaagcctgaagtgatcgtcctcgaaaatgtcacaggccttgcctcctcccataacagagaagatttgagagctgcggttaaagaatttaatgagttaggttatgcagttgacgcaatcactctggacgcccgacgttttgtgccacagtcccgaccaaggttattcctgataggagcaaaaaatcctattgatggaggcgaacaggattcgtgcctgaggccagactggctttcctggctgcataaagacgctgaagtacgcaccttcatgatgcctttacctaaagcacctgagctactaagccaagggttcactcttgagattgaggctatcccagacagcgaccctcggtggtggaatgctgataaagtttctctttttaaagagtccatggcatcggtacagcgtgaaaggttagaacattttgtcaatctagactgtacaactgcccgcacagcctatcgtagaactcgtaatggcattcccgtatgggaaatgagagcagaagacatttcaggatgtttacgcacagcacgtggcggttcctccaaacaggcggtggtgatcatgggtaggggcgcactcaaaatcaggtggatgaccggacttgagtatgcacgtctgatgggggctggctggtacacgctggaaaatttgcgcgactcacaaattcaatatggttttggggatgccgtcgctgttcctgttgttggctgggtcgcccggcacatgatcctccctcaccttgaggccgcaaaaaaagcgcagggaataaaagtgaatgaataa

SEQ ID NO: 194699 - DNA, 993 bp, Klebsiella oxytoca
atgaataagttgaattactccgaagcgtaccttgcagcggcgaaagcctggtacgaaggtgaacgagccaagagtggcgcgataaataccaatgtaatgaatgcaggactgatcgtctcacgtatgatggctgatggtatgcctatcactgacgaacgtctgtacagcgaaggaaaaagccaagtacgagggctcagtggtgccaccatatcaaagattctggaacaacatggcgaaacccgcgtttttacccgtgaaggtgggcgtacgtccagagggactattttccttgctgctgcatttcgggatgtactcaacaatactcaagtaaatggaaatgagcctgtcgacacaaaactagtttccaaccagctcgaagctttcttcactcaatgcgtgcgtctggactattttgacaaacagagaataacagttgacctagattacaacaagccagttgcatctgtggtaagcgatattcttaaagcgtcggcggaacgttcagacaaacccacaggggttgtgctacagcatcttattggagccaaactccaattgcgctttcccaatgttaaaatcggcagtgacagagccaattcagctgacttacacactgaccgtgagggtgattttcaggtgggtactactgcattccacgtgaccaccgcacctatggagaaattgatttcgcgctgtgtcgaaaacaaacgcgcaggctacaggccggtcatcctaactcttgaaagcaaagtcattgcagcacgccagatggctgataacgttggtatgtctgaacagatagccgtccaggcagccgaaactttcatcggtaacaatattgaagagattgctatctatgacggcgataaaatccgtgagggtctcgcaagactgatacgtacgtacaacgtccgtatcaatactatcgagatagataaatcccttatgattgatgagcctcgttggattgttaacttactgaccgactcctga

SEQ ID NO: 194700 - DNA, 441 bp, Klebsiella oxytoca
atgaaaaaacaaaatcactcaaccatgacaagttacctctctaaaacaaaaaagaatacagatctctaccgtttgtataatccacacttctcagtaatctgtaaaaatagtactgaagatcatgatttttatcttaattatttttccagacatatggtgacggaaagaaacattctgaccatatttgctatccatacctttttctcttatggcatggacaaaaaagagaccataaaagcctttactcgtttccttaaagaggagaataacgacgttttttatcagtcattttcttttcgtggctgcaatatcatttacacaaacaaaaaaggagaagtgaaagagatctcatggttttccttttcacggatctatgacgagatcgttaagataaaagaatatgaatacaacaatgacacctggcacaaaatggccgcttaa

SEQ ID NO: 194701 - DNA, 954 bp, Klebsiella oxytoca
atgagtaactatacagaagataatttatttgacagtaaatctaaaaaagacgtccagaattgcattgctgcaggcattgacattaacacactaaatgaacacggtgaaaacgcacttttcggttgcgacagtatcggagctttaaaagccatgattgaagcaggcatagcgctgaaccatacagattgttatggtaataatgccctgtttagcagaaaaagcccacgggcactagggctgttgataaaatcaggtattaacgttcaccacaaaaataataaaggccagtcctgtcttcactggcagcactacgacatagattgtgcggaactcctcattaacgcgggcgttgatatccacagcacagataacgaaggacaaacgcttctttacaacctccacgatcatgacgtctttgattactgggtaaataaagggtgtgacataaaccacagagattataatggcaaagcggtgctggatcttccgactgacgacgagtggtggatatatgatttcagtattaatgccctcaaacgccatgttgatagaatagacagcacaccagttttatttaaacatatttcaactgaggcgttgcctctgattgctttgcttcatgaaaaagggcgtaatatccttatcgctgaacactgtaccttcgcattatatgtcaaaaacatgaagtccttctttacctcactgaaaaaatataccgatatcagtcatgttcagttttataattgttatcatgacggacatattggtgtctatactggtattgagacagtaaaatggtttattcgaaatggtatcagagtggacgacgatatactgagacagcgtgctgactctgataaaatttttgactatataaccggaagagagaaaaaagattttctcaaaatcatgaaaccagaaatcacccatgcgccgaagagaaaaagaatgtga

SEQ ID NO: 194702 - DNA, 408 bp, Klebsiella oxytoca; identical to SEQ ID NO: 121341

SEQ ID NO: 194703 - DNA, 273 bp, Klebsiella oxytoca
atggataataaaacgattagctgccccttctgctttacacaaagcccgcacggcgtgcggatttgcaaaggttgccatgcaaaagtggcctatggtgaaagtccgctcagtgtggcattcctgtttcaattcgtggcattcggtctcgcctggttagtattttcattgaccggcagcactcctgtctcagtcattacattttttgccagcgtcattattcttatctgcataattaaaaagaaatatgcagacagagttgtttttatacggtga

SEQ ID NO: 194704 - DNA, 387 bp, Klebsiella oxytoca
atgaacagattcatgattgctgtgttttttatttctgctttccttatttctggctgttcaacatcaggcaaccagcatctaaaaaaagaaacatcacaaagtctgcagtcgaaaatcatcaaaaataaaacaacgaaatcagaaatcattaccgcattaggtgagccggaaactaaaactacacttgatagtggcaatgaagaatggacttattccatggataacaatcaatttgatgccaccacatttattcccgtgattggactgctgacagggggttcacagacgcaggccaaaacgctggaaatcgaatttaaaggcgaaacggtcagcaagtggacgttctctgaaaataacagcagaatgaacacgggtcttattcagtaa

SEQ ID NO: 194705 - DNA, 321 bp, Klebsiella oxytoca
atgaaaacctctgccgttatcacactcgttaccgctgtctttttgctgagcggctgtaacagtgagccctctgaacaggatctttataatgccatgaataaggtcgtggagcagacgaatgccatcgttaaatccatagcaggtaaagatgtcccgaaagacgcactgcggaaattaaaatctgtcaaaaagcatgactgcgtagaagtatcggataaaagctataaatgtaatgtgacggttgttgttgataacgaaaagcgtagtgctgctgtaatccttgtcaaaatggatgatggctggcaggtcgttgataagtaa

SEQ ID NO: 194706 - DNA, 1311 bp, Klebsiella oxytoca
atgggaaacacaacaatacaaacgcagagttttcgtgcggtagagacagggcaaagcaagcgctacattattcccttcgccctgctgtgctcgctgttttttctttgggcggtcgcaaataatctcaacgatattttattaccacaatttcaacaagcctttaccttaaccaacttccaggctggactgattcaatccgccttttatttcggctatttcgtcattcccattccggccggaattttgatgaaaaagttaagttataaagccggcattattaccggactgttcttatatgcttttggcgccgcgctattctggcccgccgctgaagttatgaattacaccttattcctgattggcctgtttattattgctgcaggcttagggtgtttagaaaccgcggcaaacccgtttgttaccgtcttaggaccagaaagcggcggtcacttccggcttaatcttgcccaaacgtttaactcgtttggcgccattattgcggtggtttttgggcaaagtctcattttgtctaatgtgccgcatcaatcgcaggatgtgctcgataaaatggctccggagcagcttagcgcctataaacacagcctggtgctctcggtgcaaaccccgtatatgatcatcgtcgcggttgtcttactggtcgctctgttgattatgttgaccaaatttccggccctgcagagcgacgaccatagtgacgccaaccagagttccttctccgcttcccttgctcgcctggtccgcgttcgccactggcgctgggcggtgctggcgcagttctgctacgtcggcgcgcaaaccgcctgctggagctatctgattcgctacgctatcgaagagatccccggcatgacgcccggtttcgccgccaactatctgaccggcacgatggtgtgcttctttatcggccgcttctccggtacctggctcatcagccgcttcgcgccgcataaagtgctggcagcctatgccctgctctcgatgatcctgtgcctgatttccgctttcaccggcggccacgtgggtctgctggccctgacgctgtgcagcgcctttatgtcgattcagtatccgaccatcttctcgctgggcatcaaaaacctggggcaggacaccaaatatggatcctcttttatcgtcatgaccattattggcggcgggattgtcaccccggtgatgggctttgtcagcgacgccgccggcaacatccccaccgcggagctggtcccggcgctgtgctttgccgtcatcttcatctttgcccgtttccgttcgcaaacggcagctaactaa

SEQ ID NO: 194707 - DNA, 147 bp, Klebsiella oxytoca
atgcctaagagcaacagattttaccaggcacaaacacacaaaaatgttacccgcgatcgcttcattcgctcggttaacccggtggttggcatgaaaatgcgcgccatcctggaagagctgaaacggaaggaggaaggccgtggataa

SEQ ID NO: 194708 - DNA, 1086 bp, Klebsiella oxytoca
gtggataacctcgcaaaagtaatacctttaagaccgtctgtatcggtcgtggagcgtcaggtggcagatatcgatgatgggtatacccgcatcgctaacgagctgctggaagcggttatggctgctgatttaacggctcgccagctgaaggtcgttctggcggtgatccgcaaaacttacgggttcgggaaaaagtttgaccgcattaccaatacccagattgcagaaatgaccggcattcaccatacgcatgtctgcaaggccaagaacgagatgattgcaatgaacatcattgttaccaacggcctggcgatcggggtgaataaggtgatttctgactggaatttcagcattagccaaaatggcaaatcattagccgaaacagctaatgaaacattagccaagtcagctaatacccataagccaactcagctaaacacaaaagaaactattcaaaagaaagaaagaaaagatccccctaaatcccccaagggggaaaactcactcgctcaggaagtgatggattacttcaacgagctaacgggtagtcgttgtgcttcgctggtaccttttgagaaagctctctccacggtgaagagcaaagaccagtgctacaccgctgaagagctgaaactggttatccgctgggcccatgtgaactgggggcacagcttcaagccagagaacctgtgccgtatgacccgctttgatggatacctgtcagacgcgctgatatgggcagatggtcatggaagcaaccctaaagcctgcccgcacgaagagatcatcaagctctggaatgaaaaattcccttcaaaggccgtttcactgcatgagtggaaccgccgccgtccggcctatcgagacctggaagctgtgtggaacggcaaaaccacccagggcaactggcgagaactgaagcatatgggcatggccttcgagctgattagcaagtcttccctgttcgtcaccagaggagatcagccatggctgactctcgactggatactgaatccgaagaactggggatctgtctacgagcaggccatcaacgagcaccgtgagcgcaagggagtcaaagcatga

SEQ ID NO: 194709 - DNA, 1374 bp, Klebsiella oxytoca
atgagccgttttattgatttatacgttgagcaggccgtcattggaggaataatgcttgcagcaggtcgcgcagatggcgccgacatggctaccgatgcgattgaggggctgactgaagaccacttcacagcaacgccccataaagtggctctgcggtcatataagcgactcaacgaatccggttcgaagatagacctgcttacgctgaccagcgatcttgaacaactcggggttcttgagagtgcgggtgggttcgcttacctggctgaatgcagtaaaaacactccgtctttcgcaaaccttgcagcctactgcgaaaagcttcgtgaaatgtaccttggtcgccgtatgaccctggcgttacaggccgggatccagaagctgtccgaaccaactaccgagggtattgcagacatcatcggcaacattcaggccgacatctctggaattgagcacagcgctgactacggaactgaacacatcaccactggcatcgatatgtcgcttgaaaccatccaggcgatcatcaatggcgacatctggaaatacaaaacagagctcggcatgtcgaccatagatagcgctttcggaggattcaacaatacggattttatcgttgttggcggacgtcctggcatggggaaaaccatgtttagcaccaccgtgaccgagacagtcggcctgaaaaacaaaaagccggtgctgttcttcagtctcgagatgccagtggaacaaatctctgagcgagtcgctttccaccgggcgcgggtaagcaaagaagatctgctgagcaaggttagcgggaaaatggacgaggcatgggggaaggttagtcactgcatgaaggagttcatcgactctccgatctacatcaacgataagccgtccctaagtgttcaccaggtgcgtgcggaagcgcggcgtatgagtaagaagttgggcggactgggcgtggtaatcgtcgattatctccagaagatgcgcatgtctgacccggagaacatgaaccgcagtgtaggggagatcgccactggtctgaagaacctggcgaaagaattgcgttgcccggtcatcgctctggcccagttgaaccgaaacctggagcagcgcgctaataagcgtcccgttgcggcagacctgcgagagtctggcgttattgagcaggaggcagatgtgatcttcatggtgtatcgggatgagaagtacaacgaaaaaaccgaactgaaaggcatcaccgaaatcatctgtgtgaagtcccgccatgcgccgggggcagaaaagacctaccacttcagcagccgctactcaggcctggacccggtagatttcacctacagcggccagatgcaacaggaggctgactatgagtgctaa

SEQ ID NO: 194710 - DNA, 315 bp, Klebsiella oxytoca
atgagtgctaagacgatgaaaggcaaacaggcaattctgcgttatctcgaaacgcaccggaccttcactgcgaaggatgtgtccgcagagtgtggtatgaccatcaactgcatcacgaagaacgctatcgacctggagcgggccaggaagattgtgcgcgtgagtaaggtctggagaacggtgacttatcgcctggcgacaccggaagagcagtccggaaccgcgcgcaactgcaccaacggaatatttcaggagtgccgcaacagtccggcgatgagaagggtactggctgtttacgggagggcgcaggcatga

SEQ ID NO: 194711 - DNA, 225 bp, Klebsiella oxytoca
atgaaatttatcaaattaagccaaaggggaacggtagagcgccagggcaaatatggctgggagcctgaaacagtctatgagcctgtatttgttgccgcagagcatatcgtcagcatgtatttcgctggtctgacgattctgaaaatgacctccggagaatgcattgacgtgaaagagaccccggaagaaatcatcgccatgcttaccgatggagccgccaaatga

SEQ ID NO: 194712 - DNA, 495 bp, Klebsiella oxytoca
atgactatcacactacaggcagtaaacgagctcatcgcctccctggagagcgcaggcgagctgtcgatcagagagcagaagttcctgaagctggctaaagagtttcgcatttgcagcgcttcactggataccgccataaaaaccgggaatgtgctggcagaccaaaatgctcaacttgctgcggagaatgtggcgctgaagtcaaaaggcaaggaattgctcggcgaagcatgcgccgtgtactcgaagctcaataaactgatcgacccatcaatcggtgattttgttgacggtcagacgctccatgaattccagtttgttctcaatgcggaaacccccgccaccgatcgcatcgtagccgggattaaggctgatggggtggaagagtttgcagcgcatcttcgcgctaatgataacggggcatcagtttgcaaaatgattgcgctcggagccgatgatttcgccaagcagctgcgcgagggggccgacaaatga

SEQ ID NO: 194713 - DNA, 405 bp, Klebsiella oxytoca
atgagcgacttcgatacttcatcaaaagttaaggctcgcaagttacatcgttgctgtgaatgttacggcgctatcaatccaggcgatacctacgagaaagtttttgtcgtccaggatggcgatgccagcaacttcaagacgtgccagaaatgcgcagaagcgcgtgactggctgcttaacgaaactgattggcctgacgatatcgacggcgaagggcattcgtatttcttcacgatgctgcgtgaccacctccgtgagcaaggccgtgaaggcgaccgcaaatatgcatttcgagcgtatcggcttgtcgtcctgatggataagcgccgtatggcttatgccaacgcatacaacgcggagaccgtaaaaatccgcgattctcttgctcaaggagtctcagcatga

SEQ ID NO: 194714 - DNA, 495 bp, Klebsiella oxytoca
atgacaactgatatcaccgaactggcgcagagagagaaattcgaggcttggtttaagtcgtcatttcatcccgacaaaaccgggccatacatcaaagaccaactgtatttcgcctggaaagcggctagtgctgagctggtagaggcactggaatcagagaaaaggatttgcgcaacgtggagaaaaacagctgaggctaacagcgaaaagctggagaaggcgcagcagcgcatcgtcgaactggatagaaaaaactgcgagcttgattcgcttactcagcgatgggctgttgagcgcgctgaaaatgcagaccatatcgccgagctggagtcccgcaccgtcacctttaagttgccatttacaccagagccaagcgcgcattctccgtgggtggccaaagcgttttaccaattccacagggatacagttaagtcatgttttgcggtgttttcagatgcgtgcgccgccgctggcatcaaggtggaggctgagtga

SEQ ID NO: 194715 - DNA, 531 bp, Klebsiella oxytoca
atgagtaaatcagaaaaatcaataacccaagagctgttaaggacactccttgaatacgacccgcagaccggcgtttttagatggaaaataaaggcctcatctagtgcgcaccctggcgatattgcaggatgcattgatggtcagggatacagagttattcgtatctatggaaagaacagaaaggcccacaggcttgcctggctatatgtgtacggggatgggcctgaggttatagatcacattgacaggaatcgttcgaataatgccattgaaaatttaagggccgttacattttctcaaaactcggcaaatagagcagctaaaagcaaaaataagtctggatttaccggggtgtactggaatgagctagggaagaaatggcaggcaagcatagtggccaaggggagaacacattacgttggtctttttgctactgcacaagaagcggcgaaagcccggactgagtatgccaaacagctatatgcaaatttctatattccttcatttcacgaccaagaggctgccaaatga

SEQ ID NO: 194716 - DNA, 600 bp, Klebsiella oxytoca
atgtattatccccggtcgcgctcacgcttaccggggctacggttctgcgcggtctggtcgcccggacaggcgcggcaagcgccgcctccggggaaatccccggtcgcgctcacgcttaccggggctacagctctgcgcggtatggtagcccggacgggcgcggcaagcgccgcctccggggaaatccccggtcgcgctcacgcttaccggagctacggctctgcgcggtctggtcgcccggacaagacgcgccaagcgccgcctccggggaaatccccggttgcgctcacgcttaccggggctacagctctgcgcggtatggtagcccggacgggcgcggcaagcgccgcctccggggaaatccccggtcgcgctcacgcttaccggagctacggctctgcgcggtctggtcgcccggacaagacgcgccaagcgccgcctccggggaaatccccggttgcgctcacgcttaccggggctacagttctgcgcggtctggtagcccggacaggcgcgtcaagcgccgcctccgggaaaatgccgggtaaaaaatcgcactttttaattgatctgatcccgacgcagcccgacatcttttag

SEQ ID NO: 194717 - DNA, 1413 bp, Klebsiella oxytoca
atggggagtaagtgggaaagagtcaaaattgagcagctacaagacaaccaaaaaggtgcaattgctattggcccttttggttcacgtatgaaaagcgattgttatgtgccatatggcatacctgtagtccgtggtacaaatatttcaagcggccccaactttaaaggtgattttgtttatatatctcccgaattggcagatacactaggctcatgtaacgtatacaaaaacgatcttatattcccacaccgcggatcaattggcgaagtaggaatcataaatgataataatcgttatgtcctctcatcaagtatgatgaagcttacttgtgattgtaaaaaagttaagccaatgtttctttactatttttttaaatcacaaaaaggaaaaaatgagctcctgaaaaatgcatcacaggttggtacgccaggcatcgcacagcctttatcgtctttaaaacaaattgaaatagagttaccaccgttatctattcaaaataaaattattgagattattgaaagtttagataaaaaaatatcgttaaataataatttaaaccagattttggaaagaatgtcccataccctgttcaaatcctggtttgtggatttcgacccggtgattgataacgcgctggatgcgggaaacccaatcccggaagcgctgcaatctcgcgccgaactgcgtcaaaaagtacgcaatagtgcagatttcaaaccacttccggcggatattcgtgcactgttcccggctgagtttgtagaaacagagctgggctgggtaccgaaaggctggcaaactaagtcaatgcatgatctcgtcgaaagtgtctcaattacattcccattgagcaaaacagataaggtcatattccttaatactggtgatattgaaaaaggatctttcctacaccaaaactactccaagacagaaggattaccaggtcaagctaaaaaatctataaaaaaaggcgatatactctttagtgaaattagaccagaaaataaaagatatgcctttgttcattttgaatcagataattatgtcgtatcaacaaagttaatggtattacgtgcaaaaaatgaaataaatcctttgcttccatattttattataacacttgaagataatactaaaaaattacaacgaattgctgagttaagatctggtactttcccacaaataacttttaaagaactagaatttattagtttcataatgccaaataacgataagatcatggatttatttattaatagttatctagcgccagcttataataaaataattgaaacgaaaaaagcgaatataaacttaattaacctccgcgacaccctgctccccaaacttatctccggcgagctctccctggaggatctaccaaacttaaccaaccaaaccgaacccgcataa

SEQ ID NO: 194718 - DNA, 201 bp, Klebsiella oxytoca
atgaaccaacccccccaatctgctgaccgagtgatccgcgaggctgagtgccgccagttaaccggcatttgtcgtactacccgctacatgatggaaaaggaaggtaagtttccggcccgccgtaggcttggtggtcgtgccgtaggctggcttttgtccgaagtatccgcctggcaacaaagccgcagtaaagcggaataa

SEQ ID NO: 194719 - DNA, 225 bp, Klebsiella oxytoca
atgatgaatacccagaagcttctggatacatacatgttagttggtgccggtctttctcgcgtcaaatatgagattttcacgggagatgaagggtcatatgcatttattacgatttatgcatatgagcctcatttccatattaagggctatgattccttaaagttagacgaaactgttgatgtcagatctcagatcgaagggcatttcgcatatacctaccagtag

SEQ ID NO: 194720 - DNA, 351 bp, Klebsiella oxytoca
atgagtcgcttaaccgccgttatcatcgctataacaatcctgctggcctctaacgtgatttcgtggcgctcaggctggagttctcacgctgatcacatcaatgctcaagcttcaaagaagagagagaaggccgagagtaccattaagcctgtagaggaaaaggccgctactgctaacgaagcgggtaaggtcatctacaaaacaataacccgtgacgtggtgaaatatgttcagtctccgaatcgtattgtatgcaggtttgatgatgatgctgtgcagctgcgtcagcgcgccatcgatgctgccaactccatccccggatttgatgagcccgccgtgcaaagcaagtga

SEQ ID NO: 194721 - DNA, 1047 bp, Klebsiella oxytoca
atgactaatgaatctaatgttaatgctttgatagaacgtcaatttgaagttgctgatggcaacgtgagtagtcttagtttgccaaaatttgacaaatatactgtgtgcaacctccgaggaggtattggcaagacgtctctggcttttaacctttcttatcttgcagatgatgctctaattgttgatacttgtcctcaaggaaatctgtcttatttttttgataataattatgcttcttcaaccagtacaaccgcaaatgatctgttgatgccctattttgttccggggcttggttttgccactcgtgcggcaaaattaatatcatcaactaatccttggttcgctggtaaacagaattacttcattcaatctgatagtcagctttaccttttacctacccaaatggcaaatgctttagctcaagcgcgaactattactggggcaactcagcaggttgttattgataatattcttttttcattgaaaaaagaaattgagagagagatgactgagacagagacaaaaaaagttctcattgatacctcacctttcttctccggagcgacgcatttatcttggcatgctacagatgcattgattgttcctgtgcgtacggatcagcaatcaattaactcactgagattactcattgatacattgactaaaccaacatctgagttcagaaaaacaatgccatctgatggtcatacaccaaaaattcaaatggttgtcatcactcattgcggatggtctacagtagcaggtgccagaaacaaaccaaatcaacagacaaaaatgtatatcgaagctgtaagggaagtcattcgtcagaatatcagtaatttcacaaccaatgatcctaataatcatattgtgattcttgatgatttccttggcagtggcagaatgtcgagtgcaaagtctaagcctctagagcttttgaaccctggcgatgcaatgactgttaatagagtcagaacctctgtgaatttatcagtaaacaagataaaaaatgaattaaaattcatccataattcaatatggtaa

SEQ ID NO: 194722 - DNA, 1491 bp, Klebsiella oxytoca
atgaaaaaaccagatactcaggtatcggccttgctggtgcagaagcaccagcttgaacaaagcgagcatcaattgggtgaccttgatgctgctctagaagcgcttaacgctttgcaaactgataccgaagcttctttagatgaaatgattttggctatggatggtgttctggaacactcaggtatcacgtttgatgaggatatccacacaacggtttctagtgaattcagcgattaccttgaatcctgtttgaccacgtcatcgtccagtatcagtaaactgtcgatgatagaaacaatagcgttcaccagcgatatggactgggaaacctattcccagtccatatcgcagtatgcccataaacacaatatcgatttaatagtcgatccgtttagcgccctgatgtctccaatccaaagaattgctctggaaaaacgtattcaggaagacttgaccttaaagactgcccgctgcgacaaatatgattacatgatcgctggcacctgtggcgttattggcggacttatcgatatttttctggtaggcgtacctggagcaggaaaactgacccagcttgcagataatgcagtggacggtgccgttgagaaattcgcttcagcctttggatggaagggcagttcagaagcaagcgattcgacaaaaagcgctatcggttttctggagagaaaattcaaaatcaattatgaccatcggcatggcggagatgttgacggtttgttcaggatgaacacgaagaatcaccatattaaaagtctcgcccactccccggacttagtcggtttatttttctcgatcctggatcaatttaccagtacggcacattttgtggcagacggaaaattggtttccgtagataccgagacttttgagcttaaagggaataacgttgtctctaaggtatttagtggtttcgtaaactggctgggccaccttttctctgatatggcaggttcttccggtgcagcagggagaggctccggtatccccattcctttcttttcattacttcagtttattaatgtgggtgaatttggccagcatcgccagtctttcgcaaccgtcgccgtccaggtttttgagaaagggtatgacttacggcatggattagcgatggcgatccccgtcatgattactgagttgcttgtgcgaatcacctggacggttaaacaacgttgctatcataagaaggactggggtgaatgtattccttcagcaaataaccctgaactcaggcgaatgttgcttgtggcgcatggaaccttgtgtctgatggatgtaggagatgcggcacttcgttcaggaggcgaaatgattcagttcctcctgagaacgaacctcatcggctggacgaggtttggaattctagcgattaaagaactccatgtctggtataaagcaggcggaattgatgccaatgctgtagatgaatatatggatcatgaacttcggcgaatgctaaaagcggggtag

SEQ ID NO: 194723 - DNA, 1653 bp, Klebsiella oxytoca
gtgagtaacgtcaacactttccttaaggaaaatttatcttcagtaagtaagaatgtttttgtggctcctggcatccctgaaaaaaaactgaataatgtcgctaaagcatttaatgttgtggataacttgaatactgtgctagccatttatgacaatacggtatttggtagcgcaaaagatggcatcgtttttaccggtgaaaaactggtcataaaagaagcttttgaaagtccttatgacttgttctacagcaatattgaagcagtagaatatatagaagatgtcacggtaaatgataaaggcaaggagaagcgaacagagtctgtttccctcaaactaaaaaatggcgaggtaaaacgaatcaaaggcttgatggagtgcaactataagaagttgagcgacattcttaagcataccatcagtgactttgatgagttcaaagaagaagatcagctcatcactcttgccgaaatgtcagaagctctcaaagtggcttatgtcaaaatcattgtgaacatggcgttctcagatgatggtcaggttgataaaaaagaatttgccgaaattctcttgttgatgacccgacttgagttaacgactgaatcccggtttacactgcgtagttatgtcggttcagaatccagtctgataccggttgaagaattaattgcgatcattgaccgggaatgtgtcccaagccataacaaatcaataaaagtctctcttgttaaagacctgattagcattttcatgagtgttaatgaaggtgaatataaaaaattcccgtttcttcagcaagtgcaacctttgctgggcgtaactgacgaagaaatagaactcgcagtaatggctattcagcaagattttaagatgttacgggaagatttttccgatgatgcgctgaaacgcagtatgaaagaacttacggcaaaagcaggtgcggtaggcgtgccactcgctgctgtctatctctctggctctgtcatcggtatgtccgcagcgggcatcacttctgggcttgcaacacttggacttggtggcgtgctgggtttttcaagtatggcaacaggtatcggtgttgcggtgttattaggtgtaggtgcctataaagggattcgtcatcttacgggtgccaatgaactggataaaaccaagcgccgggaactcatgcttaatgaagtcatcaagcagacacaatccacattgtccgcgctaattaatgatctaaattatatttctggaaagtttaacgacgccctggatgcgcataatcggcaaggagaaaaaattctaaaactccagaagatgatgaatgcattgaccggtgcagcagatgaattgaataagaaatctaataaaatgcaaaacagtgcactcaaacttaagtgccctgtttatcttgatgaggccaaactcagttcgctgacacgagagcccatcaaaaaacaattccatgatgttgttctttcattctacgaagaatatattgttgaagagcaaaacgatgggaagagtgttgaagtgaaaaaacttaagatcaaagaaaacgcttccactcagcaattagagaaacttgccgcgatctttgaaggcatcggctatttcagagcgggggatgttattaaaggcaaactaactgggctattctcataa

SEQ ID NO: 194724 - DNA, 555 bp, Klebsiella oxytoca
atgcaaaccatctcttttaaaaatcataacccggtaatgggcctgcaactgaactcagaaaatcagttttccggtctacgccgggctcggatgaagagtagagcaatttttgctgccgttcaggaatgggagtcgactttacctggacgtgcacaggaccacatcgcgcagctggtggatgagcaatggagaaaacaaaacggtcgcggaataaacgtcaataaacagaatctgtaccgctacctgaaaaacgaatccggatcagagaagtacaccagctacgtcatgcagctttcaggagcgatcgctgatgcgatgcctattgagattgcgcgcaaacacggattgaaacgtggattgactgaaagcgagctggtggctcaagcaatcaaagagtgtagcgaagcgcaccaggcaaaattgcttggtgctccgttgcagaagttagagcgtgaaattcgggaggcagcaattgcactttttaacatgcttcctgcagatgcggcgggaccacttctggcgagcattagcgccgtagcgccgcagtttttctaa

SEQ ID NO: 194725 - DNA, 219 bp, Klebsiella oxytoca
ttgtattggtttttcatgacagatgaagacgaagagacgctgcagccgccaagatcggaagatatctatgtccttaccccggagaccaaaaagctcatagaaatttacgatcagcttcctcaagtggagcaagaacgattcgtcgggttaatgcagttaaggttggaagaactcgatgctttcatgaacgaatatttaatgaaacgaaagaaagactag

SEQ ID NO: 194726 - DNA, 624 bp, Klebsiella oxytoca
atggtttataaagatttctaccatttaatgttggagcacttcgcccagcctgttgaattgtatacaggctcgagaaaattaccttttattttttatgctgaagagcaaaaactgattatcaaaaacgggaaaaataatataagtcgaattaactcaagtgaagtcgcggcgttcattgagcggtttgaagaaagtgagagtctacaacctaaggactaccaggatgtgacttttaaagcttcctatttattggcggcaatgcaatatatctctgagaaaaattcgacctgcgcatcaatcgtgcgcttccatagcggggaacaacaagacagcgagaaaaaatataaaaactggttagcggaaaatacagaaggctatgtcttaaatttactcaaacaaagtgaagtaagtgacagattagcactctctacttcaacttgtttacattctgctaggtgtttagctgtaaataatgagcgtaattatcgtcaatcaagtccatttactggcggtgattattttaaaatatgctcaacggatctatatgatcttgaaaaagaagctatcagaatcacaaagctgggcagtgtgaaaaaacattcttgtgtaagtacaagggagtaa

SEQ ID NO: 194727 - DNA, 1329 bp, Klebsiella oxytoca
atgatgatccaggtccgggaatatgctctgcttacctgcgataactctcaaccagccagtatggatttggggattgtctctgaggcaaccttttcctggcttgagcaattgcaacagaagtggggtggcacctctcaaattctcagccgtgaagggaagcagtttttgcgcctgggaagctatgtcggttatctacaatcgccgaatggcgaatctatagaaatactgcccaaaaccacgtttgaagccccaactgagccagtatcactgcgtcagcttttacgtcgaatgctcagcgcttctttagggatgacaccccgagaggctaaccaggcggcattgcaacggagtaaccagcctttacatgagtggattatcagcgagtttttgcggcatcttactgatttggtgcgcaaagggttacgtttcgactatcaccttgtcgaggacgagcacagcgcttttatccgtggtcaattgaatgtaacggcacaaatgagacagctgccgggtcggggcgcccattttcacgtacgctatgcggagttctccccccagcgtatcgaaaaccgtctgctacgtacggcgctggattgggtgcttaaaatgaccaaagaaggtcagagttggcggctggcgaatatacttagtcatcaactggacggcatagcgccgatctgtggcagtacaacacagccaatgggacaatggagcgacggtaaatatctctacggttatcgcgccattaagccatggtgccagcttattctggagaaaatgaatccagattttcagtatgggtcgcatcaggggatttcgctgttgttcccgatggaaaaattatatgaatgctgggtagggcgttgtttgtcgttagcgttacatcgcgattatcaacttaccgagcaggcaaaacgtcactatttgctggagcatgtgcctgctggtgaaagagtatctcaacaatggttcatgcttaaacctgactttcttattacaggtgaacaggtcgttgttctggatgctaaatggaagttattagatagcagagctgatgatagcctgaggaagtatgacatcagccaggccgatctgtatcagatgttcgcctatggacaaaagtatctgcaagggaaagggaatatgatgctgatttatccacgtcatcagtactttgatacttcgctgccagcgtttcgatttgatgaacatttatctctctggtgtgtgccctttgatcttgaatctggtggattagtgaaaggtgagtggcaaggttctttccgctgttttcctggtgatgagacgataacggctcatcatgattga

SEQ ID NO: 194728 - DNA, 1983 bp, Klebsiella oxytoca
atgctgaattctctcgaaatataccaggcgttgaatgaattgggttaccggcttgaggctggaaaattcgagccaagctatgcatccgagcatgcgcttggcaacggaaagtatctgtatgtcaaacgtaagcaggatggcgttgttagtaaaagcccattggttcttgcgccagaaacccttgccttacgggcggaaatcgatcgtattgctggcattcactgtctttgggaaaaagtaaaaagcaccagttaccgtcgttacccgaaagacaatgggacgtcgcaatatggttttgcggctgatgttgaatcgccagaggctctgcaaaaattaatgacgttactgtgtggtgctcggtcgtcagcagccttttccgatatgaaacaagataacgaaaataaggaactgcccatcatgtctcccttaaatcagattctctttggcccaccaggcacaggtaaaacctacgctaccaccgaaatggcggtcaaaattgcggataattcgtggtaccagcaggctacgctggagcatcatggcagtgacttacgggaacaggtaaaagagcgctatcagatgttggtagaaaagcagcgcattatgtttaccactttccaccagagcttctcctatgaagactttattgaaggcattcgcgctactacggatgaaagtacggggacgttacgctacgaagttgtcgatggtatttttaagcagctgtgcctgaatgccagggttaaggttcaggggagtgcaacgcaacctatctccctcgaagggcgccgtatctggaagatgtctttgggtaataccatggggggagaagaggatgtgtatgaggattgtctggcgaacaattatgtcctgttaggttggggggaagatatagatttcagtaattgctcaacctatgaatccgttaaagcacgaatagcatcagaaaaacagtcatcggaagacaccagtaattatatgggcgttgccgtgaatacgtttaaaaatattattaaggttggcgatgtcgtcattgtctctgatggaaaccataagttccgtgcaatagccgaaattacgggtgagtacagctatttaccaaatgatgagcgtgagtattatcatcaaatgcgttcggtcaaatggctaagaacatataccccaagtcttcccaaagagcagattttcactaaatcgttatctcagatgacactgtatgagttgcaggatacaacgatcgatcgtgaaaaattgacccagctgctggctcctgttgacgataccgatagtcaggatcttccacatgttcttattatcgatgaaatcaatcgcggtaatattgcccggattttgggtgagctgattacgcttctggagccagacaaacgacaaggggcagacgatgaacggtcgctgatgctcccctattcgaaacaaacattttcagtaccgaaaaatgtttttatcattggaacaatgaatactgctgataaatcgctcattcaaatggacctggcgttaagacggcgttttagttttacagaaatgcctgcgcggccggatttgctggctgggattagtgcatttggaatcgatgtcgcacagctattaacgcgtattaatcagcgtattgaagcgctgctggatagtgagcatatgattggccatgcttattttatgcctttaaaaaatatagaaaacaatgtcgatcgtgaggcttgtcttgccagtatcttccaggaaaaaatcatcccattgctgcgagagtatttctttgatgattatgaacgcattgggtgggtgcttaatgattcggtgaaggcgaaagaataccgttttatcctgttgcaacagtcagcacaactgccatcattttctgatctgttcccaaaagagattgcagagagtttgtctgacaggcgttttcgcatcaatgaacgtgcatttttgtcggcagaagcctatcagggcattgtcgcatga

SEQ ID NO: 194729 - DNA, 1359 bp, Klebsiella oxytoca
atggctaagtataaggcgtatccggagtataaggattctggggttgagtggttgggggaggttccgaatcactggaaaaccgtatccatatccagattgttttccaggattaagcggaccggatatacagagaaagaattgctttccgtatatcgggattatggtgttataccaaaatcaagcagagatgataacaataataagccttcagaggatttgtcaccctatcaattggttgagccgaatgatttggttatgaataagatgaaagcctggcaaggttcaatcgcaatttcagagtatgaagggatagttagtccggcatattttgtctacaaacccaacaatatcctttttgaactggcacatccaaggtatgtgcattatttacttcgcaacccgatttacgttactcaatacctgagccgctccaaaggaatacgagtcaatcaatgggatctggatcctgatgagtttagaaatattgagctgctgcttccagacaagactgagcaggaaaaaatatacagtttcctcgatcacgaaaccgcaaaaatcgacaacctgatcgagaagcagcaacaactgattgaactgctgaaggaaaaacgccaggcagtgattagtcatgccgttaccaaaggactaaaccctgatgtgccgatgaaagattctggtgttgagtggctgggagaagtaccggagcattggggagttactcggttaaaatatgaatgccgcaatatagttgattgccctcactcaactcctaactacaccgatgagggggagtatccagcaatccgaacagcggatattttggccggctatttagacttggataattgccgacgagtcacaaaatctattttcgatgaaaggaattttagattaattccaaaagcgggagatataatttattcccgtgaaggtgagcggtttggtattggagctcccattccagagggggctaaagtgtgtttagcacaacgtgtaatgctatttagggccaaatctacaccaggttatttgatgtgggcactaaactcatcttctacttatactcaggcccagcaagactgcataggggcgacttctccacatgtgaatgttgataccatcaaaaactttatcctttcctggccaccggaaaaagagagagaggaaatatcaaatttcatctatcaaacattggattcaatagaatcacttacggtccatcttactgaaaagctaactttactccaggaacgccgcaccgcccttatctccgccgccgtcaccggaaaaatcgacgtccgcgattgggttgcccctgacacacaggacattgaggagccagaggaggctaccgtatga

SEQ ID NO: 194730 - DNA, 822 bp, Klebsiella oxytoca
atgtcacaggacgcattttttcagggccagagtgaggcacagccaaggcttaaccctcccatataccgctggcaggaggatatgccagagaataaccagcctcagctagtgcctccccagcttatttggctaaatatcaaaaataacatctggattgaaattcctcgttatgaaggtgttatatggggggggatgttgggaggtgcatttatagtgtctcttttcatcatttttgtaactccatttttttactctattcttagcgattttccggatatattcgcagtaattaactgttcaggtatgttctttgtattgatttcgtccttatttgtttttttaaaatcatacttctgggctgtgagagatcaacctattcgtctgaacaaaaaaaggcagaagatctacgcctttgactataaaagaaaatggtggaatccctgggccaaatggccagccactgtcaaagcttaccactgggcagatattcacggtgagatgcgtttttccagcgaccgctataccgggggctttcagctgttcgcttccgtctgtcagccaggaacgctgaacgtggtggaacgcttccagattgccagtggctctcctgcgcagttgcagcagctctggagctatctgtgcctgtatatgaaaggcgagcctgtgccggatgaggcagtcaacaaaggtcgccctgatttctggtgcccgcgtaaagcggataaatggcctgctgaattggaacgagaatccaccaccgggccggatactgaactttctgctccccgagcctgtagcaaactatctgataagacgagctaa

SEQ ID NO: 194731 - DNA, 795 bp, Klebsiella oxytoca
atgtcacaggacacattttttcagagtcaaagtgagactcagccaaggcttaaccctcccatataccgctggcaggaggatatgccagagaataaccagcctcagttagtgcctcctcagctaatttggttaaatataaaaaacagtatctggatggaaattcctcgttatgaagcgattatgtggggggggatggtttttggaatagtaattcaatttattaccattgttattttttttgtttttttatttgatgatgatgttttttcattagttttattagctacggcttcatttgcttcatttacattgatgttgacttatattcgaatgtgtttttatattccacgggatcagcccattcgtttgaatagtaagcgtcaaaaaatctataccttcgattataaaaggaaatggtggaatccctgggccaaatggccaaccactgtcaaagcttaccactgggctgatattcacggtgagatgcgtttttccagcgaccgttataccggaggttttcagctgttcgcttccgtctgtcagcccggaacgctgaatgtggtggaacgcttccagattgccagtggctctcctgcgcagttgcagcaactctggagctatctgtgcctgtatatgaaaggtgagcccgtgccggatgaggcagccaacaaaggtcgccctgatttctggtgcccacgaaaagcagataaatggcctgaagcactggaaattgaatcaaccaccgctgtagaaaaagtttttccctgcactgacagcgctctgctggctttctga

SEQ ID NO: 194732 - DNA, 180 bp, Klebsiella oxytoca
atggtttgccggtcggggcatcgcaccggcgtggtcaatgaagagagatatgctctctccagcctacacaacgaggtgggactcgataccgatcgctacactctgagtatcgcaatcaggaaaaatgccttccgtctgctggtggttgatatttgctctggtgctactatttgggtataa

SEQ ID NO: 194733 - DNA, 789 bp, Klebsiella oxytoca
atgaatatcgtatttctgggtattgatctggctaaaaatgtttttcagctctgtgggttaaaccaggccggcaaaccggtttatacgaaacgaactggccgaaaagaattgctccagacgctggcaaatattcctgcatgtctgattgggatcgaagtgtccaccggggcattttactggcagcgtgagtttgagaaactggggcacaaagtaaaggtcatcagtcctcagtatgtaaaaccctttgtccgcgggcaaaaaaatgatggtaatgatgcacaggccatcgcagtggctctgatgcaaccgacaatgcagttcgtgccaccaaaaagccccgaacagcaggatatccaggctttacaccgggcaaggcagcgtattgtcaatcaccgcactgctacagtttgtcaaataagagggctgttacttgaccgggggatccccattggcagtgctgtctccagagttcgccgggctattcctcttatccttgaagatgcagaaaacggtctaagttcccgtatgcgcagaacaattgccgagctctatgagctctttaacgatctcgggcgtcggatccatttttttgataaggaaattgaaacagtattcaggcaatcagaagcctgtcagcgtatcgccagagttaaaggcattggccctaaaacggccacggccgttgttgctgctattggcaaagaactgaatttaagaatggccgccactttgctgcatggctgggtctggttccacgccagcattcgagtggtgacagacaggtgctga

SEQ ID NO: 194734 - DNA, 753 bp, Klebsiella oxytoca
atgcagagcagaaccgtttaccactggcagagctggcgggatgatcgggcgataaccctgcgtatccgggaaatagcggaaacccggatccgctacggttgcccgcgtattcatattcagctgcggcgggaaggctggcctgttaaccacaagaaaacacaccggatttactgtctggaaggcctcaacctgcgcagaaagcgcccccgcaggcatgtcagtgcagcacatcgtcagcaacgtccggtcctgaccggagtcgatcagtgctggagtatggatttcgtgtcggataacctgtttaacggacgacgtttccgggcgctgactgtagtggataattttagtcgggagtgtgtggcgatccatgccggaaagtcgctgaaaggtgaggatgtggtcggtgtgatggaaaggttgcgggtgccgggcaagcgcctgccggtacgtattcagacagataacggcagcgagtttatctcgaaaagtctggataaatgggcgtatgagcacggtgttacaatggacttctcccgccccggaaaaccaacggataacccgtttattgaatcatttaacggcagtttgcgggatgaatgcctgaacattcactggttcctgtcgctggaagatgcgcaggacaaactcgacaactggcgcagggaatataatcatgagagaacgcattcatcattaaatgacatgactccggctgaattcatccgaagtctccggaaagacgaagctctctga

SEQ ID NO: 194735 - DNA, 360 bp, Klebsiella oxytoca
atgaaagaatttaagactgtttccatatatgtcacgacatatatgctcctgtgtttgttggttttttcaacctggctcatcttcatatctcagttttcaactcttgatggttatgatctgtcaggaaaaatgatgtatatattaaatgcttttttcatatacgtagtgatggcaccatttgatgcgtttcttgatggttctttaactatggtcagggaagtagttgactcatcaggacaaatgacgcgcttttataacgaaatgcctattctctggatatatggtatttcagcactattgtgctttagtatttacaagttctttaatagaattggtgcccatcaacgaaaaacccgctga

SEQ ID NO: 194736 - DNA, 192 bp, Klebsiella oxytoca
atgatgttcagcaccgtcgtatcgctgctgtttgccgtcgtgtgtgtaatcactgccgtttctttaatgagaggaaaagcaggcgtattaagtgatagcagaattcccatgcccatcatagttacatcgctgatattctgcggagtacagtcagattattttatatgtctggctttgctcccttttttataa

SEQ ID NO: 194737 - DNA, 477 bp, Klebsiella oxytoca
atgaaagtcactgaaacccggctgaacaccctgatcgataatctgaacaccctgatctgtgaggatagtctgctgacgcgggcagaacgcgaggatctggtccgtgcggtcgccgccgttggcgccataaaagcccgggtcagcatgaagaaatccacaacaccggcaggcggtaagccaccggcagagaaaaaggagcgcatcaccgatccccgcttcccacatgccggcgatgcctggagtgaagaggaagaagtgtttctgcaggatgcacttgattcggtaccggatgaggaaattggtacgcatttgttctggctggccgagaaactggggcgcacgccctacagcgtcgcctgcaaaatagcgtcacaaagaaatctgaaaaatggctggaaagagcagttcagggaaatttcggataaaatccgcgagtccggactgaccatcagtgaattcgtcagcaaaaatggataa

SEQ ID NO: 194738 - DNA, 1215 bp, Klebsiella oxytoca
atgactcatgcgcgccgaccatcgccgctgcagcgccgggtgctgattgtgctggccgccctcgatgcgaaacgtccgggaccggtggccacgcgggatattgagcggatgctggagcagggcggggatgccccggtgtacgggccgaacctgcgcgcctcctgccggcggatggaagccgcgggctggctgcgtaccctgcgcgcgccgaacctgcagctggccgtcgagctgacggaaaacggacgtgcgctggccgccccgcttctggctgacgaacaggcgcgcgtcctggccgatcagcgcgcgtcggcggtccgggttctgcccctggttccgcgcagccaggcggaagaggctgacgaccggccggtggcgctggatggtcgctggcacctggcgtgccggggcgactacgtgattcgtctcggcgacaccacctgcctgcagctgtggaacacggccgggcaggtaacacgcctggcgggcgatcccctgcaggtcgccacctggctgcaggcctgccacgatgcggggattgctgtccgggtgcagatcaatgagagcgccacgctggaggaaggcacgctgaacgataccgcgccggcggaccggaccgagacctggtactgccagctggacgtcgcgctgcaggcggaggggatcaccggcctgaatgaggagatcaggcaggccgttaccacgccaggcgaggcgctccgcgacctgccggcgccggcgcgcctgctgcaggttctgcgcgacagtccggaggcgttcacgctcacggcagccggctatgaggaagacacggagtccacgctggctgacctgctggcccgcgcgggtttcgccgccgaccaggtccaggagctgcagtggcaccgcatccgctggccgctgatgagtcaggaagaagctgaccggtgcgagctgaacaccctgctggaagacctggaacggcaacagctgtactgcaaccgcgaacagctgacggagattgtgttttcgccggtacgcaaacccggcgagcgctggactgaacgtctgcagtggctcctgatgacggatggattcgggttttgcagtccgctgtctcgtgaagcggccaacccggcgctggctatcctggccagcttcacggggcgggaggtggcggagcatctggccacggtgatggtgtgggacgacgccggtgcgggagaggggacatga

SEQ ID NO: 194739 - DNA, 258 bp, Klebsiella oxytoca
atggatcaggaaatgacgttttcactcagctatgagcagctgacccggttcgcggaacaacgtatccgggaatgtaaactggacagcgagggcctggcttacatgactgcatcgaccgaggccgccaccgttctgggcttctggtatgaactggccattaatggctatgcctcgatgaatgccataaagaggcaagaactcatagacgccgatcatctgcgcctcagaaagctcatctggccggaggctgacaagtaa

SEQ ID NO: 194740 - DNA, 321 bp, Klebsiella oxytoca
atgacaacgacagtaccggacgaatttatcgcggcatttaaccgcgtttggcgactgccagcgggcatggacaacgacactatacttaaatcacccgaatttctgcatcttcggaacacggcagataagctttgctatgccaaaatcaaaggaaacctccttgatccatttctgcttcgtggactccaaaactgcacaactaaaaaccatgataagaaaacgggtatggataagaagggaaggacttgctataacaaatccctgatcattcccatggaggtaacatggccatttcagctcgtaatcagctcgtcggaatag

SEQ ID NO: 194741 - DNA, 213 bp, Klebsiella oxytoca
gtgaagcatatcaccgagctcgatgcgctaacactcatgcatgaatggtccaggctgaaaaaagagaatgctcacctgtatgactataaccgtcaggttaaccggggctggcgcggctttgtcctgcgcctgatgggtatccatttgcctgataacgaccgtgttcgtcttcagggcattaatgccagaaaagaacccatctgtcccgactga

SEQ ID NO: 194742 - DNA, 246 bp, Klebsiella oxytoca
atgaatgctgaacacaccgactacggctggcttttcagtgaaccggctgaagaaatttccggcgatattgttattgatccggaacgccttccggaggagcttaaactcgccgttgtccggattttgctggatcggattgaccgcgatacggcagagaaaaaactggccgaattaatacagaagcttgagtttgatatcaccgctgccgaactgtcagcgtatctttttaaaccgggccatgcctga

SEQ ID NO: 194743 - DNA, 1479 bp, Klebsiella oxytoca
gtgttaactgaaaagcagaaatcgctcttgaagaacaggttctggcgtctcaatcacctgtacaaaatcaaagataaaaacggtaagtgcgtaacgttcaagatgactcctgagcagttggagtatttcgacgggatgcacgaccgcaacgtgatactcaaagcacgtcagctcgggtttaccaccgaggtgtgcattatccagcttgatctggcgatcttccacaaaaaagaatgcgcactgatcgctcactcacttccggatgcagaaaggctattccgaaacaaaacgcagtttgcctaccagcggatgcccgacgatatcaagctggccaatcctctcgttaaagagacgaccagcgagtacgtttttgctaaaggcggtagcgttacggtatcgacatccttccgtggcggcacgctctatagcctgcacgtttccgagtttgggaaaatatgcgcaaagtggccagagaaggctaaggagattgttaccggtgcttttgaggctgtgccacttggcggcgtaatcaccctggaaagcacggctgaggggcgggcgggatatttttatgactactgctctgaggctgagaaggccatacttcagggcaaggaactatccaacctcgactggaagtttttcttcttctcctggtggaaaaatccgcagtacgcaatcgacccggtcgaacctctgccggtgcgcctgctggaatacttcgcagagatggaagcgaagcacggcatagtcgtcaatgagcgccagaaagcctggtactacgccaaagagaaaactctcggcgacgatatgaagcgcgaatacccgaccattccggctgaggcgttccagcagtcggtcgagggcgcgtactacgccaaacagttccgatggctctacaccaacaagcgaatcggccaaatcccggataactcacacctgccggtacatacgttctgggatatcggtgtgggcgactcaacggcgatctggttcgttcgcgaggtaggcaatgagttccacatcatcgactactacgaaaactccggcgaggggctgaggcactacatgaaggtgctgaaagaccgcggctacgagtacggcgagcactgggggccgcacgacattgaaaaccgcgaattcggtgccgacgcaaaatcgcgcaaagagcttgcgcaggaaggctatgaaatcgacggccaggtgtactcgatgaccttcaatgttgttccgaaaacgggtgtcgataccggcattgagtcggtgcgtgaaattctcccgtcctgcgtcttcgatgaggagaaatgtgccgagggcatatctcacctcgaaggctaccgcaaggagtgggacgacaagcgcggctgctggaaagataaaccgcttcatgacttcacatcacacggcgctgatggcttccgctactttgcggtagcgaagaacaaccacaaacaggtgggcgcaatcttcttcacataa

SEQ ID NO: 194744 - DNA, 177 bp, Klebsiella oxytoca
atggcaaatctcaccgacaaacaagaatcagttgactggtcaaaagttcatgtccggttgagagagtggcaggaagatcttgataaaaatatgaccaacgaaaaattcattgatttgtatattgggagattctctcctcaaccatcaatgaaacaggatgagcgcttaagaaagtaa

SEQ ID NO: 194745 - DNA, 216 bp, Klebsiella oxytoca
atggctaaagggttgattaatcattacatcgtgaatatctatccggtgtcagatggcacacagtccatctgtatatccattactacccccgttaagccgataattgaacatgggttcattcattgtcactttgacgacgatggagtggataagcgagaaggattcagcctcaaagaaatctctcgttacaccatcattacggtaatgaaggaatag

SEQ ID NO: 194746 - DNA, 1113 bp, Klebsiella oxytoca
ttgaacaattcagccataccgtctcgtctgacggtcgtattttctgctaatggcgacaaaaataccatccccgtaaattccaccactgagacgctcgctgatggactcgcggccatggactcaggattcccacccctaacaaggactgcattatctgcaggaggcaagccgccaaaaggggaggattttaatggtatctacaacgatatctacactcgcctgcagtggggtagcgcgggtatgggatttccattcagcgcagattttagcgaggctattgcgggctatccaaaaggtgcgcttatcccgaactctgattatacgggccaatggttaaatcttaacaatggcaacctctcctcccccgaatccacttcgggcgctaataccgggtgggttcctgtggggggatatggaatttctgctatttcgtctctgtcaaattccagtgttacgctatcttcggcgcaggcatcaaaggaccgcctgattcttaccggttcactgacaggggatatcaatatgattttccccgcatggatgaagtcatggactgttgaaaaccgctgctctggaaatttctctgtcacatgcaaaacagcatccggaagcggcattgccgttccagccggtcgagttgaaaaactgtattgtgatggcgtgagtatcctgcgcgatttcggcacggcagcaatgaggaatattggcaccgcgacgtcgcgagatgttcctgacatgagtaatttcccacgagatgataaccctcagtctggctatttttacctgccaaatggacacctatcgcagtacggaactgtcagtttacccgcagtaggcacatttaacccggcgtcgttcggtggtgttacttattacaccaggtactacattgtcgatttccctgtggcatacccaaatgcgcagatatcaaccgtcgttagcctggctggtagtgcttttgactcacagtcaaatgagttcggttcatgggcaaacagcaaccgaaccttaaattcagggcagccagtttccaaaaatcagtttgttgtatccgtcacttcaaacaacccgaatcttgcccctattatccactacaaatcagaaggctactaa

SEQ ID NO: 194747 - DNA, 738 bp, Klebsiella oxytoca
atgactgcattaaagatagcagaccaaagatcgtatgtcaccatgtccagtcgcgagatagctaaactcacgaaaaaggaacataagcacgtcattcgtgatatttgggatatgctgagtgatttgtatggaattgataaagatggtccaaatctggaccataagaaaaatcatacagttacactgtctgatggggtggaggttaccgttgactatcgcggttacgtctcgcatttcagactggataaaccccatgttgaatgccttcttactggatacagtgctgtattgcgcatgaaggtgattaagcatatttacaagctcgaagagcaaatcaaccgtcgagccttaccttctaactataaagaagctttgcttgctctggttcaggcagaaaccgagaaggagcaaatcgcttttgagcgtgaccaggcagtagaaactaaggcatggatcggtgagaaaagggaagctactgcgatggctacagcttctgcggaaaagcgaaaagctaatgctctagctgagaaattgggagaatgtaagaagcacgctactatcaaggccgtgcagcgcattactaagaagccgttcagtcactggcctatgaagaaatggtgcgcggcaaatggaatggtgccgaaagatgttccagatgaaacgtatggaaccgttaagtcttggccggcagaagcctggaaggcggtgaacgatgttgaccttcgcaagctgttttaa

SEQ ID NO: 194748 - DNA, 720 bp, Klebsiella oxytoca
atggtcgttaaaaacagcgaagcccagaagtgcgctaacactaaccgggcttctatcgaaaataaccgcgaaggaaatatcgacatgaacagtatacagaacaaagagctaagtttccacaatgtcacattggtgccagcgcctgtttcggatggtatttggctgacatcggcagatatcgcgaaagcgctcggatatgcatcaccaaagagtgtaacgaacatttattcccgaaattcagatgagttcacaagcagcatgtcaatggtcatcaaaatgatgaccaacggaataaacaataacttacgtgaaaaatcggtccgtgtgttctctctacgtggttgccatctaatcgcgatgtttgccactaccgataaggcgaaagagttccgccgctgggtgctggatgttctggatcgggaagtggcgcattcgccgattgcgaagcagtttactgacgatgaactttcatcccttgcctggttgtggcgagcgagtgacatcatgctgacagcctgtgagagcgttactccattacttaaggtagccgagcatcgacaggccgggcactttcacacgatcggccaggagttgccacggacaatcaacaaggccagggagatcattaagcgcgagacagcgcatatcgaatttcacccatggaaggatgataactggagcagggtattgcctcacctgcgtcgggaaatgttgcagtaa

SEQ ID NO: 194749 - DNA, 204 bp, Klebsiella oxytoca
atggaatggattattggcgtaatcgtaatagtgtttctcgttaaccttttcaaaccaaggcgttgcgatgtatgcggcacaggttttaaacggaactactacacctggaagatcgacggcaaaaagcaacacctttgtccgaactgcaatagcaaaatgaaaaaaagaaaaagtgacatcagctttaaagacagattcggctaa

SEQ ID NO: 194750 - DNA, 591 bp, Klebsiella oxytoca
atgcttaccaagcaaaagcctagtgacatgtcgtgtcaggggaacgctgttctttcgcttatagccggagccataaagggctgcgtatttgccgatatcgtcttagtcaaaaaagtgaatgggaagacccttaccgtttttcctctggttactggaacaaacgcttctggcggatcaattgaaaaccaggatgtttacaatgttccattcattcagtaccaggctggaaatagttcggtaaaaatgacgcccagagtaggtgatattggcttggtgattgcctgtgataaagacatcacaaatgtgaaaaaaactaaaggcggaggccctccaccaactcagcggcgccactcatactcggatgctgtttacatcacggcgatcgctagcctgaatgatgagccgacggagcttgcagagttcaccggtagcggcataaacatcaagagccctggcgtagttaacatcaacggcatgaaagtacacccagacgggaaacttgagcttgtcgatggctctatcgttgatgggcatactcatggtggggtagtatcaggaggaagccgaaccgatcctctgggggcggcatag

SEQ ID NO: 194751 - DNA, 855 bp, Klebsiella oxytoca
atgagttacaaggaaagagagttaacagttgagtttactctggccaatggcacctttgatggtaaaaaaggtaacacgctcatagccgaagggttcaagtgcgagctttctgtttcggcttatgggggagctaccgggacgatgatggagcttagcctgtggggcttatcccttgataacatggctaaattgaccaccaactccgaaaaattcttcggtgagcagcaaaacgccatacgggtttttactggagatgtttgcgtgtttatgggcacgataatatctgccagggtaaatcttaatcagatgcctgatgctccgattgaaataacggcctcagctattggaaaggaaaagcttgtcgtatgcgagccaacttcaattgaaggtgaggcgtctgtcgccgatatgataaaagcactggcctctaaggtggatttgaagttcgtaaatgttgatgttaaatcggtgcatagcaacccttattatgagggaaatgctattgagcaaattcagaaaattgcggccgaccataatatcatcgcagatatagactttgggacggttacaatctacacaggggaaagccctattgactctgtagttccatttatatctccagagcatggattaattggctaccctattttttatgatattggtataaattttcgctgcatttattcgccgtcaataaagctggctcgaaaaataaaactggaaacctctctccctcacgcaagcggggattggatagtccagtatggaaccactcattacttgtcatgcagggtccccggtggtctgtgggaaacgttcgttgtggcttatccaggatttgtatttggagtgtga

SEQ ID NO: 194752 - DNA, 306 bp, Klebsiella oxytoca
atgcaggaaattagcttatcaccgtcactttctcaaaaggtgtatgttacgcttggtggccagaactgcgcgatcaagcttcatcagcgctcaactggattctacatagacctgtatgttgatgacactgcaattatgcagggtgttctctgccttaactgtatatatcttgtcagatataagtatcttggatttaatggtgatctcatttttgtagacacaaaaggggattccgatccggtttatgacgaaatagggacgcgctttaagctttattatgcgtctagtgatgaggtgggccgatga

SEQ ID NO: 194753 - DNA, 843 bp, Klebsiella oxytoca
atgtcgttttctctgaatgtctcgacagtgctatccgccattcagggaggaagcctgttatccgtccttaacagcgccctgtcgccaacttaccggatcacctataacaccgttgacgagtcgcttttgacggctgcagccgggcaggaggttttctctccttccggctgggttagcgttgatcgctacggtgatgcggcagtgactaaggggccagtagaaaagggccggtacacgtcctacaacaaagtgaaacagccgtctgaactcaggatcatttttgcccttgagggatggacggctttttccgggtcactgcctaacctgaccaatttctctttgctgagccggaacaatttcattcagaaactggatgagatgaaaaacacggccagcacctacaacatcgagacgccggacacggtgtattacagctacgatcttacccacttcgattactttgtgggctcgtatcgcgggcagacgttgttgatggcgaactgcaccttcgaagagataatggatagcggtgaagtaattatcgctaacggggtttccggtaaggctccgacagataacgacaaaacaaacaataagggcgctgcaaaaacagaggtaatcactgcttcaactaaagaggtaacgcttactgacgcaaaaaacgcgtggacaagcgggaatacatcgctatcaagcgcccttgatcttaccgggagtgccatagtttcaggtgtcaattcggcggccaaatcggtatctcaagtatgggataactcatcaacagcggtcgcaaaacagatcaaaagcacggtggctgattttcttaaaaataaggtgatgtga

SEQ ID NO: 194754 - DNA, 681 bp, Klebsiella oxytoca; identical to SEQ ID NO: 19849

SEQ ID NO: 194755 - DNA, 267 bp, Klebsiella oxytoca
atgcgtgatctgatccttcaactcagcaaaagttcgatttattcaacaaagcccttccggggccgcagcggcagtaaggtcaaactgctgtggtccaccggcgacgggctgtgcctgctgaccaaacggctggaacgcggccgcttcgcctggccctctgcccgcgatggcaaagtgttcctgaccccggcgcagctggcaatgcttctggaaggcatcgactggcggcagcctaaaagactgcttacgtccctgaccatgttgtag

SEQ ID NO: 194756 - DNA, 891 bp, Klebsiella oxytoca
atgcctgatgatttgaaatcaaagttagcttcgtctgaaagaggcgatggtacctttttttcttcggggcataagtatcttcttggttatgctcatatgaaaaatactgactggaatgtgtttgtttatagtcatgctgacaacgtgaccactattcttattaattatgctaaaaatgtgcttgtgctgctaattgtaataatagttgtgttttcagttgcctcatatttcattgcatcccaaatctcaattcctttagaaaatcttgctatatctaccaatgctaaagatatagagtcctcgctgacttatattaaaggtatcaatgcttggtatgccgaagctgaccgccttaaaaaggcacttttaacgaatgtaaaggtaatgatgaaaagggttaacactctaaatgaagtggcagtaaaagatcccctaaccggtgtaaataatagattggggttttcgaataaaacaaaggattacacgcaaggctcaggggcttcaattattgctattgatgttgacttttctaaaaagataaatgatttcttcgggcatggggtcggagatgaggtgcttatttctttggctcatgttattaattcttgctgccgtagtgaagatattgtttgccggtttggtggtgaagagtttgttatttttctgccgaatacttcagtggtaacagcagagcgtattgcggagcgtatcagaagtgttattgaaagtactgtttttactaatgacttgcgtgtcaccatatctgctggtgtagcaacgcaaactgatccgcttagtgggatcgactttttgctgaaaaatgctgatgatgctctttatcaagcaaagggagaggggcgtaataaagtgattgtatatagtgctatttga

SEQ ID NO: 194757 - DNA, 624 bp, Klebsiella oxytoca; identical to SEQ ID NO: 102411

SEQ ID NO: 194758 - DNA, 390 bp, Klebsiella oxytoca; identical to SEQ ID NO: 152332

SEQ ID NO: 194759 - DNA, 2577 bp, Klebsiella oxytoca
atgttcgattttgccaccgcgtggttgcttcaaaataaagtgttgttgccagccgcatccaccctgacgagagtcattggtgaaatccgtgagcgtgcgacccgccgcttgtggcgaaaattggccgcgctgccaaaccgttggcagaccgcacaactggctgggttacttgaaatccccgaaggacagcgactctcagtgatggagcacctaaaaagaggccctgtcactatcagcggccccgcgttcactgaagcacttgaacgttacactcgcctgcgcagcctggagttttcctgtctgaatttcactgggctgcccgccatacagctccgcaatctggcacgctatgccggaatggcatcggtgaaatatatcagcagaatgccagaagaacggcggctggcgatccttaccgcattcgtgaaagcgcaagaaatctcggcgctggacgaggccgttgacgtgctggatatgctgatcctcaatattacccgggaggcgaagaaaaccgggcagaaaaagcgacttaggacgctcaaggatcttgaccgcgcggcgttgctgctggcgcgggcatgcgcacttttacttgatgaagataccgccgatgatttgctgcgaaagaccatattcagcagtgtgtctgtcgccagactggcagagtccgtggaaaaagtgaatgaactggcccgcccccaggatacaaactttcaggatgaaatggtggagcaatacggacgggtaaggcgttttttgcccgcactactgcgcgatctgcacttccgtgcggccccagacggtgaacataccttggctgccatccattacctggcagagctaaacggctcgaaaaaacggatcctggacgatgcacctgaacatatcatttcaggcccttggaaacgcctggtgtacgatgctgacggtcggatacagcgagcaggttactcgttgtgtctgctggagcgacttcaggatgcgctacgccgtcgtgacatctggttggaaaacagcgatcgttggggtgatccgcgccaaaaacttcttcagggggaggaatggcaggcgcagcgggttccagtctgccgggcattgggtcaccccactaatggcagtaaagcatcggagcaattggccgctcagttagatgaaacctggaaaacggtggcatcacgttttgatcgcaataccgccgtggacatctgcaatgaaggtaaacatccttcgctgaccatcagcagcctggataaattggatgaaccaccggcgctgatacaactgagcagccgagtcagacaattgcttccacccgttgacctgacagaactgttgctcgagattgacgccagaactggcttcacccgtgaattcagccatgtcagcgagtcaggtgcccgtgcgcaggatctgcatataagcctgtgtgcggtgatgctggctgaggcctgcaatatcggacatgagccgctgatcaagcacaatatccctgcactgactcgccatcgtctgagctgggtgaaacagaactacatccgagcagaaacgctggttagcgccaatgcgcggctggttgattttcagtcctcgttagcgttggcaggatactgggggggcggggaggtagcctccgctgatggtatgcgttttgtcacgccagtgaaaacggtgaattctggccccaacagaaaatactttggttcagggcgcggcatcacctggtacaactttgtctctgaccaatattcgggttttcatggcatagtgattcctggaacactgcgggattccatctttgtgctggaagggctacttgagcaacaaacgggactaaacccggttgaaatcatgacggacacagcaggtaccagtgacattatctttggcctgttctggctactgggataccaattttcacctcgtctggcggatgcgggtgaggctgtgttctggcgggccgacaaagcagcgaattacggggcgttggacaaactggcgcggggttgtgttgacctttctaaaatcgaaagccactgggatgagatgatgcgggttgccggttcgctgaagctgggcactattcatgcgtcagaactcattcgatcgctattgagaagtacccgaccgtcagggcttgctcaggcaataatggaggtcggaagagttaacaagacactgtatcttctcaactatattgatgatgaggactatcgtcgccggatcctaacacagttgaaccggggtgaaggccgccatgccgttgcaagagccatctgctacggtcagcgtggcgagatcagaaaacgttaccgcgaggggcaggaagatcagttgggtgcgctgggtctggtgacaaacgcagtggtgctgtggaatacgctttatatgcaggaagccttgtcgcacctgcgcagcatcggggaagggccagaggatgaacatatcgcgcggctttcgcctctgatgcacggtcatatcaacatgctgggacattatacgttcacactaccggaggatattatgaagggggaattgaggccgttaaatctcaatttaaacaatgaattatctccttag

SEQ ID NO: 194760 - DNA, 264 bp, Klebsiella oxytoca; identical to SEQ ID NO: 94215

SEQ ID NO: 194761 - DNA, 537 bp, Klebsiella oxytoca
atgatggatgcgatagaaaagttacttttcgtttctgaggaagcgaaaaaatggatctaccatcctatgatgaagaaggttaaacaccatactttacaccagtaccggcgtgagctgtctaccagtggaaatcagatccttgctttaattcctcatgaacttccgataagcatgaacgccctcccatcctccccggcacagcagtggcatcaccttcgagccacgattaaccttctttgtcgcctgagccgttctgatatccctcaaggcagtattgcctttgaagaactggtttattatatcccccggcttctggaagcatctgaatctatcaatgttgccgcctacgaacgatggtatgacttctatatacggaaaaaaggagagggtgtactgaatgaggctgaaattgaatttttgtcttttatagtgaaaatcattaactggaacttgtccatacataaccttcccaccttcgatagcaagcaggcctttcgggattggtttttgctaaatgatcctaacaagtcgctatag

SEQ ID NO: 194762 - DNA, 1158 bp, Klebsiella oxytoca
atgccctggactgagacccgacctatgcaacgccttgattttatccgtgcctgccatgcaggtacggactccttctccgctctttgccgcctttttggcatcagccgaaaaaccggctacaaatggcttcaacgttttgacccttctgacctctcatctctctctgaccgctcgcgcgcgccacactctcactcccggacggttcctgaagatatcgtcggacatctgatcgccctgcgtcaaaaacaccctgactggggtcccaaaaaactgcggatgtggttgctcaatcaccatgtcgattttgccgtacctgctgccagcactatcggcgatatcctcaagcgtgaagggctggtcccggataaaaagagaaaacgcagaacgccaggtaatcgccagcctctgacaaccatcagtgagaacaatcaggtctggagcgccgattttaaaggtaaattcaggctgctgagtcgggaatactgtcatcccttcaccctgaccgataatcacagccggtatcttctgagctgccagggaacggaccgggaaagcgagcccttcgtcagaaggtgcctgacggatgcgttcctggaatatggtctgccggaagtactccggacggacaacggtcagcccttcgcaggaacaggtatagccggattaagtcgccttgccgtctggctaatcaagctgggtatcagacctgaacgtatcagaaagggccatccggaagaaaacggtcgccatgaacgaatgcaccgttcgctgaaaagtgcagtgaaatatggcaacaccttcatgacgatggaagaacaacagcggtggttcagtgactaccgggaagagtttaactacgaaaggccgcatgaagccctggcaggcgcaacgcccggaacggtgtgggaaccgtcaagccgacactgggatggcagggttcctgaatacgcttatccggcagggagtctggtctacagagtaaaatccaggggaacactctatatgggtaaaaaagggacagtgttcctgagtgaagcactgactggcgagtacattatgctggaagaacaagatgatggcctggaggccatcatctttaatggaataacgcttgcgtactacgaccagaaaacccagagtgtgctccggatagactaa

SEQ ID NO: 194763 - DNA, 522 bp, Klebsiella oxytoca
atgacgggccctgttgagtatcatcaaatcgcctttgagaagggtaacgccagcactttctattgccacatctgtacccgttcccatggctatacccacgtcagccgctgccagcgccggggcatcattcacaccgtctccggccatcgcaaccacatggccagacgctttcagtcgggttatcactgcttttttgccatccggcagaatcccggcttcaacctcatctattcccagtttccgtgcgactgcttcagcagtaagctggttatccccggtgagcataacaatgcggatccccgcctgacgcaaagctttaagcgcatccggcgtggttgctttcacgggatccgagatagctatcaggcctgcaaggttcccgtctgtggccacatagataacggtagcgccttccatccgcaacgtatccgcaacggccttttgattatcaataacgatactgttttcctgcatagccagttcattaccaataacaacccgttgaccttcgacatcgcctga

SEQ ID NO: 194764 - DNA, 366 bp, Klebsiella oxytoca
atggccagacgctttcagtcgggttatcactgcttttttgccatccggcagaatcccggcttcaacctcatctattcccagtttccgtgcgactgcttcagcagtaagctggttatccccggtgagcataacaatgcggatccccgcctgacgcaaagctttaagcgcatccggcgtggttgctttcacgggatccgagatagctatcaggcctgcaaggttcccgtctgtggccacatagataacggtagcgccttccatccgcaacgtatccgcaacggccttttgattatcaataacgatactgttttcctgcatagccagttcattaccaataacaacccgttgaccttcgacatcgcctga

SEQ ID NO: 194765 - DNA, 177 bp, Klebsiella oxytoca
atgatcatcaccgtcatcggtaccatcagttttaatttcttattggcgtgctcgagtaattcaaactgtcctgagaatgccacactggttcccggtctcagtttcactttctcactgatggccgtcttaatatcgttcaccaccgacaccatgtccctgccgcgggcatcaacataa

SEQ ID NO: 194766 - DNA, 366 bp, Klebsiella oxytoca
atggccagacgctttcagtcgggttatcactgcttttttgccatccggcagaatcccggcttcaacctcatctattcccagtttccgtgcgactgcttcagcggtaagctggttatccccggtgagcataacgatgcggatccccgcctgacgcaaagctttaagcgcatccggcgtggttgctttcacgggatccgagatagctatcaggcctgcaaggttcccgtctgtggccacatagataacggtagcaccttccatccgcaacgtatccgcaacggccttttgattatcaataacgatactgttttcctgcatagccagttcattaccaataacaacccgttgaccttcgacatcgcctga

SEQ ID NO: 194767 - DNA, 273 bp, Klebsiella oxytoca
atgactgaatataatacggccttcaatgaagtagacttgcttatgaatgagatgcttgaaaaattaaatatatcattaaatgaaacgaatttatatccaactgatgatatgtttcggataattgtgcaagagattgatgttgaaaatttaaaaatactatcttttatttataacgaaggatctcaagaggttatagacaatatgactcccgtaataaaagaatttatgtactggtggggagataatttagattatggtactattaatatctaa

SEQ ID NO: 194768 - DNA, 177 bp, Klebsiella oxytoca; identical to SEQ ID NO: 139692

SEQ ID NO: 194769 - DNA, 219 bp, Klebsiella oxytoca
atgacgaacggctcggcggatgcgcaccagaaaatggtggaaagtcatcagaagatgatgggaaataacacggtatccacgaccgtcccgtcaacgtcttacgcggcgatgaatgagcatgaaagagcagcggttgcccatgaattcatgaataacgggcaatccggcccacatcaggccatggccgaagcgcaccgccgcatgatcaatgcaggctga

SEQ ID NO: 194770 - DNA, 771 bp, Klebsiella oxytoca
atgaaaagagatgaggacgatgaaccaagctacgaggttaggctgatggcatcgggaagagtcaatctctccgaaattgctgaaaacagctttaatgaagcgcaaaagattattgaagcttataacgtagaagaactggaaaatccagagctgaagctcagaagtgcattagatatgctgctgaatgttttttggatcaaaaaagacctacgtattccaatatcaagacaaatgcattctataggaaaggtgctgcatgaaaattatgggtgcgcattcgggtttgaaaatgggttttattacacaaagtgcccaaacatgcttttgcatcgtgactttggatttagcatgcgagggtttgaaaaatacaaatgctccatatgtaacatagatcctgtagactgcattcatagaactgggcgaaagtacaataatattgagtgcaaggagtttgatgggcgttgcaatatatgctgcaacgaaatttcctcgtgtggtcatcatttgggcgaggcatatgataacgtcgaggctataaaagtcgtctacgacatgcagataattacatttgatgtggttaaggagccagattttgctcttgcaagagtgactaaaatacctttctcaaagcaatacataataaaaagtatcggtaaagatctgcattcttcggagtttatatatggaattacagtacttaactgcgaccattgcattagttgcgcggtgtataacccagatgcgaatggtgatttttgggttaccccctaa

SEQ ID NO: 194771 - DNA, 432 bp, Klebsiella oxytoca
atgataaaagaaaatgagattgatattaattcttatctaaaggaaatatctgacaggagaataatctgtgaagaaaacgtggcgtacttaatgccggaaggcagcgccgacggcattgatatcctgaatgagcattccccagatttaagaaaagatttagaagaatttggcgtgaatgcggtggttgtcaaagggaatgagtatacttaccaagcattaagaagtgcagacataattttacctttaatttttggtattccattttctgtacttgccaatttcctaacagattggttgcgatccaatatagaaaaggacaagactgtttctgtaagattcataaaaaaagatggtgaaaaatataaagaaataacaatagaagggctgggtaaagatgttgaaaaaatcattgacagtctgaaggaacactga

SEQ ID NO: 194772 - DNA, 594 bp, Klebsiella oxytoca
atgaaagaaacaatgaccaaaataatactttctggagtattaggtaaaacttttgggaaaattcactatcgtttaattagcactgttcatgaagcagggcaggcattatcggcaacgataccaggcttcgaaaaattcatgattaccagcaaagagcgtggactaacctatgcggtatttaagggtgaaaaaaatattgggaaggatgatttaggatttcctgttggtggtgaagtcatccgaattgttcctgttttaattggtagtaaaaaggcgggactgcttcaaacaattcttggagcagttattattgttgcctctgctgtcggctcttactttgttcctggcaaccccgtgtcagcatttggttataaaatgggggctgcgatgatgctcggcggcgtcgttcaaatgctttctccacagccagctggcctggcacgaaaagaatccgctgacaataaagcgtcctacgcctttgggggcgtgacgaacactgcctctcagggatacccggtccctttgctttatggcaaacgccgaattggcggcgccattatatctgccggtatttacgtagaagaccagcaataa

SEQ ID NO: 194773 - DNA, 315 bp, Klebsiella oxytoca
atggctgcgaaaaataaagcagtggagccggaagaaacggtcgtacaggacaaccatgcgaccgagaccgcacaggacaaccatgcgactgagaccgcacaggataaccgtgcgaccgtggtcgcacaggcagaacgtaaatccgttgtgttcctcggtccgcatagccgttattcccgtggtgatatcgcgtggtttgaaggatcgcacgccgaagagctggttaagcgccgtatcgcggtatggccgaaggatgccgaacgcgcgctgaaaccgaagccgggagacagcgattttgatactgacattggatga

SEQ ID NO: 194774 - DNA, 1803 bp, Klebsiella oxytoca
ttgagtacagtcgttcagcaagtgccaagagagctgcaggcagcgctcaccctgatcaataatgatcctaggatgcagacgaacaatgcctgggcgctctctgctgacaaaagatggtctctaaaattcaccgccgagctttccgtacccggttctaggttcatgccagacaacagcgtctggcatctggtcctctggcaggaagagaccctgatacgcatagaggtttatcccgataaatcggaaggtatttcagccacgttccagcaccaaaactacaacttttcggatgcgtctacccgtgaatggacctcaggaaatccgtgccttgagaatacgcccgccgtatttggtcgtaacttatgggggctggaacccgaagcactactcgacagaatcagctggcgactcagtaggctgctgctctggattgacgccgctgcacaggaaaaactgaccacaaccggggatgctgttgaactccccgccttccccgatcagtcaccctttaccgtgattggttttagcgaacagattgatgatctccccttctgggcatcgaaaacaggagaatgggggtatgcaagcagcactggattgcccggtgcgcgcggtgcccgctttttgcgtgagttttttgataacaaaggaaagctaatccggacaaccaaatggtcctcgttcatgcgcaaaggcgcgagaactacgaatgcagtgtggtctgttttgcctaccctcccagttctggctccttggcaggcacccaagacctggcaggagctcagcaattgcttcgcacaatgcgggttatcactgccggacctcttttcagatattgggcgttctgtcagagccctgcgcaagcaacgcgcgcccggattactcttgctgggttttccgctggaaaacaaaattggagatgagccagcgcgaattcactggctggcactgcgtctggccggtctcagtaatacaatgacaaaacgccccggattccgtccaacggaacggaatcgtagaacttgggatcgcgaacagccactttcacaggagcccatcaagtgggtgaggacgcagaattggtctgccgaccagctcagaacacgtggcgaagcggccaacgacattcgcagcaaaaaggtgctgataatcggtgcaggctcactgggtagcatgattgcagaaaacctgatgcgcataggtgttgtcagccagggcattctggacgcagaccttctacagaccggaaatctgagccgtcacgccctgacaatgacgtcagttggccataacaaagcggccgcgctggttgaacatctgaatcgtattctgcctgacgcaagtgcacgttcattcagctgcgcgtttccccctgagagtgaggtcacaaaaaactcactgcgtcagtatgacgtgatcattgattgtaccggtgatgatggtgttcttaagtcattggcggcatttgactggcaaagtgaaaaaatatttatcagcctggctatgacatggcgggctgaaggtttatttgcgtttgctgccagtgaaacaacttttccggtgacggatgcttccagccgcttcgacgcctcggcgtcacctgagatcgacatggatgaggcgagaatagaaggtatcgggtgctggcatcctgtatttccggcccgtgccgatgacgtacagttatgggcggccgtcggtacaaaattcatttgccgggttgtcagtgcgccagggagaatctatgaatattttaagcagatgcctgatggcactgtcgagagagagccgcatgagtattaa

SEQ ID NO: 194775 - DNA, 1146 bp, Klebsiella oxytoca
atggaacttcaacctcagttcaacgaatttttagcaaatatcaggccgactgatacacagaaggaagactggaaaagtggtgcaaggacactgcgcgagcgcctgaagaatttcgaaccactcaaggaaattgtcgtatcaacgttcctgcagggcagcattcgtcgttcaacagcaatccgtccgctcggcgataagcgccctgatgttgatattgtcgtggtgaccaatcttgaccatacccggatgtctcccactgatgcaatggacctgttcatcccattcctcgaaaagtattacccgggtaaatgggaaactcaggggcgctcttttggtattaccctctcctatgtcgaactggacctagtgatcaccgccatcccagagtcaggggcagaaaaaagccatcttgagcagctctataaatcagagtcagttctgactgttaactctctggaagagcaaactgactggcgcctgaataaaagttggatccccaatacgggatggttgtctgagagtaacagtgcgcaagtagaggacgcccccgcttcagaatggaaagcgcacccgttagtgcttcctgacagagaaaagagtgagtggggccggacacatccactcgcgcagatcagatggaccgccgagaaaaaccgtctttgcaacggtcactacatcaaccttgtcagggcggtgaaatggtggcgacagcagaacagcgaagacctaccgaaatatcctaaaggctatccgctggagcatctgattggaaacgcgctggataatggcaccacatcaatggcccaagggcttattcaactgatggacacttttttattgcgctgggcagccatttacaatcagaaaagtaagccgtggttgtcagatcacggggttgcagagcatgacgtgatggcgcgcttaacagccgaagatttctgttcattttatgagggtattgcgggtgcggcggaaattgcccgtaacgcgctggcgtctgaggatcctcaggaaagcgcacaactctggcgccaactgttcggatccaagtttcctttacccggccctcagggcggtgatcgcaacggtggatttacaacgccaagtaaaccagcagaaccacagaaaaccggacgcttcgcttga

SEQ ID NO: 194776 - DNA, 1500 bp, Klebsiella oxytoca
atggcgacttctgtattggctaattggcacggtcatgattaccaggctcggtatttctggattgaggcatcccggcttaaaaatccccaacaagatttcgtcgtagaagtttcctatgaagccgatggccctaaagcctttgatgacgtgattacgcgttataaccccccccgccgcagcaccgggcccgatcggattcaggccgattactatcaaatcaagtttcacgttacacaagccgctagcttcggattcgaggacctgattgaccccgcattcatcggtgctgaaaccttctcgatccttgaaaggctaaaacaggcaaaaggaactgagcctgtcaactctgcttttcatcttgtcacgacagatcgaattatcgatgaggacccgcttggtgaaataatcagcaatgtggatggctcaatacgactcgataagttgtttgatggcacgaccgacaggagccgtaagggaaaggttcgcaagctctggcgccaacatcttaagctttccacagaccaggagctggagctggtgctttctggttttcacattcagcagtcacagcccacgcttgaagcgatgcgtgaaaaagttaatacctgcttccagatcattggtttgataacctgcgaaacaagttcggacttccgtttcgatggcgctgcgcgtgccttacgcagtcaggaacgttatcgctttacccgagagcaattcacagccctttgcgaggaagagaactggatcagatcggaagcacctgaaagcttcagaaatgttgcgctacgctctttcagcgatgggccactggacatcatggatgcgcttccggaacacacactctccctgctttctctcttcgaaggtcgatttccctccccgggcattgaatggaataatgttattaagccccaagtagaaaccttcctcacaggtataaggcagacggagcgtaaagttcggctgtatctaaatacccacagctccattgcaatgcttgccggcaaatgtcttggtcacaagtcaggcgtagaaatcgaactggtccagaaagggagaatgggcgactccatctggtctgagaacgaatcgcaggatgaacctgatgcgattatcgaaaccgagactgtcggaaccggaagcgatgtcgctgtagtgctcagcatcgcgagaaatgcgctgccaaaagcgcgcgcatacatactcgaaaatcagcctgacataggacgtatcattcacttaacccccgcaaacgggcacgggcaacgatctgtgaaaaacggttcacatgccgtagcgcttgccgaacaggtgtccgatgtagtcacggatgcagatttaccggttgaggcaagcttgcatattttcagcgctgcgccaaatgccgttaatttttatcttggccagcacacggattttctggggacatgtgtcttttatgagtttgactttcaacgccaacgagatggctcctaccttccttcatttaaggtttaa

SEQ ID NO: 194777 - DNA, 984 bp, Klebsiella oxytoca
atggcccgcatcagaacagttaaacctgaattctggacagatgagaaggtggtggaatgttcaattccagcgcgtctcctgtttatcgggttgttcaacttcgccaacgacatgggatgccttgagcgttcgccaaaacggttgaagatgcagatcttccctgcggacgcgctcgattgcgaaccactaatacaggaactgattactcatggattactcattgagtattcagtgaatgatgtctgctatttacagattaaaggtttccttaagcatcaaaaaataaacaggccttcagcttcaaaaataccccttccgccagaactcactgaggataaggcaggagaggaagaaaagagagtgactaatcaaggagggctcaatgaggactcagtgaatcatcaaggagggctcactgacggaaaaggaagggaagggaagggaaaaggatcaaaccccactctctatgcgcaggagagaaattttccccagcaacctcagtatctgcctggagtggatattccgatcgggaaattcaccatgcacgacctttggctgccgtcacaggactggccgcggctggctgctacctggggtatagcgcttcccgaaccggcatacctgccgacagagctggcagagttcatcgcgtactggaaatccgaggggaaagtgttcactcagattcaatgggagcagaaatttgcccgcagcgtgataagtgccagagccaaatctaaaccacaaccagcaaccggaggtaaagaccatgcaggaattcaaccagttaacaccgcatcccgggcagttcaggaaattcaggcagccagagaacgctgggaaaagcaaaacggacttgttggcggcggatacagcatggcggctatggacagtcatgggggaaatattttcgaaccggtggacccagaagaacggggcggcgccctcggatatgtggattgcccagattggatcgatgagtga

SEQ ID NO: 194778 - DNA, 669 bp, Klebsiella oxytoca
atggcggctgacgccttatccgggctaccgctcgcagacggcgatgaacccgtagcccgggcaaggcgctttgcgccgcccccggggagttcgccacagggcgcattggatatggtttcccggaggcgatgctgcgcatctgtccgggctaccgctcgcagacggcgatggacccgtagcccgggcaaggcgctttgcgccgccccgggggagatcgcaacaggccgcattggatatggctcccggaggcgatgctgcgcatctgtccgggctaccgctcgcagacggcgatggacccgtagcccgggcaaggcgctttgcgccgccccaggggagatcgccacaggccgcattggatatggctcccggaggcgatgctgcgcatctgtccgggctaccgctcgcagacggcgatgggcccgtagcccgggcaaggcgcttgcgccgcccccgggaaaagcgcgcagagggctatttgcgcagcagccgctgcaggcgcgcctgacgccagcgattgatccattcgccaaaaacaaacagacgcaaccctttaaccaccagcagcgctccccagacgatcgccacccatgcggaccagtagctctctgcgccgctcagccagttcagcagcgccagcagaacgcaaacgacgacggccaccgtcaatga

SEQ ID NO: 194779 - DNA, 1482 bp, Klebsiella oxytoca
atgtcacaaactatcgttacaaacgccttttcgccttggcttgcctcgcatctggcagctggtacgccagcacgcccggataaaatgatttttgcatatatcaacggccaaaatgcagccgcggaaatagacccaaatgaaggcatgccatcaaccgaagccattaagtaccaggcgcaaattacgcattacggcgtactatcagaaagagcatttgtcagctcggttattctcgataccacgatcggcgattgggattataactggattggcctggttgatagtgcaacaaacacgatcgttatgattgttcactgtgaggcgcaaagcaaaattaaaacagctggcggtgtgcagggaaatacattaacacgcaatcttgctcttgaattttccggcgccgcatctgcagcacaaataaccgtcaccccggaaacgtggcagattgactatagcgcacgcctgcagagcatggatgaggcgcgcaggctggcgtgcgtcgactattacggccccgcagcgttcgacggcgacggattcgccgtgtcggttgccggcggtgtggccaccgtggcgcccgggcttggctatgtaggcggattgcgagttttactggcgcaggagacaacggtctcggcggcaaatacgaccatttgggtcgatgcggtctggtccggcacgattaccggcgcctggtcgcacacgtttacgattcgtaccggcgccagtctcgaggactacgtcgacacggcgggttatcagcattatgtcgccagaatagccactatcgctggcggcgtagtgactgacaggcgcgaaccgttcccgctgcagcgcatcgagcaggagctcaacgacctggatgtctacgagaagaccgaagccgacgagcggttcctgcaaactaaaaataatctctcagatttagacgacgcgaaaaaagcccgcgagtcgctcgatgtgcacagcaaggacgaagccgacgagcggttcctgcaggctgaaaacaatctttctgatttagatgataagaaagaggctcgtaaaaatctcgggcttggtggtcttgatggtgaaggattccgcgccattattgacgcggttttttgggtgggccggtcggttatttcggatagcgaccccgggacgcgttacacctggcagacgtggcgtgatctgagcgcagattatgacgggcgtgtgttgcgtataagcaataaggagcaggaaacaggcggcagcaactcggtaaaaattgaaggtgataaccttcctccgcactggcatcgctcaggcgacaggtcaccgggtacagtttgggatcctagcgcaacccatggaaccgacaaccagaagagcgggccgctagcccttaccgagggcacctatattgatgcgggtggtaaaacagaatcaacgaataaacccgtaaatgtgacgaacgaatatgtaactgtcagagtatggcgccgcactgcgtag

SEQ ID NO: 194780 - DNA, 207 bp, Klebsiella oxytoca
atgaaaacattcaatcaattaaaaagcctgatcgacttttgccagaccgatgcgtttttcctggagcatctaaaccgactccaggctgctggcgtaatttatattgatgagagcgatattcatgctgacagtaaaatgctaagcgatgatttttatattcggttggcttctgtttatggcattgatgcgtctacgcaggaggtatga

SEQ ID NO: 194781 - DNA, 366 bp, Klebsiella oxytoca
gtgtgttgcgatagcaccggcgacttttttcagctcgcggaaattccgctgccagagaaattcgtcgatataaatattcgcgcaaaaaccctgtgcggtgctcgagtttgtcgacaggaaatgcagctcggcgccgttgctcaaaatgatggggtcgccggtcagctcgaggccgaaaagctgctgcgcaaatttgacgatatagcgccgaaaaatcagcgactgcggccggctggcagacaaaaacgcctgattattgccggtgaggatagcatcctcgagcgcctcaaacgctgcataccaggtggccccaatctggcgcgacttaagccaaatccggttacggtggtgttttgcgtcgcgtag

SEQ ID NO: 194782 - DNA, 663 bp, Klebsiella oxytoca
atgctcgacgaggtccaccattttgaggaccaggtcatttttagatttgacgctgtaatgaatggccacggcctgccggcgggcaaattcctggaccatttcaaacaccggcccgccgatgcccgtcacatccacaccgatgtgtgttatccggtaccgttcaaaatattcccttatccgctcgacctgccatttccagttaaacccgtgccacgtgtcgacgcgcagcacgcggaatggctcaccgtcggcctgcggcggcgccacgatgacaaaacaggctgtatcgccactgcgggcggggtcatagccggcccatacctcgcgctggccaaatggccggattgcgtcggggtcgtgatcctgccatgtgctgacgctggcgaggcagcgctcgacctgggcgaagctgaacacggcgtcgccggcgtcgacaaactcgcacatataaagctgcttgaatgcgctggcgctgttttcctcctggatttcctcgatattgataagcaccagagtcgggtcaccggccgcggctgcggcgatttccatatcccggaccgcctcctcgacggtcgtaataagtcgccagtggttgtcgggacacatgaccccggcctgcatatcggtgaacgatggaaacgccacgttttcgcgtttagctga

SEQ ID NO: 194783 - DNA, 1251 bp, Klebsiella oxytoca
atggttgccaggtataagaagagtcttgaacaattgacgatgatgcttcacattattaagacacaaaaaaaattgtcgacaggagcaatcgtagactttcaactattgcttttaaagaaaattaaagaggcagagaaatcaatcattcgcacaaaaggaataattcaaaatttacgtcttgaaaaagcaaatgatagaccaaccaaagaacggtcaaaagaaataacatctcttataagtaaacttgaagaaaaaatagagaactatagatatatcatctatatatggaaaatgtatggagatagcattgcattccatttttgtgataaatatgcaataaaacacttcctttataatgaaaattatcatgtaaaggaaactgccggattcatttctggaaaagaaggcataaaatccgaaataatgcttctaaaaaaagcagctcaaaaaaatgtgcctgcagtgctttgcgaccttacaaatacgctaaggcatggcgatgtatgcctacttggtcataatgatccctatcctattgaagtgaaaacatcaggcaaactgaataaaagaggggaaaaacaactcagaaatatagatgagctaaggaattttttcataaaagatgaggctgaaaacttccgaggtgtagggcctgtaataagaaacgcacacacaggaaaagaacagtatcacttgcaagctatcaatgattgcataagtaagtcctatgaagaaggcactagccatgtctcaccagagagagggattcactacctagctataacaaaattcaagcaaaaaatttttgaccagatacctggaaagtacattcatatgctcaatttgaacgactacaaaagagaaatgaactggcacccctatacacctttccacctttcgctaaatcccgagcatatatataatttcataaatggaaatttaagcattttggttcttcttgatttgcaagtcataaagagaaggtttaagagaaatggtctatatatcactttcttacaagatgagcattggtatgctcaaatttcagcaacaggaaatatattggatggtgggtttagggtatcaacgcaatcatttttacgggttgcatttgagttccagagcttgacatgggcaataaaacagcacaaaaaacacttaaatctttttatggaaggcacagataaatctggcagaaaaatggaaattccgccggactggatcgcagctacagaccctattccaatgtaa

SEQ ID NO: 194784 - DNA, 303 bp, Klebsiella oxytoca
atgaatgagacgctcggcactgtaatctcggtagcggtggggtttgttctggccctgttggtgattaacgcgctgtttctggtatacgccgcggtgcggcttgcgtggtatcactaccggctcaaccagctgcgccgggctggctatatgctgtttatgcgccagccgccgctattcgaggttttgctcaggttccgcacctgggatatttaccgcctggtcgacttcccgccgcattatgttgagtacgggcggcgctgtggcaaaaacaccgccgcggagcactggcgcaatggccggtaa

SEQ ID NO: 194785 - DNA, 492 bp, Klebsiella oxytoca
atggctgctctggctgggtctctgaggggaggggtcagtatgaacaacccggcattaatcgaagtatcgccaggcgtatggcgttgtggccaattcacgataatgaaggtccccgctagatctagcggcagacgtctgaatctggcttgttatgaagtttgtctcggagagaaccggcaatattttggaaattttcgggcgctggccgaggcttgcgattacatcaattcgctttatggcctgcagaaagaggaaccggaaacctcgagagcgtttattgctgcggcaaacgctgttttgtatatgtatgcaaagcggcagagcttacgtaatgcgccggcaaattctcccgcagaaattaattgcggatataaccagctttttagcctggcagatgttgccgcgtatgccggagcgcgcgagtcggagataattcgtgcggcggcggaatattggaaacgctccgaagtggcaccggatttttttaattga

SEQ ID NO: 194786 - DNA, 945 bp, Klebsiella oxytoca
atgtatttcattcagggaaaaaactattcctcgctcacgccagaagaggccatcgccatgttgacgagcgggctggatagcgcgctgggccaaccgccgcgtccggaaaccgtgcttgcctgcgccgggcgttttatcgaacagctaaaagaccacgctttccttccccaactgggcccggcttatcgggaagaggtgagaaagttttgccaacctgacgcgctgcgccaaaagctcgagcatgagctgggggataaccccttttccgtgcgccgcattaactaccgtgaaccgcagtttgaaggctggcgtcctttgggcgtcgtggtgcatgtcaccccagccaatgcggaactgcttcccttcttcgcaataatagagagcctgctggtcgggaatattaactggctgcgcccaagcgccagcgaacaaggaatgacaatcgatctgctacgggcgtttatccgctgcgatttaacggaccagctggctaacttcatcgccgtggttcccgtcgaaaccacgcgcctttccctgctgcttacccacgccgatggtatatcggcctggggtggcgataccgccctcgaggcgattcgtcaacagctccctggcgggtgtcgctggatcccctggggacataaaatcagctttgcctggctacaaccggatgccgttaatgaagaaagccttctcgcgctggcggatgacgtttgctgttttgaccagcaggcctgttccagcccgcaaatcgtttttgttgatagcgatgattcggcggtattgcaggatattggcgaaagactggcggaggccatgcggcggcggcggatatcacccgcgccgtcgccttcgcgcagctggacgccgtatttgccggggctgacaacgctctgctggcaggagacggctggcgcatcattcagcaacacacctcggccataa

SEQ ID NO: 194787 - DNA, 1335 bp, Klebsiella oxytoca
atgacaacagcaaagatgatgggtcgccttgatccgcaatccacccaaacggaagaagtggccgtaagcccaccgggtctcgaacagcttgtcgagagggttcgctgccgctcgcctttctatgccgaacactatcgccatctcgccacccgcggctggcagctgaaggacctgccgcttattaatcccgaacgctactgggaggggagccagggcctgaaaaactggcccgtcctcaccgggccggtggaggacggtattgtctttaagaccggcggtaccaccggcggcggcaagctgtcggttttttcccgccaggagtggcgtgcgttcgtcaccagttttggccgcagcctctccagccagctcaagccaggcgcgcgcgtggcaaatttatttttcgccggtgatttgtacgcgagcttcttatttatccacggcgcgctttcgcacatgtcgataccggtatgcgagtaccctttcaccggatcgcttgaaccgcagaccctcaccgaacagatcgtccagcacgatatcaacgtactggtgggcgtcccggcgatgctgctgcaatatgcggcagagctcgctggaaaaaaccgccgtctgcccggtatcgagaccatcctttacggcagcgagagtctttttactgaacagctacagctgctgaaatccgcctttcccaacgcccgtattgcttctatcggctgcgcctgcgtggatgccgggcttatcggactcagcacgccggattgcctggcggacgagcatcgggtctttgaacccgaaactatcgtggaaattattgatgaagcgacgggcgagccgatcgatgaaatcaatcgttccggaatgctggtggtcaccagccttacgcgcacgctgatgccgctgattcgctatccggtaggcgatttggccgcctggcgtgaacctccgggaagcaaacatcgcaagtttattttgcagggacgcagtagcctcgggcaccgcttgcgggtaggttacgcctcgctgtttcctgatgaaatagcggcccttattacggaagagatagggcatcagcagtggcagctgatgctggagcacgccgataaccgggatcgtttgagcttacgtatcgccttttccggtacccggcagcaggccgacaggctctgcggtcaattactcgccagggatcacgctctcgcagaactacaggctgccggccagctgtgcgttcaggttcactggtgcagccaggcggaacttatccgcaatacccgaacaggtaagctgcagcgggtgatcgacaaacgcgcctacctcgcgcaggaggcggtgaaatga

SEQ ID NO: 194788 - DNA, 387 bp, Klebsiella oxytoca
atgaatagattcatgatttctgtgttttttatttctgctttccttatttctggctgttcaatatcaggcaaccagcatctaaaaaaagaaacatcacaaagtctgcagtcgaaaattatcaaaaataaaacgacgaaatcagaaatcattaccgcattaggtgagcccgaaaccagaactacacttgatagtggcaatgaagaatggacttattccatggataacaatcagtttgatgccaccacattcattccagtggtcgggttgctaacaggcggttcgcagacgcaggccaaaacgctggaaatcgaatttaaaggcgaaacggtcagcaagtggacgttctctgaaaacaacagcaagatgaaaaccggtcttattcaataa

SEQ ID NO: 194789 - DNA, 564 bp, Klebsiella oxytoca; identical to SEQ ID NO: 121347

SEQ ID NO: 194790 - DNA, 276 bp, Klebsiella oxytoca; identical to SEQ ID NO: 121348

SEQ ID NO: 194791 - DNA, 276 bp, Klebsiella oxytoca
atgaataattcaatcagagtaccggaagataaagattttgtatgtgcatttgtaacttcaccgaatagcttgtatgaggctcttgaagcctattgtaattatgtagatccagtcgaagagatagcgtttgagcacgtccttctttatgtgttgtgttctatactggtcgagggtggtacagatgttaccattaatgatgagttacaaatgtgtattgagcacattgtcaatgaaaaaaatattatcagaaataataatgcagataaaaagatgtaa

SEQ ID NO: 194792 - DNA, 207 bp, Klebsiella oxytoca; identical to SEQ ID NO: 121350

SEQ ID NO: 194793 - DNA, 993 bp, Klebsiella oxytoca
atggacttattaaagtacttatcagaaaagggattaaccgaaagggctctcgacttcgtcacatcacaattattcttcaatgcagagtcgcctgataacctaaagtacgctttaaaagcgggttatgatattaatactgttgatagtagcggcaacaatgctatttttggctgcagaacactggaagcactggattttctacttagcaatgaagtcaatatacaccatatcaacaaggagggacaaaatgcgctctttcatcaaaaaaatccagaaattctgaagaagctgattgaactaggtttagacacctcgcatacagatactaagggctatacctgcatttttgcacattacagggaccctgaaggactacaagtattacttaatgcaggttgttatataaatcacgtcgataacaaagaaagaaatattctcttcctgcccctctccccggaagttttatccatagcaatagattccggatgcaatgtcaatcatattaatcatgcaggaaaaggttttattgaagaggaatatgacgatgagttgcataatatcattctccgccatattgataaatttgaaagaagaacgttgcatgtcgatttttgcaataccaactcagtattatttttatatgaactctctgaatatggattcaaaatagagctcaataaagaccgtttcgtaattaacagttacattagcgattacaaagatattttaagcactcttgattgtatcagtgacattcaagatgttaacttctataattatgacggtgatcctctttacaaagatatcgataagcgaattgtaaagtggatgataagaaataattttctcattgatcttacaaaaatttctgatgataaaaatcatgatcatatattaaaatacaaaaccagttacgagcaaaaagaaatatccagaaatttaaaacatgctaaaaataaaattgcaaatgtcaaaaacggtggaaggctgtga

SEQ ID NO: 194794 - DNA, 180 bp, Klebsiella oxytoca
atgtactacttttatgatatcgtgggtaaaaaagtggctaagaagcatccccagaaatacagatgcaccttggcaacaattctcaggaaacatgccgaagaatggcacacccgactcatcaaaataatcgaaattttcttcaaagacactccgcaggtctttggcaagctttgtaactaa

SEQ ID NO: 194795 - DNA, 1224 bp, Klebsiella oxytoca
atgagccgaggcattgctgaatttcaaccggataggttagtgcaagtactagccgcccggcggctgtcccaaactcaattagctacgatggttggcgtatcgccagcaaccatcagtaaatggcgttctggccagcaggctccagaatccgaagccttagaacgcttggctacagtcgtaaatgttactcctgaatggtttacgcgccctctgttgccgggtatgtcaaagcccctgttcagaagtaatgcatcagctcatgtagcagcacgagcaatgttagaaactcgaatccattgggctaatgagttggttactaagctgactgagtttgtagatctgccggagctaaaattaccgcaccgtagttttacaaacatcgatgaaattagtgatgcagatatcgaagatgccgctagtgagtgccgtgccctttggaatcttggtacaaaggaaataccggaccttactttagccgcagagagtaacggtattatcgttgtcagagaggaaacaggtgtcgcgcagattgaagggctttccgcctggagtgagactctaagtgttccttttgttctcctctcttcggataaaggtaatgcttttcgcagcagatttgaccttgctcacgaaattggacatctaatccttcaccgctacgttggcaacgagctcgaagctgaacgttataagctgaaggaaagccaggctcataaatttgcgggggcgctgctgcttcctgccgatacgtttgccgaagaaattagaaccccggtcacattagatagcttgcttttaattaaacaacgctacggtatttctgtcgcggcaagcatcatgcgtttacatgtgctgaatattattactgaagaagagaaacaaaatctttataaacgccgttcagcacgttggggagtgaaatcagagccgggagatgattatcgtgagcctgaaaaaccacgtttgttgaaacgtactattgaattgttggcgtcttctggaattatttcagttgaacggcttgctgcctttgcgggattgtctgctatcgatgtcgaaatgatggttggtttaccagagggctatctgaccggcaagaaggctgctgttgtgcatctggcaagattaaaatctatgctggccgagcggcgtgaagagcaggctaacgagcataaaggagctttggtacaatttacgagaccacctaagcgctctaattcttaa

SEQ ID NO: 194796 - DNA, 642 bp, Klebsiella oxytoca
gtgaaaaaatcaaaagtggcagatctcattgttcagcatgttcaaaaacaactcttcatggccctttctgacgcgatttacgcggcatcaaagcgttcttacgattatgcgcaaaagaagaagctagaccacagagcgaccgcgcttggttatgatcgtcatttaaacctgaatgaaactatttatgaggtgtttgaggccaacggttgtaatcccggcaagctgcgtggtaaccgtattgtagaaggccatagcggtattttcacgattgttcgtgaaagctacaatgataaccagtggaagagactatttcgcagcaaacgtaagcaagagctcattgccgaaaacgtttctgtggaaaaagtggtgcaaccggatttattctccgatggttctgatgtaccgaaagctacactgttcgtagtatgccgtttttccggttcattgcagaatcaacccgaagccccgatgtctatagagcttgtcgttccaagttctgacgggaagagctgggttttccatgagccacttgaactttttttaacccgatatgatgtagttccattccaagaagataatgcattctctgcactcaaaaagagctttatcaaaaaagatggaaccgaggaagatgatgtatga

SEQ ID NO: 194797 - DNA, 177 bp, Klebsiella oxytoca
atgagcgaaatccagaagaagaaacccgccggaacattcgtaaaactgcctgatgaagtgtttagcactttgttcaaagaggcgcgagcgagaggcgtaacagtgcaggagatgttaattgacgctgcaaccacactttccacatcaattaagaacggagaacgttctaccaaataa

SEQ ID NO: 194798 - DNA, 624 bp, Klebsiella oxytoca
atgatgatctcatatcaggaacttgttcgcaccttccttagtcctgcaacagcaacacgaattgttgcaaggctacgaaaagtaggattgattgccagcgttaagccaaagcgatcaaaccagtggacaataaccgacattacaccggaaaacttcctctttgagcgtgacgctaacgccaccaaacgcaagaccgcgcccgaatgggtggattgtctaaaacatccagtgtttggcaacgccaaagaagacgtagcgccagaggtacaatgcgaagaggcgaaagccgatccgatgtgtgaccttgacgaagcaccggaagaagaagtgccaacgccggaaaagttgaagccgacacctaagcccacgaagaaaccagcgccaaagaaagcaccagccatacagcaagccgtttccccattcgagtttaaaacgccacgagatgaaaaccgggattggtggtatttggaacgctacaacgatgcagatcagtttactggatttaatgactttgatttgccttatctggcaatgtttgagagtcaggggaagttaataaatcaacattcaatccagcaccttaaaattaaacgcgaagcatacggacgatcacaacaaacttag

SEQ ID NO: 194799 - DNA, 249 bp, Klebsiella oxytoca
atgaaaagccagaatgccccaacaatgccagagcggcgcaagctattagtcgccggggccggtattgccgccgcctcgctgattcctcacgtatcagcggcgagccaaacctctcaggtcgattcgtccagacaacccagccaacgtccttcaactcctggcaagcgtaaactcgggaagctggaagtttctgccatcggtctgggcgtgcagaacatgagtcgtaaatacgacacctccgttccctga

SEQ ID NO: 194800 - DNA, 1002 bp, Klebsiella oxytoca
atgattgatttaactttgccactaaccgacatccatcgccaccttgatggtaatatccgggcccaaaccattctcgatcttggccgccagtacaacctcgcccttccggcagacaccctcgacaccttacgtcctcatgtacaggtcaccagcaatgagcctgacctggtcagcttcctcgctaagctggactggggcgtaaaggtgctggcctcgctggaagcctgccgccgcgtcgcttatgaaaacctcgaagatgccgctcgcaacggcctgcactacgttgaactgcgtttctctccgcgctatatggcgatgacccaccagctgccggtcgcgggcgtggtcgaagcggtgatcgccggcgttaaagaaggcagccgcgactttaacgttgaggcccgcctgatcggcattctgagccgcacctttggcgaagcggcctgcgaagaggagcttgcggccctgctcgcccatcgcgatggcatcaccgccctcgacctcgccggagatgagctcggcttcccgggaaatctgtttatggatcacttcagccgcgcgcgcgatgcgggctggcgcatcaccgtacatgcgggcgaagccgctggcccggaaagcatctggcaggcgattcgcgaactgggtgccgagcgtatcggccacggcgtgaaggcggtgcaggatccggcgctgatggattatctcgccgcgcagcgaatcgggattgagtcctgcctgacctctaatattcagaccagcaccgtgccatccctggccgagcatccgctgaaaacattccttgaacacggcgtgctggcctgcatcaataccgacgaccctgccgttcagggcgtcgatattatccacgaatacaccgtcgccgccccggctgccggtttaagccgcgaggaaattcgccaggcgcagagaaacggtctggagctcgcctttttaagcgcccaggaaaaagcggcgctgatccagcgcgtgcagcaggcttga

SEQ ID NO: 194801 - DNA, 1278 bp, Klebsiella oxytoca
atgattactgaacactcatccctgtttataaactggctaaaaaaagaagtggctccggcattaggctgtacggaacccgttgctatttcttttaccgcagcttacgcagcgaaacatttagatacggcttgtcaaaatattagcggttttatttctgcgaacctgtacaagaatgcgatgggcgtaactattccgggcacttccgtcagcggggtggcgctcgcagccgcgatcggcgcatttggtggcgatgcggataaaggtttaaaaacgctggagggaattaccgaacggcatgttgaattagcccagaagttaattgccgctggccaggtcaatattagcgtgcaagacacccctgattttattcatctggatctgacgctaacgggcggcgaaaagagctgccgcgtggtggtcaaaggcacgcataccaatatcgttgagctgtatattaatggcgaagcgcaggtgctggcggacaaacagagtacggtaacgcagcaggaaacattagcaaccttttcgcttgccgaggcctttgattttattagcgaggtcgaattcgccgacatcgcatttattctcgaagccgcccggctcaattcggctctggcggaagaaggtaaaagcaaaaaatacggcttgaacatcaacggcaccttctctgatgcggtaaaaaatggcctgctcagcaacgacctgctgagtaaagtcatcatcaataccgtcgccgcatccgacgcgcgaatgggcggagcccccgtcgtcgcgatgtcaaactttggttccggtaaccagggtatcgccgccaccatgccggtagtgacggtcgcggagcatcttaacgccgatgaagagaccctcgcgcgggcgctggcgctctcccacctgaccgccatatcgatccactcccgctatacgcgtctgtccgcgctatgcgcggcgtccacggcagcgatgggcgctgcggccggcatggcgtggttatttacccgtgacctgcaaacaattaataccgctattattaatatgatcagcgatattaccggcatgatttgcgatggcgcctctaatagctgcgcaatgaaagtgtcgtccgtggtttccagcgcctttaaggccgtactgatggcgatgcaaaatagctgcgctggctctaatgacggcattgtatgcgctgacgttgagcagactattaataatctctgccgtctggtaattaagcctatggcctataccgataaagaaatcatcaacattatggtagcaaagtaa

SEQ ID NO: 194802 - DNA, 828 bp, Klebsiella oxytoca; identical to SEQ ID NO: 28366

SEQ ID NO: 194803 - DNA, 828 bp, Klebsiella oxytoca; identical to SEQ ID NO: 28366

SEQ ID NO: 194804 - DNA, 2805 bp, Klebsiella oxytoca; identical to SEQ ID NO: 101631

SEQ ID NO: 194805 - DNA, 891 bp, Klebsiella oxytoca; identical to SEQ ID NO: 194756

SEQ ID NO: 194806 - DNA, 624 bp, Klebsiella oxytoca; identical to SEQ ID NO: 102411

SEQ ID NO: 194807 - DNA, 396 bp, Klebsiella oxytoca
gtggcgcttatctgcgaacttgatgagcaatggagtttcgttggcagtaaagcccggcaacactggctctggtacgcgtataacaccaaaacagggggtgtactggcctacacttttggtccccgtaccgatgaaacctgccgggaactactggcactgcttacgccattcaacatcggcatgatcaccagcgacgactggggcagctatggccgggaggtgccgaaggataagcatctgaccggaaaaatattcacccaacggattgagcgcaataacctgacgctgcgcacccgcattaagcgcttggctcgtaaaacaatctgcttctcgcgttcagtagagaaccacgaaaaagtcatcgggacgtttattgaaaaacacatgttctactaa

SEQ ID NO: 194808 - DNA, 273 bp, Klebsiella oxytoca; identical to SEQ ID NO: 98265

SEQ ID NO: 194809 - DNA, 2037 bp, Klebsiella oxytoca
atgctagactctgatacgataatagagcaggagctcataaaaaatattagtaatggactacaccagtcaaccaagttagaaactgatgataaagttctagctagggtcacggatggaatatataggcttccaggttcggcaataagagagttgatctcgaatgcttatgatgctgatgcagaaaatgtttatgttgaaactgatgttccacgttttaattctatgactatcagagatgatgggtgtggaatgtcagttgatacattagttaatatgttgcgacatattggtgggagtgcaaaaaggacagataaaggtatttctcttaaggtaactgatgatgtggatacatctttaagtgctataagaaaaagaaagctaattgggaaaataggtattggtttatttagtgttgcccagctaaccagagattttgaaattatcaccaagcagaagggtaatgatttctatcttagggctaaagtccagctatttaactattctgatgatattccaagtaatgaaaaaacacatggagaaagagggaaaagttttcagaccggtaatgtcgacatatggactgagaaaactgataatatcgatgctcatggtacggacattttacttcataacataaaaaaaagtgcacaggatcaattaagaagtgtagatgtttgggggcaaactgaaaatgaaacgatgcccgatgatcatcaagaagatactctcgattcatcaaaagcaatcttacctgactttcatgtcggatatctttctaatgataaagatggtacttcaacgtatactagtaattcagatagaaaaccatcactcccatgggatgaatcaacaagtccagatgtaaaatttttgaatctttatgaggggattttaagtaaaactaaaaatgcagtcagtccaaaattaaatcttattttagataactatctaaacatgatatggacactcggtttgtctattccgctcaaatatattgaaaaacatccatttgagttaaataaatatgagattcctgacatttatgcattaagcaataaaagtaaaggacaagctgaaaatatattcgaagaaatagattcggaaacgtctattggtgatgcgttagggtttgttgcgcataaaagaaaatatgattttaatgtttttattgatgggataaaattatttaggccgataaaatatactgatctcccacaatcaaaagctatggtgaaaaaaccaatcatgtttgttggtaaatataagccaaatttgagtggggttgaggttacagattccgggggagaattggagtttgaagcttatgttttttggactccaaaagttagccctaaagatcacaatggctctcttataagaattcacgatgcgtcagggattctttttgatgaaacttttatgaagcatcaggttgcagaacatacaattaaaagccaattaactgctgaaatatttgttagtcgaggattggattctgctttgaatattgatagggaatcttttaatattgcccacccccattatcaaatagtaatgagatggcttcatagtgctataaggcaagtggtcaacaaatataaacagattaaaagagatgttcaagtaggtataaatactgataatgaagatgctttcactttatcattaaataaaatcgttgaacgttcttataagagcaatctcaaagaccctcatgaaagatccaatctcgttctccttgatgataatattgtaattaataggagtgatgatacaaaaatatcgaaaaaagaaaatgatgagcagattgttaagtcaatagatgaggtctatgatagttttatcgtaacaaaatctaagttagatgaagtcttacccccgataaaaagacaaaaaaataaacataaaaaccttatttcaaggtcgcaggcaattttgcaaattcttgaatcttataatttgctagagaacctgactgttgaaaaacaagagcttttagttttggatcttatagaagtgttgagtgtggagatataa

SEQ ID NO: 194810 - DNA, 837 bp, Klebsiella oxytoca
atgcaacacgcaccgcttgccctgataaaggctcgcatcatacagacggcgctggatagctatctgaatttgcttagcataagcgcttatttctgcgccgttatcaccgccgttagcaccagatgttcctgtgtccttcgaaggctgattattccctttcgctccaccacccgttttcggcgcattcttaccggagctcagatcgccgagcaggtcgtcaacgccgcttgcctctttggccgcagcggctttcttcgcggctgctgccttagcggcggcggctttcgccgctttgtctgctgcggccttctctgctgctgcagctttggctgccgcggctttctcggcggcggctttttccgctgcggcggctttctcggctgccgctttctcagcagcagctttctgcgcggcggctttttctgccgctttttccgcggcagctttttcagcagcggcctgtttcgccgcttcctgctgcgcttttttctctgcctgctgctgcgctttcttctcggcgtcctgctgagctttcttcgccgcatcggcttcggctttcttctgcgcgtccgcggccgctttcgccgcagcggcttcggctgctttcgcctgcgcatcggccttcgcttttgcatcagcggcggctttggcggcagcttcctgcgcctctttcgcctgtgcgtccgctttggcttttgccgctgcggcggctttcgccgcggcttcttccgcctgcttctgctgttctttcgcctctttagccgcttcctgcgcctgcagacgatcctgttccagctgtttcagccgttcctgctcggcggcctgtttttcacgtag

SEQ ID NO: 194811 - DNA, 1719 bp, Klebsiella oxytoca
atggctacattacgcgagctgataatcaaagtttcagcaaactcgcaatcattccagacagaaatatcacgcgcttcccggctgggatcagactactacaaaacgatgcaacgaggtgggcggcaggctgcgacttcggcgcgtgagacgaggcaggctctggccgaagtctccgctcagttgtcggaaacgaagaatgccgcgatgggaatggctggcgcgtttgccggggcattcgctacagggcatctgatatcgcttgctgatgaatggagttccgtcaatgcccgcctgaaacaggcatccacatcgaccgatgatttcactcactcacaacgtttgctgatggatatcagccagaaaaccggtacagctttcagcgataacgcaggtttatttgcccgttcggcggcatccatgcgtgagtttggctattcctctggcgatgtactgaaagtcaccgaggctatcagcaccggccttaaattatccggggccagcacgtcagaggccagttcggttatcacgcagttcagccaggcgcttgcgcagggggtattgcgcggggaggaattcaactccgttaacgaaaacggtgatcggatcatccgtgccttggccgcaggtatgggcgttgcccgcaaagacctcaaggcgatggctgataatggactactgacaatagataaagtggttccggctattaccgctcagttacgggtgatgcagactgaatttgattcaatgcccaaaacggtatcagcctcgactcaaaaggttgaaaatgcctttatggcctgggtgggcggcacaaatgatgcatacggtgcctccgccgcccttgctggtgggcttgattcactggctgagaacattgataccgtagcaatggcagcgggagcgttaacggctgtgggcgtgacccgttttctgggtaactggacgctacaactaaaatcacagaccgaagaacttgtgagggccagaggggcggagattgccagcaccgctgctaaaatcgaaggggcgaatgcttctcttgttcagattgaagcggaaaaatcggtgcttctgtctaatcagcgctcactcgtggctcaacttgaactggcgcagactgaaaaacaacgcgcatcaatcaggacgctgcttgccagaaactcaatggagatggtcaaagcgaataaagcggaaaccgcaacggtcaatgagctgtcaatagccaatcagcggcttaatgcgctcacctcagtaacgagaaccgcatgggctggcgtatcctccctctttggcggtattccggggattctgatgctgggtgccggtgcatggtatacgtggtatcagaatcaggagcaggctcgacagtcggctatacagtatgcctccacccttgatgaggtggtggaaaaagcgaaagccatgagcgaaattcaaatcagaggctctattgccgattctggtgaatccattgacgcgctcaaagataagctggaggacttgagggacgcacaggcagaagccgcccggaaagttcaggaatacacaattctggcccatcaaatgggggtagagaacgatcagaataatggtcacgtaagaaatgcagctaaatatcagcgtgaatacaataaattatcgcgtgatatagctgatactacaattcagctaaggaaggtgcgaataagcaggtcatttcttcccaagctgactcgctga

SEQ ID NO: 194812 - DNA, 537 bp, Klebsiella oxytoca; identical to SEQ ID NO: 194761

SEQ ID NO: 194813 - DNA, 1020 bp, Klebsiella oxytoca
atgaaaagagaaatgatactagggttatctgttttcctgtatctaggatatatccccacaatacttgcatgcgtgatgaccagtggtaaaacaattgaatatagcgccaatctgggtaataaatattttacagtagatgtgcttaatcgccagcctggagatttattattcacctatggcggcatgactctgaccaataatacggaatggaatataacttgtagtggttcagaaccgagtggctacaatagtattggtggcgctcccgttggaccggcttatcaaagcaagccaggatatgtttacagtatcgatcgtctaccggggattggttacagttttcaaatgggtgaacaggatggtattgatttcgattccctttttatgccttatccaacagcacgccccttttctgggggcaggtattttaattcagaaagcaaaaaacccactatttatttttggcgcattcctgataccagcggtttaccacctccaggccagtattgcctgaatgattatctcggtgatatttatcttgagggggtcaacgctttaaagtttagtgtaaaaggattgtgcattacggtaaagtccccaacctgcaaaatcagtaacgctgatattaaagttaatttgggaagacacaataggtccgtatttatggggcctgggagtaccaccaatatggtaccgttcaatatagatcttaccacctgcgagaatgttggtaacatctttatgcaatttaatgcaacggctgatggtaatcacgcggcaaacggtattataaaaatagatgatagtggtgatgatagttccgcgaccggggttggagtccaggtattaaaaaatagcgtcccgatagtgttgaatgaacctgcgacaatctggtcgggaagtaaaggtagtgagtcggcctacagtttccagtatcaggcaagatacattcagactgaatcgacggttaccgccggtcaggcgaatgcgagtgcgacgtttgtggttacctataattaa

SEQ ID NO: 194814 - DNA, 2394 bp, Klebsiella oxytoca
atgaaattcatggagatcaatgttgggttaataataataataccatggggtgttgcatggtcagaagacgcatttaatttcaatagtgcgcatttgcataacgcgacacatatcgatctccagaaatttaagtatggtaatccgatgaatgtcgggaagtatcgcagtaagctttacttaaatggttcgtatgcgagcgaagttgaattcgagctacagaaggtgggagaaaaaattgagccctgcataacaccagtattatttagagtgatgaggcttaaagataaaacgtggccagaaaaggcttcatgtctccagttatcgcagatcaatgctggcatttcatggcattatgacgtcggggagaatgcgttaaatttaaccatcccgcaggcgttacaaaaaccgaagtatcgaggcgagattaatcctgagagtatcgatgttggtgttccagcagcagtattacgttatcaggcgaatagttatcagagcatcaatcatggcgatagtcataattacagttatgtcgggcttgatggtagttttcgcgcttacggctggcgcttttaccaccagtctagttatcaggcaaatgataacgatactcagtgggataatatttcgacatacgccgagaaaagccttttcgatttgagctcaacccttaggctcgggcagggatggacagatggcaccttcttcgacagcgtcagcttcgtgggcgccagggttgcgactgacaaacggatgatgccagggtcacgacgtggttttgcacccacggtaacgggaatcgccaggacaaacgcgcgcgtaaccgtcactcaaaatggttccttactctatgaggccagcgttccgccaggtaaattctcctttgcggacctttatccaacgaattcaggtggcgacctgatcgtgacgattcatgaggccgatggcagccaggacacgtttactgtgccttatgcttccatacctggcctggttcgtaaggaggcgctgtattacgatttgtcgatgggatatctggatgacagctatatctcaaaccggccgggattcggagaattaactctgcagtatggttttaatgactatattagcggctatatgggggtaaatggaaccgatgggtattactccactcttgtcggtagtgcattaaatacttactggggagcactggctgtcgatgtttcgcgttcctcctggaaaactgttgaaaatgactggctggatgggtatcgctggcgcgtttcggcaacaaaatcattgaccagtgatacccgagttaccttatcaatgagtcacagtaacgatgcaaggtatatttcaattcgtgatgcggcatcggctaatgaccatgacaactatacttaccgcgaaatgacaaagtatacagccaatctatcgcaacaattcggcggcggtagcttgtcattttatggcatatggagtgaaaactggaagcatggtacctatcactcctatcagctaggatattcgaataattataaacgcctgggctactatatctatgcacagaaaagtcaggatgctaaccataaaaataaccaaatagtcggaatttctttctctatacctattagcggtaatggcaatattcatactcgtttcaattatgacaagaataacggcaaccagttacaagcgacttatactgggagtcggggtgaaaagaacgaactcagctatggcctgacgacaagttacgatatgccaaaggaagggggccatgagagttccattggagcaaacggtagttaccgaactcattatgcctatctgaatgcgagcgccagcgccggcaagaatcaacagcagtactcccttgggacttccggcgcgttagttgcgcatgaaggaggggtgattgcgacacctgatattggtgaaacattcgccattgtacaggcccctaaggctgccggtgcaacggtggccaaccgtattggacgtccagtggataatcgtggttacaccattatcccttatctgaacccatttacagaaaactggctggatctcgatccgcaaggaattagcgatcaagttgagatcgtatcaagtagcacggtcgtcgttcctgattcaggcgcggccgtgaaggtaaaatttgcgacccgtactggctacccatggtttgccaatgtcacgctcagtgatggtaatacgccgccattgggtgctgaggtctttgacagcaaagaaatagccatcggggccgtgggacaaggagggctgctatatgccagagtcccggacatcaagggggttttacatgtggtctggggcgacaatagtgttcagcgttgccagcttgcgtattccgttaatcaacagaccagccgaaacctttgcaaatag

SEQ ID NO: 194815 - DNA, 693 bp, Klebsiella oxytoca
atgactcgttacttttttacgtttcttttattcgtatatatacctttcgcgaatgcaaatattgtcattgatgggaccagagtgatctttccatctgaccggaaagaggtatcagtcagagtcactaattcaggggatatgccgtcactgacgcaagcatgggttgatggtggcacaatacaaaataatacaggcaaagacatggcgccttttgtggttctgccgccgattattcgtgttgaaccaggaaaaggacagacctatcgtctggtttttagcggcgcctcgcttccacaagatcgtgagtcattgttctggtttaacatgttagatataccgccagagcctaaaaacagtcaaggtagcaactatttacagttatcgattcgttcacgtattaagttattttatcgtccgataacattaaagggaaatgtcagcgaggctgccaaatctttaacctgggaatttcacaatgataataacacactctttgtgaataacccatctccatggtacatcaccattgatagcatcacgattaatgggaataaacaacctgctggtatggtggcgccattttcaacgatgagcataaataataaagagcatacactgaaagccatgccaggtaagttcagcttcacaaccatcaatgattatggtgctattgtgactcataattatccttag

SEQ ID NO: 194816 - DNA, 570 bp, Klebsiella oxytoca
atgaacatgttcatcaaaggaatggcgtcagcagcggcagtaatgatctttgccccaacagtggtgctggctgctgatggaaaagtgaccttcaatggtgaaattattactaatacctgtactgtcatcagcggtgataaagataaaattgtcacactacccactgttcaggtgtctgcattgtctgccgcgaatcaaactgcggggacaacacctttcactattggtcttgaaaattgtgcaagtgcttcagatgtttcggtctattttgaaccgaatgaatatgtctcaacggaggggcgactaaaaaataccattcctgctggtggctctgataatggcgcgaataatgttgatatcgagctactgaataataatcatggtgtaattgaccttgcaaaccaaaccattgatccaacgaccggaaaagtcacgggtggtaactcaacggtcgtgacgcctgtcgatggttctgcgacactgcctttctatgcacgttactttgcgacaaatgccgctgaggctgggaaagtgagttcctacgtgaacttcactatcgtttatccgtaa

SEQ ID NO: 194817 - DNA, 210 bp, Klebsiella oxytoca
atgacggatggctggccgctgtatgaatcacgcctgaagggaaagctgcacgttatcagcaagcgttacactcagcgcattgagcgacataacctgaatctgaggcagcacctggcacggctgggacggaagtcactgtcgttctcaaaatcggtggagctgcatgacaaggtcatcgggcattatctgaacataaaacactatcagtaa

SEQ ID NO: 194818 - DNA, 276 bp, Klebsiella oxytoca; identical to SEQ ID NO: 182616

SEQ ID NO: 194819 - DNA, 213 bp, Klebsiella oxytoca
atgattgatagtcccatttctcagaacaaccagacgaactggtatatcggcattgtttactgtggcgaagccacgaacttcgaagttgtttacagttccagtgacactgactttctgaccttttttgtaagtcagaacagcatcattaaggccagaatagtaatcaatccagaccataccaccacagtagctcatatcggctgttttgaatag

SEQ ID NO: 194820 - DNA, 294 bp, Klebsiella oxytoca
gtggcgcacgtattcggtgaacgcacgctggccacgctggaacgtcttccaggcctgctgtcggcctttgaggtcgtggtatggatgacggatggctggccgctgtatgaatcacgcctgaagggaaagctgcacgttatcagcaagcgttacactcagcgcattgagcgacataacctgaatctgagacaacatctggcaaggctgggacggaagtcattgccgttctcaaaatcggtggagctgcatgacaaagtcatcgggcattatctgaacataaaacactatcagtaa

SEQ ID NO: 194821 - DNA, 372 bp, Klebsiella oxytoca
atgttggtgaccatgtcagataaagagatccaccgtttaccggtgatacaggcagtttgtgaaaagcgtctgcgccgtcgtgatgcagcatcacagcttggcatttcagaacgtcaggcgcaacggcttattaatcgttaccgggtttcaggtgctgaaggacttgtcagccgcaaacgcggtaaacccagcaaccgtcggctgaccgaatctctcaaaatgcgtgtactcacgctgatacgtgaaaactacagtgactttggacccacactggccgcagaaaagctcagagagcgccataatatccggctttcaatcgagaccgtccgcaactggatgacggctttgttgaataaatcagatttcgggtaa

SEQ ID NO: 194822 - DNA, 669 bp, Klebsiella oxytoca
atgcatccacccagcccgacagcagtgaacggctcagttccacgccctggcgaccgtatatttcagactgacgatacagcggtgtgtgctctgcatactttgaggtcagcacgcgggccatcagccccggtccggcgataccccgctcaatggggcgcgaaggcgcgggggcctgcacgatggcatcacattttgtgcaggcatgtttttcccgtacggtccggatcacccggaaggcgctgcgcatcagctccagctgttcagcggcatcctcacccaggtaactcagcgcaccaccacactccgggcagcaggaacccgctggccgcaggcgtttttcatcgcgggggagtgattcggggaacggtttgcgggtgcgggtctgacgcagagtgcgctgtactgccgggtcatccacccgaccggtcagcgtatcgctctctttctgaagccggttcagatcggcttccatttgtgcgatacggcgggagactttttcagaacggctgccgaagttcatccggcgaagtttatccagctgcgcctgcagatggtctatttcgcgctcccggtctgccagcttttccagcagggcacggttcagcgcttcctgttcggcaaggcgctgtttcagcagaaggatgtcgtcagaagagatgtcattcataa

SEQ ID NO: 194823 - DNA, 240 bp, Klebsiella oxytoca
atgattcgacagtctgacatcgccgcggcgttccgcgagtcggttttgcgcagctccaaggggttccagtaccttcacacccgcgactttgttaccgcgctgcgtcggcgcggcatccacttttccgaggtggaggcgaactcctggatctcgcgggaacaaacgtatttcgtcgataagacgcctgatcatagcgaaaaccggctgtggatgatggccaatatggggagggtgatctaa

SEQ ID NO: 194824 - DNA, 288 bp, Klebsiella oxytoca
atggcctttaaaatatcagcaacaaaaactgtccagatttattatctcggaggatttctgtgtgataaggatatcaatattgaccttatttactcagtagaaagcgtcaggcaggatgatgcaggtcaagttaaagcctcagtatctgttcgatataatgatgcggcgaaagttaacgcaggagagtatgcagtaactctggacgcttcgtcatcaaagccatggacagaacaggctgagcagcaacttatgcaagctgaagagtttgctggggctgttgtcctgtaa

SEQ ID NO: 194825 - DNA, 2811 bp, Klebsiella oxytoca
atggcgactaccgacacacagcaaacggcacagttcgcggcagaggcgtccgtgagtgccgcagaggcaaagcagtacctgatcgaggttcaacagggctatcaggatattagcgccaccactcaggaagcgattaatgctgcaactgcggctgaagctgccaagaactcagcagaaacggccgaacaaagtgctgccacttcggccgcagcctcatccgaatcggcaacggcagccgcaggttcagctgcggaggcagaagagtacaagaatgatgcctctgaatatgcgctgaacaagttcactttctataaaacaccgagcgatccagacggcacaattgcaggcctagctgccactacaaacggtcagtcattccgcgtagcggaaggcccgggggcgacggcggctttcaaaacttacgagaaccaggatggcgtggcagtgctgcaggcttctcagccgggaacggcagctataaccgggacaatccgtgaatttccgacgctggctgcggcacaggctgatgctgatgcgggaaatatccccatcggatcaaccgcgtattatcgaagcgctgacgacgcaactcttgcgattgaggttattaacacctcaggaacgctgcagcctactggacggaaaattccatccgcaatgccaatgggttaccagtctgctacagctgtgagtagcggtgcggctaataccattgctatcactatccctggattattagtgaatggcagtttgatttatttcctgtcacctatattgaatacctcatcagtcaatgtgactgtaactgacgccaaggggaattctgtaacaagagttgtacagaaacaaaataacgcgccattagtcggaagtgaattgctgctaaaccagccagtattaatggaattccgcactgggactgctaacaattttgtccttgtggcatccggcccagtagctgctgaactcgcgtcaagaatttccacgcttgaattaaatagcgtagcgttattgtatggagttactaatactggcgatgcctattccggcaccgcatctacaatccctggaattgttgcgtctgatcgtgtattcctttttactccaagcgccactaacacaactcgcactccaactctttctgttaatggtggtacggcaagacagattaagcaaaataacgggactaacgtcgctgcgggcgatttggtagcgggatatacgtatctcgttaaattcaattatgcatcagcagattttcggctgctgacctacccggctgacagaagtcgtgtacttaatggttattcaaaggcaactgttaccagcgatgctaccagtcctaactcagtagcattaacaattcccgggttacttggagatggaactcagcttacttttgagccggttgttgcaaataccggtgctatgactttggtcatcaccgatatgtacggtaacacagtcacgcgtaacttattcaaaggggctaatactgcgctaactggtggagagctgcgggcggcaatgccagccactgtgcaataccgtggctctccgcagaataactttaagctgttgtatgccggtgatccaaccacggatatacagtccctctcaaaagacgttacgaccctcaagggggcgctgacagacccgtatgcagcactggccgataaacttgtgggcaccggagtgtcaacagatcagtcaccgttcggtaccatcacctggtccgcgggggttaagaccgtcacaaagcgccagataatttgtacgtctatcgggtcttctgtgggcgttggggctggctccaccggtggcggggccgctggtgctccttatgcaccgaacactctgttcgtcaacgccctgaaagaagagctcaaacagtatggtgagttcgacatcatcgatgacaaccagtgcataccgacccaggcattccagcagttcgccgcccagctcgcgaattcgccatattcaacctccgactttgttttgatcgtgggtggcatgaatgatgctccggtgggcaacttcaacatgggacgcactctccccggccaacggactacgttagaaactcttatcgacctctgtctggcgcggggtgccatccctatcgtctgtacgacgccgcaccacaacgtcgaaatgagccaaacatatccgactattccggggggcaacccgctgttctggccgtttagaacatatagtgtcgtcagcacctacgtttttgatacgacggcgaataccattaagggcgaccacttcgccagtccggtatatgggggtaatattttaaaaccgggatattcgctgagggtggacagcggcgataacatggggacgtatacgattacggccatttcggaggaccggaaaacgataaccgttcaggagcccatcccggtctctggtagcatcccaacaacaatccggcatttcaacctgcagtcgatcgctgaggacatcctgtacccaccgccgtcgacttccttcgttacgaaggactggaccggaagcggtactgcagtgcagggtgatgtgcggttcgagatagtgaataatatgcagcgctctgtggcccgccaaaaaagtgcattcctggcggactgcgcatattcattcttcagatacggggtagaggtaggtggttatagttcagtttataacgtaccagccggtaattataaccacatgaacgataacggttatgaagtaacctttggctatacatttaaagtcgcggcaaaaaaaatagccagtctcatatttggtgataaatattactctgcagcataa

SEQ ID NO: 194826 - DNA, 1296 bp, Klebsiella oxytoca
ttgaataattcagccataccgtcacgtctgacggttgtcttttctgtgagcggcgataaaaacacgatcccggtcaattccacttctgaaacgctggccgacggcctggcggcgatggattccggtttcccgccgctgacccgcattgcactctctgccggcggcaaaccgccgaaggggcaggactttaacggcatatttaatgacgtttacacgcgcctgcaatggtccgcagccgggatggggtacccctttaacgcagatttcagaactgccatttcaggctatccgaaaggtgcggtgatcccttccagcgattactcggtgtcgtggctcaacaccattgactccaataacaccgcgccggaaaaaaccgacgccacggcatctggctggatgccttcatggggatgcggggcggccagcatttcaatatcgacggctaacgttaacgccaccgatctgcaggctgctaacccgcggctaattctcaccggcgcgctaactggtaaccggatcctatatctccctccatgggtgaaagactggaccatcgaaaataactgcaccggcagcgcttactacgttcagttaagcaccagagcggcgggcgcaacggttgtcagcaagccaggcacggttactcaagtccactctgatggaaccaacataacctccctttcgaagcctcatgggaacatcgcttacgcagtcaacgggacatattcgttcgtagttcctgcaggggtgacgcgtattcgttacaccgtgacgggtgcaggcggatccggaagcggttgtcaggcgtcctcctcaagtgagtcctatagcggtggcgggggcggggctggcggtacagctttaggctggctggacgttgtcccgggaacgaccttatccgttgtcgtcggcaaaggtggtgcatcggtatcaggagccgtgtccggcaatgacggcggcgactcttctttgggtggaatcatcttcggtcgcggtgggaaaaaatccaacaaggccagcatcgtgaacagcgccgggggtgatggcggtattgcgtcaggtggcgatatcaacattcagggtggtaccggtcaggacggccaggcagcgagcaatatgcttaccggttctggcggggcttcgttttggggtggtggcggacgaagcggcgcaaccggcggtgtgaaaggaaaagcagcaggctctggtggtggtggtgcttacgatattgatttcagcggaatagcttacccatccggcgatggcgccgatggcattgtgcatatcgagtggtaa

SEQ ID NO: 194827 - DNA, 267 bp, Klebsiella oxytoca
atgagcaaattccctagccaagaaatggacaggtttaatgtaaggttgcctgttggcatgcgcgatgccatagccgatcgcgctaagcggaacggcaggtctatgaactctgagatcattgctgctttggattcctggctttctggggagccaatggaggaagttaaccaaagaaatatagataccatggtaaggatagccactaaggcttttacagaagagatctctaaaaattacgacctagtgccgaaatcaaaggataaataa

SEQ ID NO: 194828 - DNA, 453 bp, Klebsiella oxytoca
atgcctaacatcagtagcgaagagagtacagtcattgaggatatgttctcttggtgtcccaatgatctttctgttatcaaaaaggcccttcttgatgttaaaaacagggaaggcctataccaagaggtcgtaaagcacaaaggaaatctgtactcattaaagagtgacatatcggaagctacaggcctcaacttgaaagtatctggcgagctgggcagggagctctggtttgtcgttaagcaaaattccgatcgagagagaatgttaaaaaatgggatagtctatggaatctggatatatgaaggatctctctgcaaatatcctgagcacgaaaaactaaatggaagacaattccccatcaagaaaggggttaaaatgggggtattcaaaagaatactcccggcacagttaatcggttgcaagtgtatgattaagcctgttttatcattttag

SEQ ID NO: 194829 - DNA, 780 bp, Klebsiella oxytoca
atgggaagaaaggcgatagattacacaggcaaaaagtatggaatgcttactggtttaaaaaataccgggcagaaatttcataagggatttgtgtgggagtggttatgcgattgcggaaacacgcatcaagcacttccccagcatgtcacttcaggttcgactaaaagttgcggatgctaccgaaaggaaaaatccgtgattaaagctggagagacctatgggtacttaaccgccattaaaaagactgaagaaaaatacttcaattcttacaagtggttatttgtctgcgtctgtggaaaattcttatccctttccccatcccatgttatgggggatcagaaaagctgcggatgtatgcaacattccaatcctcacaaaactcatggcatgacaagctctcctgaataccgatcatggcaggagatgaaggccagatgtggcgggaaggacgatgtttccatcaaacattatgttggtcgtggaatagatttttgcgagacatggaatagcttcgatagattttatgaagatatggggccgagaccagcaggaacatcccttgagcgcatcgacaacgatcttggctactctgcggcaaactgtcgctgggcgactcaaagcgagcagatggcgaatacaagacggactatcagggtttttgttgacggggtggaatattgtctcaagcatgcctgcgcgttaaggggtattaactatgacaaagtcaggtcaagaattagaaaaggaatgcaagctcaagaggctcttgatatggggtga

SEQ ID NO: 194830 - DNA, 582 bp, Klebsiella oxytoca
atggactattcattatcagagctatctgaggtttttacgtgcgaccctgaaaagggtgagctttattggctacctcgcagcagagaaagtttcaataacgatttcacctatcggatgtggaacttgcagttctccggcaaagtggccgggggaatcaatggatctggatacgtagtggttagctctggggaaatgaaaatcctagcgcaccgggcaatctggattttcgataaaggccccattccagatggaatgtttattgaccatatcaatcacatccgacacgacaataggaaagtaaatctgcgcttagtgactcacgcccagaaccagaaaaaccaatccatgcactctacgaacattagcggtatcaatggagtaagaagggatgagaggagcgggaagtgggccgccttcataaaaacaaaaggcagaagcattaggcttggtttatttaatacattagaagacgccactcaggcgagaaagagcgctgatcgcaacttctgttttcatgataatcacggtaaagacaagtatcttgataccccttacgttgacccttggttaagggttaactga

SEQ ID NO: 194831 - DNA, 489 bp, Klebsiella oxytoca
atgactgccgaagccattctggctctggtgaaaaggttctggttgccggtgctggttggtttgcttggtggcgcactggccatcgctgccagccattacaaggaaaaggctgagcacgaagcaacccgcgccgataacgcagagctgaacctgaagctggcgaacgccaccatcaccgacatgacaacccgccagcgtgacgtcgctgcgctggatgccaaatacacgaaggagttagccgatgcaaaagctgaaaatgatgctctgcagcgcaagcttgataatggtggtcgggtgctcgtcaaaggcaagtgtccagtgtcagccccaacccaagccaccggcgccgccagcatgggcgatgatgccgccgtcgaactctctgcagttgctggacgaaacgttctcggtatccgatccggaatcctcagcgaccaaacagccttgaaggctctgcaggaatacatcaccacgcagtgcctgaagtaa

SEQ ID NO: 194832 - DNA, 690 bp, Klebsiella oxytoca
atgaatacccaatacctccagtatgttcgccagcagctgatagtggccaccgccgatctgagcggcgcgacgaaagggcaactggtagcctttgctgagaatgctcaattcgcggcgacggcgcgcagccggggaaggaagaaagtagccgatccggtcaccgggcgcatggtaaacccatcaaacccgccaatccccggacagcagtcccgcgcgaaaggttcagcaatcgctctcgttctccccgttgagtactcgacagccagctggcgccgggctctgctgtcgctggaagagcatcagaaagcctggctgctgtggaactacagcgacaatatccgctgggagcaccaggagacgatcacccggtgggcatgggagcaattcagcgacaagctggcgggcgtgcgcattgcaaagaaaacagtcgatcgcctccgtcaacttatctggctggcggcgcaggacgtgaaagcagagctggcgggtaagtatggatatcagcatcaggaccttgcagccctgtgtggcgttaagcctgataactggtgccataactacgctgattactggcgggctatgtgcgccatttttaagcggcttgatagcgactctcttctctgtgccgtgagaacacgatcacaacaaaaagcgactttttcgcagcagggtcttgcaaaagtcaattaa

SEQ ID NO: 194833 - DNA, 849 bp, Klebsiella oxytoca
atgaccaataaccagttaaacagagagcgcctagaaaaaattaaatcatggcgtgaaacctacggcgccggaagcaacgtaatgctgccagctgaggaggccgaggagctggcccgcatcgcgctggccgcaatgaacggcgagccgttcgcatacatcattcaggacaagtatgaaagagagaggggagtggaggggcatcttagccgcagccatgtatcgaaatatgttagccaagaagacattaacgaacatgagataacctgtatcccactctatcgccacgcgcagccggtgccggtggtcagcgcagacctgcttcataccgcagcatcagcaatcgaagacctgctgactaataaagacaggactggtgcaggtgtgtggttcgacttgccattcaggctacgctcggcggctaacgagcagacagcgccggtagtgcctgatgatgtgctggacgcattgcagaaggttgcacgtatacgcctcgacctgaatgacttcgacggcgatcgccgtggcatcgctgattgcccttgtgatgccgaagaggcgttaatcgaggtggtaaaccgccgcgccgccatgctcgcagccgccccgcagtcacccggcagtgaacccgctaccgtgccgggtaaatggattccggtaagcgagcagatgccggatgatgagcaggaggtgctcaccataaacaaaataggccatcgctttgtatcattcttcgataagcactcagggctgtttttcgacaggcttgatgcgccagcagcatgctgcatagagcacgtgctggtaacccactggatgccgctgccagcagcccctcaggaggtgaaatga

SEQ ID NO: 194834 - DNA, 288 bp, Klebsiella oxytoca
atgaccaaatttacagacgtacatgacctgttaactgcttacctgaaacaggcgcggaaaatacccgcaaagggtgtttatgcatcaaagcagcgtcagcaggaagtgcaggcggcgcacacgaggaaagtaatgcgccagcgtaagcgatctgttggcaagtccaataaattgggatttcgtcgtcgggcagaaactacggcggcactgatttgcgagatgaatttcttggcgctggtatgtcgttctaatcgcaagcgggtaaatgcaatgggagccaaccaatga

SEQ ID NO: 194835 - DNA, 1164 bp, Klebsiella oxytoca
atgtcaatcaccctcaggggcggcgtgtggcactgtcatttctttacgccgtcaggaaaaagagttaggcgatctcttggcacgggggacaaaaagcaggctcaggagctccacgacaaactgaaggcggaagcgtggcgggttgaccagatcggcgacctgcccgtcagaaccttcgaagagtgctgcatccggtggttgcgggagaaagaccataagcgatcgctggatgatgacaaaaccaaaattgagttttggctgcagcatttttccggtcgtgatgtctcgaagataacggctgaggaagtccacgaagctgttaacgggatgatcaaccgcaagcacctgcaggtgtgggagagtaaacgtgatgccgcggtgaggaagggtaagccggttcctgagtacaaaccacggcaggtttctcaggcgacgaaggcgcaacacctttccttcattcgctcccttctcagggctgctgcgaatgactggggctggataaaaacagcccctgttatcaaaacccgtaaaccgatcagtaagcggatacggtggctgaccagagaagaagctgaacggttgatcgagtgcatgccggagagcattaagccagtggtgatatttgcactggcaaccggcctgcgccgctcaaacatcatcgggcttgagtggcagcaggtcgatatgcagagaaaggttgcatgggtaaatccggagaacgcaaaagcgggcaaggcgattggcgtagctctgaatgataccgcatgcagggtattaagggatcagatagggaagcattcccggtgggtgttcgttcacaccacggcaaagcaccgaccggatggaacgctgacgcccgcagttcgaaaaatgcgggtggatgacaataacgcctggcgcgctgggttgaaaaaagcggggattgaggatttccgttttcacgacctccggcacacctgggcgagttggctgatccagtccggcgtcccgctttctgttttgcaggaaatgggaggatgggagagcatcgagatggtgcgccgttatgctcacctggcgccgaaccacctgaccgaacacgcacgcaaaattgacgccatttttggcgctagcgacacaaatacgacacaaggaggaaatcaggctggtttaaaactggcgtaa

SEQ ID NO: 194836 - DNA, 264 bp, Klebsiella oxytoca
atgacattcacaaaaactattcaagatactgtatttaaaaaaacctcagatgggacatcaattggttcagaaatacagagtattgatataatctatagcgttaagtctgtaaacataactgagtctgttgcttttgcagaactatataaaagttatgatggggaatcatggcaactatataaatcatttgagtttacacccgattactcatcaggagttgatattatagagcaagcggaagcacaaattaaggagatggaatag

SEQ ID NO: 194837 - DNA, 2157 bp, Klebsiella oxytoca
atgactgtatcatctgaacagaactacattgagtacaacggcgatggctctaccaccaccttcgctattccgttctacttcatcctgaacacagatatttctgtgcaaatagccgatgctgattcaagcatcacgaatctgacgtatggtatcgattactccgtttctggagcagggagtgcttctggagggagtggtacgcttaacatcgcatatgcgagcggatacaccattctattttatcgcaatcctccagccactcaggagactgcttattatgagaatgggaaatttccggcaaagtctcatgagaaagcgctggataaattaacgatgttaattcaaaggtgttttagtgttctgtccctggccttgaaaagaccatcttggcttgcagattactatgatgctgagaattattatatcagaaacatactaaacccaaccctttcacaggatgcagcaacaaagtcatatgttgactcaggagacaatgatagcacgcaacatgctgacaggttattccagcgaacgctaagagttcctgaaagccaggttgggatcatgtcatccatacgtgcgcgttcaaacatgcttattggatgcaacgaccagggagacccagttcctattgctggacaaactgacactgcggatctggcaattaagcttgcatctaaagatggtgcaagtctggttgctacagaaacaggaagaactgttgagttatcaataaggtccgcttcaggtgcatcccaagggctttttccttccttgatgaataaattgacagcatataggcacggcgtggaaggttatcaaacccaatatctgtgctacggtttcggaagttcagttcaagttggtgccacgcttccagatccatctactcaagcgcctattgctaaattctttgaatatctaaataaaaccgtaaataagcagggtgtatacccattatcttttgtcaataaaggagttaatggttctgctatcaatgacttccttttgacgcaatggcctgcagtggttgcagaaggtgtttatccggatctttccttatttgtttatggaatgaatgatttcccaacagcgttatataatgcggggcagacgtttggcgagaacgggtttaaacagaggttgcgtacagccataaggaaggtgcgtgatgcaggtggagatgttgttttgacaactactccgcatccttatatagcaaactatagctggagcatgccatctggtgtttctcagtcatggccaaaagccgttgcagctcctgtgtctgatgaagatattatcccttcggcttcacaatcagtggttgagtttgtttggaacggagtaaccattacgggaggggttcgattcctgcggggcaatgatgccataagaaaaattgcggttgagatgggatgcgtattaattgatgtggagaaatattggttcgatgccgttgctaaatatggagaatctgcattatttgacactgggcaaactgtgcatccaaatcttcttggtcatcaaaaatcatattggcttgcatttgaggacttcttttctaatttggacggtaatggctggatagctcctgatgctagtcattacgatttgttagatactggtggctctggtctttacccaaacccaaagactgccgatatagatctcatggctaataatatccgcgcaagtgcgttcataaagcgagaccagtttgcgcgttcgttagaaactatagatcagttaggagccatcacaagaacttcttatacttcacaaagcccaacaacgtctgcgccaggttacaatttgcagtggacagactatcattcaagaactaagggcctctatgcagctggagaggttcaagcaatatcgatcccgaataggacatcaaaaaaactgttcatagatgtatggacttctgctcaaactggatgggctcaattcatggaattactggtaactaatcgggagggggttgtgacctacaccattgttggtgaccatgatcagacccctccatctggaggaggaactacaggcgggagccgtctatttacggtatctgcaggttctggcgttattaatgtaacagttaacactgataactcatcactgaaatatcggatgattgggtttggggtatag

SEQ ID NO: 194838 - DNA, 756 bp, Klebsiella oxytoca
atgactaagaagaatgtagcaaatgtaggttcaattgtcactgataaaaccattgacagccagtcactgcttgaaatggtcaatcaggcgcgtaagcaatgcggagagaagccggtacgtaataacgtattcatagatcgcattcgtgatgagcttgagggggagggttacaaaacttttgtaacccccatggacaagtctaaaggcggcgccgatcaggtcgtaatcgaaatgacggtcaagcaggcactgcgcgtcgccgcgcgcgagtccagggcagttcgccgctctttggttgataagctggaagacatgcaggccatccaggtgtcgaccaaaagcacatctgggcttactgaatatcgtcttgccaaagcggagcaattgaaggctcaggcgctggagaaaaacatcgcatcggcccgggagcttatggctatgcttccccggctcgatccgatggcacaccagacacttgcggcctcattgattaacccgcttgtaggatatgacgcaatacctttaccggtgattgaagagcattactacacagcagcggaggctggacagaaaatcggagtcagcgccaataaaattggccgcatagctaacgcgaacaacctcaaaactgagcagtacggcaaattcttcctagataagtcagctcactccagtaaacaggttgaagcattccgctataacgccaatggcattgaagctcttcgccacctgattcatggcgctgatgtggcttaa

SEQ ID NO: 194839 - DNA, 726 bp, Klebsiella oxytoca
atggtcgctaaaaacagcgaagcccggaagtgcgctaacactatccgggcctctatcgaaaataaccgcgaaggaaatatcgacatgaacagtgtacagaataaagagctaagtttccacaatgtcaccttggtcccggcacctgttgcggatggcatttggctaacatcttcagatattgcgaaggcacttggatacgcttcaccaaagagcgttacaaacatttattcacgtaattccgacgagttcacaagcagtatgtcaatggtcatcaaaatgatgaccaacggaataaacaataacttacgtgaaaaatcggtccgtgtgttctctcttcgtggttgccatctaatcgcgatgtttgccactaccgataaggcgaaagagttccgccgctgggtgctggatattctggatcgggaagtcgaacactcgccaatcgccaaacagttcaccgatgacgaaattctcgatctctgctacctgcaattctggatggaaaaaagccagcatataagcaaactcctctatcccgccatgaaacaggcgaaatctgagcatgcgggagtattaaaagaaattgctcatgatgttcggtatatgaccgacagaagcaaacagattcttctccgggaggcgcaggtcttagatggtaatagcttctccgttcagcgagcaacgtcgattttggctgagcttcgtggagatgagggacggattcattga

SEQ ID NO: 194840 - DNA, 357 bp, Klebsiella oxytoca
atgacaataaacttatctaactggaccgacgaagagctgaaaaaatatcacaaatcgcttatagatgaccaagtgaagtcattaaatgacaaaggcactgcggttggacttctttttttttacgggtttattgcttttggcggagtggtggggtggtgtattgatgaggttctttctaggctggtgctcccagctcaggttttattttgtttcttcattatttccggggcgttaagcctatatttttcttttaaaaaagatagagattctatctcaagaaaagccttcataagagaagagttggaaagagtgcagggtgaagtgttgagacgatctcttcaagataaaaacaaatag

SEQ ID NO: 194841 - DNA, 2727 bp, Klebsiella oxytoca
atgaaacagcaatgcattgaagccattacgcgagctatcggcagaaagccccgcgccgatgaggtgagaaacatcgaagaggggatcaatgatgctgttcgtactatcagggttaaaaatgcacaatcaggcgcgcaaatgcctgactcgcaggttttcgcagatgcggctaaacttgccgcacagcgagcggttcacggcatttataagaagcgccagcgcgttgcgcaggatgccattgcaagggccaacctgattaacgaactgaagcgccaggttcctgatgctgaattaacgccagagtatctggcgcagtcaattttcatggggcgcactcgcaaaaccaaaaacctggacattgtctctgccgaagaaatatcgcttggtgccctgcaagactggacgcgacaactaggctccgcaatggagaaggctggaccggaggtgaaagcattctttgatgcgatgaccgacacgcaacgcggaagcctcgacgggaagagccaggctcttcaactaatgttgctgaaagaaattcgtggtgaagatacaggaagcgctgcagcaaaaaaggtggctgatatatggcgcaagagcgctgaccaggcaaaaacagagttgaatgattctggtgcagatatcgccacccgagatgattggggtattccaaactacgattcgcgcgaactgatatctcgtgctggccgtgatgaatggctggcttcactatcaccaacagagcgcgccactgcaaccgtattacgccgccagccgcctgtagagtggacgcgagatcattgggtttctgacacaatgaaggcggttgaccgcaacgcctttgtagatgatcgggggatgccactggatgatgcagcgctacgcgatgttctggagggggtgttcactactaaatccactgatggtgctaataagattgatccgggcgcacagggtgtaggtgggggcataaaaaacagaggcgctaacgcacacagggttctggtgttcaaagacgcagaaagtcagttttcttacatgcagaagtattcagacaagaatctggctgaagtaatgatggaccatcttcagtactctgctcggcagttaggcataatgaagacatttgggcccagcgcggagaataacttccgctacatcctggacagcgtttataagaacgctactgagaaaggccacgatgtcaaaaatatggaaaagcagcgcgacacagctacagcgatgttcaactatcaggccgggttagggcagaacagttcgtcattcgtgccggttatgcagcgtgttcgcaatcttatgacatcagcaatgctcggctcatccgtcattaacgcaggatttacagatcagttcatcatgcgagccatgtcctccgcgttaaaactggataacgccggagcaggaataaactctctgaggaatctggtgagcaaaaatcgtaagcaggccattgagcaactcggcttgatgtcggatatccacgcctctgttacttcgcgccttggtggtaacgatgttggccgggacgtaactggatggctcgctgagaaaacactcaagtggtcgggactgattgcgctggacaaggccaataaagcatcattcggcatgaacatgctttataccattggcaaccttacgaggaagttcgactctctccaggcactgaaggcatcggattatgacctcctgtcggctaaaggctggacggagcgtgactggcagattatgcgcgcggcagaccttggtaacatcacggagaaacatcgcggcatgacgcctgacggcatctatgctgtgcctgatgcaaaaatcgctgagatactcaagcctgaaattgaggcgcttcagaagagtgctgatgacgccgttgccgcgatgggtaaactaaccccagaacgcgaaaagaaaattcgtcaggcgtacgccgatgaagtcggtgctaataccgccaggatgatccgcaatgcacgtgctgattcggtatataaattacttggtatcactcactcagaaatgatgcaagcgatcacctcggcaaccaatatcaaccggttcaaagccgcaacggagggtgaggtttaccgcagtctgatgctttttaaaactacgccttttgctggtgtgtccaacatggttcgtcgggcgcaagacctgaacgggatgaacaaggctacattcctggctaggtatattgcaggcacaacgctcggtggcgctatggcgattcaggtaaaccacctgatatcaggagaggatcccgatgatatgactaagccaagtttctggatgcgagcattggtcaaaggagggtcgtttggtatctatggcgacttcgcccttgccgaccagactaaatatggctcatccatcgcggcaacaattggtggcccggctcttggtctggcggagggggttgctaagttagcagtggtcaacacgcagaaactggccaagggcgaggatacaacctacgctgcagatgctctacgcgttggcaaaatggttaccccattcgccaacttatggtatacaaaggctgtgtttaaccatctgattctccagcaggctcaggagatggcgagccctggctacaacgccaagctgcgccagaacatggagcgcaactacgaaaccagatactggtggaagccgggcgcaacagagccgcggagggggccagattttgatagagcgatagggaaatga

SEQ ID NO: 194842 - DNA, 1374 bp, Klebsiella oxytoca
atggacttatccaaccttgatcatcaggatgcgaatttcgtcaagcaatctggctttaccgatgcgaccaatgccgattatcagccgggacttttgcaaggcgcaggcgatgcgctgtggagtggcattgaatctggtgcgtcaattgcttcacagagtggcattaaaggcgttattgcttccaatatgcagcagttcacattcctgcatccagaagcatctgaggccattcagaagccagtaaatcagtctattgatacgtctttcaccaaattcagaaaaagcattgcacctgatgctgagaatacgggtaaagcagggcagatcctgttcggattgggtgaatactttccggcgcttgccggtgctgttgtcaacccggttcttggcgctggtattgcgcagcaaatatcgcagactgcaacaacggaagaattaacgggtaagggggtatctcagcaggacgccgaacatattgcattgccaaagtctttcgttgatgcagctggtttccttcttccggcagcagtcggagggcgtcttttgacgagggttgccagcggagccggaattaatattgcagctggggctgcgtcgcgagaagtgactaacctcatgctgaaggacaaaaaatatgctgcagtggctgaacaatacaaggcatgggatggcgaggccatggttattgatggcatcctgggcgctgcttttggtgggatacatcacctcacatcaagagatagagtggcaggaggcgaggctactgacagtgggacgccaattggtgatcaggtaaggcagagcgaaatcgactccgcacttgcgatgaacgaggcgcataaccacgatatagccgcttctccggttttgcatggcacacctgaaagtatggatgcgcactatcgcgccatgggtgatgctgccgagtctattgcccgcggtgaacaagtcgatgtatctgcacatgccgattcattcgacggacacattcgtccggaggcgtttcaggagagcgctcgccctgatatggaatcggctcttcatgaaaacgacattggtacatccgattcaattcgtgcgcgccagccgcagactgaaccgggaagcggagaggcgcagtttgcgcagttcctgggcgatgaggggagtgttgaccctgacaccggtattaatgttgggaatagctatgaactggcaacggccagccgccttgctgaagaaatgccggatctcactgtagaacatccagatacaggccagcaggtaaaactctcagacctgatggaagagtacaacgagaaaatagccacaagtcaggatgcagcagacgtttacccgtttgtagcgtcctgcatgctcaggaatcctgaataa

SEQ ID NO: 194843 - DNA, 2502 bp, Klebsiella oxytoca
atggctcgaattcctgtttatcagcgtcaggttggcgttaacgctggaccggcaacgcaaatcaatactccaacacagacgactgatcagcagatatttcagcagggggttaatgacctttcgaatgggctgatccgttatcaggttcaaaaagatgattctgagttgcaggatgcatcgctagctggcaaagaggcattgcaaaatattgtcacaaatgctcagcagttgcagggtaaaaacgccattggttctacacagaatgccctgaaagcatttgatgatcaggtttcccaactgcaagcaccatccagcaggaaagaggattgggataggcaggttaaagctatgcgcttgcaacttgctggattggtctctaaccatgaatcacagcaatcagagcaatatcgtacagcacagtacaacagcatgaaggctttaggtattgctggcgctggtcaatcctactctgacgcatctgcttacaagctaaataacgccagcactatacactcaatccgttcatatggtgagacgcagggatggtctaatgaacaaattgaggctgaaattcaggattacacccaaagagcatcacaagcagccgttaatgcacaaatcggcagcatgcagaagggcatgcttaatagtgatggaacgctttcaagcttcaatgggcagattgatgtcgatcagcttgtgacggctctggttgtacaagaaagcgtcggccgccagttcggggctgatggtctctcgctgaggtccaaaaaaggagctattggtgttgcccaaatcatgccaggcacagcacctgaggccgcgaagcttgctggtttgccgtgggatgaaggtcgttatcataatgaccctcagtacaaccttgagcttgggaaagcttatctgaagaagcaactatcagattttggcggcaatcaggttctggctcttgcagcgtataatgccgggcctggcattgtgagtgactggataaacggtacgaacaaaaccggcaaaaacaagagtctcatcaaaactggagacccacgcacgggagctatcactaatgatgattttgtgcgctctattccatacgctgaaacgcgagactacgtcacaaacattctaagtaatgtcccgtcaatcccgcaggcgtcatcaatcagcgcaataaccagtacgccatactttaagcagttgagtcctgaggcacagtctcaggctctgtctggttacgcatctatgctaagtaagcagcgcgcagccagtcaggcgacgctaaacggtgtggtcaatgatactagtaccgcgctaaggaatggtgaaacgcctgcagttatgcctgacagaaaccagttgatttcaacttacggacttcttcagggagagcaattattcaataagttgcaggaagactatcaattcggacagaacgttaagatggtcaagggtatgaatccctaccagcagcaacagcttcttgatcagcaaaagccatcccccggccctgattacacggagagaaaagcgaattacgaccatcttcaacaggcggttgcttcggtcaatgctgcgagaacatcagaccctatagcgtttggcatgaaggaaggagtggttagcccgatcgacttcacaagccaggagacaatacagcaagggctatcagcccgtttaggccaggcagagcaggtgtctaatgcttatggcactcctccagttttgttcaataaacaggaagcgaagcaattctcaacaatgttgtcacagctacctcctgattccgctatttctctgttgcaaagtgccgggcgctcgctttctcctgctgggatttcgatgcttcaatctcagataggtgagaacaatccaacctatggggcgctggcaggcattctggctactccagacaattacaagaatacgaagacaggggtaggttcatacatcacttacccgctaaccgttgataagtacaatgcatcagaccggataattcgcggctaccgcgctttaaatccaagcaaagaggataaggcggctggtgtgacgccggtaactattccgtcagatcagaagatggaggatgcattcaacgagcgagttggtgactctttcgttatgtcagcgcaggagcgccagaaagcgtacaacctgtttaagtcagcatatgctggcgagatgctgtacagccctgatgtgaagtcagatgatcgttcggaagcttccagaggcatttccgactctatcgcgaataaagccatattgtatgcaactggcggagtggttagctatggtgggggcgaggttgtagcgccttatggaatgggtgacgatgcattcaaagagaaaatgaatagcgcgagagctgaagcctttaaaggcatgggtagctattctaacttctctccagtgaagctaccgtccgggcgctacggttttcgagtcggcaacaggcttgcaacgaaagatgggcagcttctcacagtggagattaactga

SEQ ID NO: 194844 - DNA, 483 bp, Klebsiella oxytoca
atggaatacgttgcaatggctggggctggactcaatgccataaatggcatcagtagcgctaactcagcggctaagcaaagcaatctcaacgcatctcttcttaacaagcaagccagcaatattgcattacagaccggctctcaggttaatcagatacgccaacagggtagccagacattggcgcaacagtctgctggattcgctgataacggcacaggaaccggtggaagtaacgcgttaattcagcgctcaacggcaatcgacacagagctggatgctgcaacggctgactataacggtcgagtgcaaatcgccaacgtgaataaccaggccaacgcgttacgcgctcaggccaaagctcaaaagccggggctgatgagtttgctgggtggtgctgcatcaactattggtgctggggtcaccaccgcaaccgcacttggaaaaacaaaaagcacttccggacttcttaatcttctggggtaa

SEQ ID NO: 194845 - DNA, 411 bp, Klebsiella oxytoca
atgaacataatcgactttgaaccagaacacatcctccatattaaaccgcagagggcgcaggtcagcgcacccctcacgctggaatacgcgaagcaaatcgcttctggtccatgctttaccggcattcacaacggtgaggtagtggctatcggtggtcttatcgaagtcaaccaaaaccgcgcctttctgcatatgattgttgccgagaacatgcctcaccaatgggtgaagctatatcgagccgcccggcgtcttattgatgcagtggattatctgcgcattgaggctctaagcggattcgatgaggccgaccggtggcttgagatgctcggttttgaatatgaaggaacgctccgtggcatcatgcctgatggctctgatgcgaagtcatacagcatagtgaggaaatga

SEQ ID NO: 194846 - DNA, 2316 bp, Klebsiella oxytoca
atgccatctacttctccatcaataaattcattcaatgccggtgaattttccccgttaatgatggggcagaccgattttcagaaatggaaatctggcacaaaatacatgctcaacttcattccacgtagccaagggccagcggagcggagaggcggcacatactttgtcaaagaagtgaaggattcttccgcacgcgtttggttagctaaatttgtatttaatactacccaggcgtttatccttgagtttggtccgggatacatacgtttctattcagatcatggcgtggcactggatgcggatggcaacgcactggaagtatcaagcccatggtcatcttctgacctgactaatgatgatggtggctttggcctgtcgatggttcagagtggcgatgtgatctacatttgctgccacacaggcgaaacagtcccatacaaacttaccagggtcagcaacactagttggacgcttaatgcattcgacataagcgcggcgatggggccattcgataatataaactccgacaaaagtcttgttgtatacactgaccaattccgcatttattcatcagatggagcagcacttccagacggaactcctaccacaacgagtacaaccactattacggcgaatgcggccatttttaaatccgggcatgtgggtggtttgttctacattgaatcatctactgacgcggttgatgatgacaccggtcatagtggctatattcctgcatgggcggcgagtacgacagaaacgttttcagttggggtgttttgtcgctcagagggtaaatattatgaggatatggacggcaccaaaacgggaacaacacagccaacatggacagttggagcgcatcgggatggttctggaggggacgcttcgctatggcgatattccaatggcggatggggtgttattgagataacggcagtttccagcgatggcctgacagcaactggtaaaatcctctctgaattgccacctagcgtccgaaataccaccggtcagacgtataaatacgctttcggcgactggtctgaaaacatgggatacccgacaaaggtcgcattctacaagaacaggctggtatttgcctcgcgtggcaagttgtggttttctgtggcgtcagactatgaaaacttcacgccaatgactgatgggtatgaggttcagtctgatgacagtattaacgttcagattgaatctgactctaccaatgctattcgctggcttgccccgggcagttcactagtgatcggtactgcaggtgcggagcacgcatgctctccatccacaacaaactccgcctttggccccgacaatattcagataaccaaagagtctgcgtttggttctaaagaaattcccgcagaagatgttggtggtgaaactgtatttatacagagggccgggagaaaggttcgcagcgtatccgctgattatgaaagtgggcaatactcatcaaccgatctcaccgttattgccgaacacataacaaatggcgcgataatcgacctggcctggcagcaggagcctgaccatgtcctttgggttgttctggcaaatggttcgctccggggcctgacctacaataaagaacaggatgtaataggctggcatcgccacgatttaggtggtgaggtggaggccgtcgctgcaatacctgacccaagcggggggcgcgatgatctgtggatggttgtgaagcgcaccattaatggctctactgttcgctatattgaatatcttcatgctggctgggatgcttctactgaatccctttctgcagcattctatgttgattgcgggttgtcatattctggctcagctgttgattctgtatctgggcttgagcatctggaagggcagacggtttctattctcgctgatggcgcagcgcatccggatcaggtggtgagtagcggttccgtatcgcttgagtgggattctactgttgtgcatgtcggcctgccattcacctcaaaaatagtgacattaccaatggaggccggcggaacatccggaacctcccagggtaaaactaagcgaatcagtaaagcgacgctgcgccttgtcaacacgctgggaggcaaggttggagatgaagatggtagctatctggatattatcgaaagccgcgattattcagacctgatggacaaccccccagcagcctttacggatgatcgcacaattgactggccgggagattacaactctaacgcctgcattcaggttgtgcaggaccagcctttgccaatgacggttgtcgcaatctatccacgcgtatggacatcaggcgaatga

SEQ ID NO: 194847 - DNA, 135 bp, Klebsiella oxytoca
atgatggattactcgatcgcattcttagagcctatcgttgggcatttgcaatcaaacgcgttcaacttgcagcgcttgctgacgagcctgtttatggttttcagcatcaataccaactcccatctgactgcctga

SEQ ID NO: 194848 - DNA, 432 bp, Klebsiella oxytoca
atggcaattcttgataatgagctgacgttctctaatgctcaggcggtcacagcgaccgccgtttccaccaacgtggtggacctcggggttgatcgcgatatcggtgtaggtgagccggtctaccttgctgttcaggtgggaaccgcttttgcggggctgacttcattgactgtcacgctgcaaaccagtgatgataacagtaccttcaccgacctgttctcttctggcgcaattgctctggcagatctgaccgccggcgctcaacctgtccgagttgtggtgccttcaaaaactggtcgctatctccgcgttaactacaccgtagcaggtgatggtacagccggaacagttacggcatctcttctacttggcccgagtggttatcgtgcatatccgtctggaattccggtgccttacttctcagcaagctaa

SEQ ID NO: 194849 - DNA, 1005 bp, Klebsiella oxytoca
atggctactattggcaatgaatttctgacgctggctgactgggccaagcgtcaggaccctgatatgaagcaggctcgaatcattgagatgctcaatcagaaaaacccgatcctttgggacatgccgttcctcgaagcgaacgcgccaacccatcaccgcaccacagtgcgcacctccctgccggctgcctcatggcgtcgcatcaataagggcgttagtcgtggcaagtccactaccgctcaggttgatgaaccgtgcgcaatcctggaaacctatgcagaggtggataaggagcttgcagacttgaacgggaataccggcgcattccgtttgtccgaggctcaggctttccttgagggcatgaaccagcagatggcatccacactgttctatggcagcaaggctaccgacccggcgtcatttgacggatttgccactcgctactcagagctggacgcagagaacggcaataacatcatcgacgcaggcggcactggtgacaacctgacctccatgtacctcatcgcgtggggtaatgacaccgttcacggtatttacccgaaaggctctaaggctggactgactcacactgacaaaggtcagcagactctggaagatagtgatggcaacatgtatgaaggctatcgcgatcacttccagtggaagactggtctggctgtccgtgactggcgttacgtggtacgcgtggcaaacatcgatgtgaccaagttgctggatgaaaaaaccaatgggaagttcgcaactgacctggttcgactgctgatcgcagcttccaataaattgccggatgaaaacggtcgcatggcgctttacatgaaccgcacgctgacaagcttcttcgatattcaatccgttgaaaagccatctctcggactgcatgcagtgaaagacaccgaaggtgacaagggcgtgatcgttgacttccgcggcattccgatccgcaaaaccgatgccattgttgatggcgaaactgctgtagcgtaa

SEQ ID NO: 194850 - DNA, 663 bp, Klebsiella oxytoca
atgtttaagctatcacattacttcatgaatgaggctggcgaaggcgatgcgttgggcgctggcaatgaacaacagcaagatgaggctcagcagcaagcgcagcctcaggaccttcttggcagtgatgagcagcagcaagagccgcttattaaggctctgcctggcgaggatgacgccgaaggctggggaaagctttgggataagcttggccgcccagagacagctgatggttatgaattgccggttccagaaggtgattctggtgagttcgccaaggctgcaggcgcaatcatgcactcgctcggcatcacaaaaagtcaggctcaggcgctagccgcatggaataacgaacaaattaccgcccagcaggatgcatacaatcagcagcttgctcagcgtaataccgaaaacgtcgcatccattcgaaaagagtggggcaataactttgacgcgaatctggcagtagccaatcaggcgctttccgcattcatgtctccagaaggcatccagcttttgaaagagtctgggctggccagcaacccacaccttgttaacgcgtttttcaaagcgggtcagtcgctctccgaagcgaagactatcaaaggcgaaccggctcactccgggccgaaatctactgccgacatcttctacggaagcaactaa

SEQ ID NO: 194851 - DNA, 285 bp, Klebsiella oxytoca
atgagcagattgattctgaggcgcgctcgcgccttccggaaggtgtttggcgtgcctggctccagaacgaaggagcaagagattgttctcgctgttctcgggcggttctgccgggccaataaatccagcgtcaccgtatctccgatacatcggcaggtagacccgctcgcaacctgcgttgcagagggtaggcgcgaagtactcaatcgtatttctgattatatccagctcgaccaggaagagctgattcgaattattaacgaggcagagaagaccgatgtttaa

SEQ ID NO: 194852 - DNA, 1659 bp, Klebsiella oxytoca
atggcagaagaaaacgacagcctgttacagcaaatcctgcgtgaccagtcaacgatggagacggggcgcacaacttgggaacagcactggcaggaagtggctgagcggtgcttgccgcgcggggctgatttcgttggtgagatacgagatggcaagaagaaatcggagaaggccattgactcaactccgatccttgcacttgagcgatttgctgctgccgttgaatctgtagtgacgccgcgaactcagcagtggcatgctctgaacaatgagcaatttgcagaagatgctgaggtgcaggcatatttcgaggcgtgtacaaaaatcctgtttcgccttcgatatgcgccattggcaaactttgccaaccagatgagcgagaactacatcagcatcggcgcattcgggaacgggtgtatctatgttgatgagatacccgggaaggggcctcgctacatctgctatcaccttcgggagatttacttcgaagagaattaccagggcattgtcgatctggtacaccgcaagtttaagttgaccgcccgtcaggcagtgcagcagtttggcaaagataatctgcctgaaagcattcagagagcagcagagcatagcccgctgtctaagtttgaattcatccaccgcgtctgcccaaacgatgagattcagtttacagatgatggcgtgacaccgaaggcagattacaccggcatgccatgggcgtccttctacatcacaaaggaaggacggaagattattcagcgtagcggctatcatacgatgccgtactgcattgctcgttactacaaatcccccggcgaggtgtatggccgcggcccgggtatgaccgcgctgcctgatatcaaagtgctcaacgagatgaacaaggaaacgctgatcggcgctcaactcgccaaccggcctccagttctcactgcagatgatggggtgcttgaaggctttagcctggttcctggcagtattaacagcggtggcgtcaactcatcaggtaacgcgatggcaattccatttgccactggggctcaaccaaatctcggccttgagatgatggaccagaagcggcaactgataaacgacatattcctggtgaccctgttccagattcttgtacaaaacccgcagatgaccgctaccgaggcaatgctgagggcgcaggaaaaagggcaactactggctcccaccatggggcgaattatgtctgagcagcttgggccaatgattctgcgtgaggttgatatcgcggctcgtaacggactccttcccgatcctcctcagcagcttattgacgctggaatggaatatgacattgactaccagtcaccactggttcgcatccagcgctcagaggaaggctcaggcatcctcaacactttgcaggtggcagggcaaattgcccagtacgatccttctgtgatgagtgtattccgctatggtgcagtcatgagagaactggcggaaatcaacggcatgccgcatgaccttatcttaaatgaagatgaagaggagcaggtcaaggcggcccaggcgcaacagcagcagctaagcaacatgatgcaagcagctcctcagcttgcaaccgctgccgacaggcttgcatcagcgcagcagaaagccaactcacctctaccgacgccacaataa

SEQ ID NO: 194853 - DNA, 1446 bp, Klebsiella oxytoca
atgcacaatctcagccgggagcagaagattgaactggtaaggctcctggaagaaaagaagcgacgcgataacgtctatcgttaccgaacctactacgaaactcgttacccctggcaaaaacgtttcattgcgaacactcgcgagtattcacaagtagcactcattgctgctaaccgtgttggtaagacggacacggcgacatatgtcgatgcaattcacgccatgggtgactacccggacggatggacaggtcataaattcgatcatgcaccgttaatctggatacttgggtattcaggcgagaagtgtcgagaccttctacaagcgccgatcatcgggcgaaagacagacaacggctgggaaggtggattaatccccggcgagcttattgtcagtgttgagcctatgacgggcacgccaaacgccgtccgttctgtgtacatcaaacacaagtcaggcggcacagcaaagatacagttttggtcttactcgcaggggcagcatgctctgatgggggacagcgtcgactggttccatatcgatgaggagccaaaagaccccgcaatattcccccaagtacttacgcgtacagcgactggcgacaaaggaaacggcggcagaggtattttgacgtttacgccagagaatggccgcaccgatttggttatcggcttcatggataacccatcatcagcccaggcatgcatgaatgtaggctgggatgatgcacctcacctgagcgacaaagttaagactgagttactggcatccttccctgcgcatcaaagagatatgcgaactaagggcataccaatgctcggtcacggtcgcatctacgatattgccgacgacgagatcacctgtcagccattcgcctgtccagatcacttctttgttatcgacgggcaagacttcggctgggaccacccgcaggcgcacattcagttgtgggaggacagggatgaggacgtcatttacatctctcacgtgtggaaagcacgacagaagaaagctgatgaggcgtggcgcatcgtaaagccatgggctagggatgttccaacggcgtggccgcacgatggaaatcagcatgaaaagggcggcggacagcaactcaaagaacagtacaaggctgagggattcaagatgcttggcgagcatgctacatggcctgatggtgggaacaaggttgagccgggcattcacgaaatcagagagagaatgctcgatggtaagttcaaggtgttctccacatgtactgatttcttcgatgagtttcggatgtatcaccgagacgaaaacggaaagatagtcaaaacgaatgatgacgtgctcgatgctgttcgctacgcctatatgatgcgccgctcagctcgccagatgtatgccatcaaatccccccgtaagaaacaacgcttcgcaaaaaccgattacaacttatttgggtga

SEQ ID NO: 194854 - DNA, 504 bp, Klebsiella oxytoca
atgactaaggagataagcatgtcgagtgaaacaaaaatgggtcgcccgactgactaccttccagaagtagctgaagacatctgtaacttgctcatgttgggcgagagtctgcgttctatctgtaagcgtccgggcatgccatctatccgtgcagttatgtattggttgcagagacacgaagacttcatgcaacagtacgcgcgtgcgcgtgaggttcaggccgaactcctcgctgaagagatcattgaaatagctgacgacagcaagggagatgtgattgtcgatgaagatgggcatgaacaaacgaatcatgagcgtgtcgcgcgttcccggcttcgagtagatgcccgtaagtggtacgcctcaaaacttgctccaaagcgttacggcgacaaagtaacgcacgagcaaaacatcaccattaccgatctgactgatgaagagttagaccggcgcgtacaggagttaaccaatgcacaatctcagccgggagcagaagattga

SEQ ID NO: 194855 - DNA, 414 bp, Klebsiella oxytoca
atgagtgccactactctaaagaacctaatccccttcatctttgctgcaatcatcataggattcatcgctaagctcggcgcagataatcgtcaattgagaatcagtaacgcatcgcttcagaatgaagcaaagcaactgaacatcaaaaacaacgatctcgccaatacgctacagaatctcactgatgcagtgacgagcatgaataaactggttggtactgaggcccgtcgccgatcagccgcggagatgaaatcacaacgcctgcaggaagaagtgaaagatgcgctcaaaaacaataagtgctctatcgagcttattcctgattctgtcgttgagcagttgcgccgacaagcggactcagtacgaaatggtaaagacgccgatagccccaataccagaaagcctgctgattga

SEQ ID NO: 194856 - DNA, 627 bp, Klebsiella oxytoca
atgactaaagaccaattcatgaaggctgccggattatctcaggcgcttgctgataagtggtatcagcacatcatcgacacgatgaaagaattcggcattgataccccaaaaaggcaggcgcactttatcgcccaggtaggcactgaatcaaatgggttccgagctgtccaggaatcactgaactactcggtcactggacttcaaatttttggttcgcgactcacagcagttcagcgcgaaaagcttgggcgtaagcctggtgagcttgctttatcccctgccagacaggctgacattgcgaacatagtttatggtggcagatacggaaacaatcagagcggtgacggctggaaataccgtgggcgtgggctgaagcaggttaccttcaaagacaactattcagcctgcggcaaagtgctgggactgaacctcattgatgatcccgacctgctgctactggataagaacgctgcccgctctgccggttggttctggaaagcaaacaactgcaatcagtttgctgatgccggcgacgtaaatgggctgaccaagcgtatcaatggtggatttaatggcctccaggacagagctgaacgcacaaggaaagcgggggcggtgttgatatga

SEQ ID NO: 194857 - DNA, 321 bp, Klebsiella oxytoca
atgaagatgccctataaaagcgaccctaacctctggtcaatgattgtcgctttcggcatgactctcgtcggcgcaatagccagttactccttcaaagtcctcaacggcgagtcgtttagttggaggacaatgtgcctacagctcatcgtgtcgatattcgccgggcttatcatgatcatgattgctattcactacgcttggcctcaggaagttaccggaggcgtgtgtggtatggctggctggtctggttcgtcccttatcaaggctctggaaagtcgttttctgagcaaagcggcggggaaagaagaaaccaatgactaa

SEQ ID NO: 194858 - DNA, 255 bp, Klebsiella oxytoca
atggatttaaccaaatttataacaccgctgaaatccaatgaggttgagtttgtaatcattggtggaaagcgtgatggcgaacgtggtgtgatcgacaagaaagttcacacccttaacggcgacggcatataccacaagaagcaaataacctgtggtggatataccgcagtattttttgtttcatccgacatgggtgatgcaaccccaggtgaagtgatgtcagtcctttgtcacggataccgaaaatccaaatag

SEQ ID NO: 194859 - DNA, 519 bp, Klebsiella oxytoca
atggcagtaagagagctcaacttaacaaaagaccagcaagactggcttgagggatggctggagttgtggggcgcatgggtgtattcgggtcgactggaaaaaaggatgagcagtgtgatcgctcagtttatggaaagagtcgagccttcacgggtaatgaccaggccaatgtgcaatgacgatgacggaatgttgatttctcaggtcgtagattccgttatgcgcatcgacacaaaggcctttggcattcttcttagctactattctcacggctcatcaaagagagcaattgcatcgtactatcatgccaccgcaaagccacgcaaaatggccggcagaagcggagagggttggaggaagccatcactggcaacatgcaggaatgaaatcgacgacatcctcaaagcttcactcttcgttttgtaccaaccgatgcaagatgcttttaaaatgcgtaaacgagtcgagaaaattagacatgttgccgttaaaaagcttgacattgcattatccatttag

SEQ ID NO: 194860 - DNA, 612 bp, Klebsiella oxytoca
atggctaaacagccgcggcgaagatgcaaaaacgaagagtgcagagagtggttccatcctcagcactcaaatatatggtggtgctctccggaatgcggaacgaagatagcacttgagcgacgaagcaaggagcgcgaaaaggcagagaaggccgcagataagaaacgacgaagagaggaacagcagcagaaagacaaactcaagattagaaagctcgcattaaaaccccgcagttactggattaaacaagcccaacaagcagtaaacgccttcatcagagaaagagaccgcgacttaccctgtatctcgtgcggaacgatcacgtctgctcagtgggatgccggccattaccggacaactgctgcggcgcctcaactccgatttgatgagcgcaatatccataaacaatgcgtcgtatgcaatcagcacaagagcgggaatctggtcccgtaccgggtgaacctgattgagcggatagggcaggctgctgtagacgaaatcgaatctgaccataaacgccaccgctggactatcgaagagtgcaaagcgattaagtcagagtatcagcagaagcttaaagacctgcagagagcaaggggggaagcagcatga

SEQ ID NO: 194861 - DNA, 177 bp, Klebsiella oxytoca
atgttctccttttgcaaatatcgtggcgggttctggttgcgagtttttggctatgggctggctgtaaacgacagaagccagtacgcgcctttcagtgtacgcaacgggtatcagcgtgagctacggattggccggtatgggattaaatttctcaatcgaggtcagaacaatgcataa

SEQ ID NO: 194862 - DNA, 843 bp, Klebsiella oxytoca
atgcctgatgaaattgaaactatagataaaaacccaaaatcatgggacgcatggaaaagggaagcagaaaggctgcaagcaattatcgacgacatggcgctggccgcaacggacagcagcgagtcggttgaactgcctcttgactacctgcagggacacaaagacggtctggagtgggccgctcgactggcagaagccaatcaccctgacaccggagactggctttacgatgaccctatagagctggcaaaagctattcgcaaaggtccagatatgccgccagtgcagccagcgccggtagtcagcgcagacttgcttcatacggcggcatcagcaattgaagacctgcttaccactaaagacaggacaggtgcaggtgtgtggttcgacttgccattcaagctacgctcggcggctaacgcgcagcagacggtagtgccggatgatgtgctggacgcattgcagaaggttgctcgaatacgcctcgacctgaatggcttcgacggtgatcgccgtgggattgccgattgcctgggcaatgccgaagaggcgttaatcgaggtagtaaaccgccgcgccgccatgctcgcagccgccccccagctacccggcagtgaacccgctaccgtgccgggtaaatggattccggtaagcgagcggatgccggaggatgagcaggaggtgctcaccataaacaaaatgggccatcgctttgtatcattcttcgataagcactcagggctgtttttcgacaggcttgatgcgccagcagcatgctgcatagagcacgtgctggtaactcactggatgccgctgccggccgccccgcaggaggtgaagtga

SEQ ID NO: 194863 - DNA, 573 bp, Klebsiella oxytoca
atgaacatctcaacagtaaacgaactcatcgcctccctggagagcgcaggcgagctgtcgatcagagagcagaagttcctgaagctggcgaaagcgtttaagcagctggctgcggagaatgtggcgctgcaggctggagcttcgtatttctcttacggctcagagcacaatttcgaatggcacaaaactgctaaggaagcggttgaggcggctgaggctgcaattgacgactatcgtggagatgcttgcgaaggatggagtgaagaagtcgatagcatttgctggggcatcatcatgcaatcatccacgaaggttggcgaacgcccacgcaataaagatgaccgttgcgatcccgcgatcgatacggtttgcgattatgcgctgttgcctaatatcgaaacccccgccgccgatcgcatcgtagccggaattaaggctgatggggtggaagagtttgcggcttattgcggtgaagaaaactctgtattcgttgaggccaaggcttactaccgatcattacctgatgctgcttacgagttcgccaagcagctgcgcgagggggccgacaaatga

SEQ ID NO: 194864 - DNA, 609 bp, Klebsiella oxytoca
atggacgcactcaagcaacgcatcatcgacttcataaaacagaaccagccagtaacagagcagcagcttaaaaacgggttagggatatcgcttaatgcctgcagacagaatcgacgccttctgcgcaatgcaggtttgatttatgtcacctgtggctcaggagcatttatctcccggagtgattttgagttgtggcttaaaaacggcggtggtcacgaaaaaatgagcgcatcagccaggcttggcggtcgtggaatgacatctgacaaaaccgcaaagaaaagagtgattgattacctcacttcgaagaacgagccaatgtgcgctggcgaaatagccaaagcatgcaagctaagcggtaagtcagcctataggattcttgcgagcctgtatgatgatggtaccgtctatcacgatgggaagttaaaaggccggcagtacctgattgcatcagagcagaataagcatttctcaaactctgacgtagcttacgaagcgaaagtaagggcgtttgtcagatataacccaaagcgaaacggagttattcaagcatacatggcaagcccggcccgcgctcggctgatggctgtatacgggaggatgggatga

SEQ ID NO: 194865 - DNA, 1404 bp, Klebsiella oxytoca
atgaccactgagattattacgttgcctcacaacatcgaagcggagcagagcgttatcggtggactcttgcttgatgacgaccatagcgagcgcgtccagaaagttctggcaatgctcaagcctgagtcgttttatcttcgggttcaccagattatattcgccgaaatccggcagatgcttcgagacaacaaaccggttgatggattaactctgtttgactcgctggaaagcaaagggcttattgaacagattggcggcttcgcttacatcgggcagattgcaaagaacacacctagcgctgcaaacattgtggcctatgccgcatcggttcgtgagtctgcaatggagcgctacggcatccagcgtatgacagaggcaacagagttactctacgccagaaacggcatgagcgccgttgagaagtacgaagccattcagagtatttttacccaactaacagaccactcaaagactggtagccggcgcggtgcaagaacactggcagatgttgcagatgattgggttgccgaagtggaaaagcgcttcgatcccaatcagcgctcaagagggctttcaacaggcattaagtcactggatgagatgctggaaccaaaaggacttgtgcgaggttctctgttcgtcattggtgcaaggccgaagatggggaaaacaaccctctacagccagctggcaatcaactgcgcactgaacgaaaagctaccatccatcatgtttagtctggagatgcccgataagcagattctggagcgcatgataggccaggcatctggcgtcaatacggatatcttctaccgcggcgctggccgagatgaggagttcgcaattgcaaacgcccgtctcgctgagatggtggagagccagaacctctacatcgatgatacccccggagcaagcctgtctcacatcatcgctgagtcacgcagaattaagcgtgagcgcggcaaagtggggatggtgctggtcgattatctgactctcatgacagccgagaaagcagaccggaacgacctcgcctacggtctcatcacaaagggcctaaagaacctcgcaaaagagcttgagtgcgttgtggttctgcttacccagcttaaccgtgaccttgagaagcgagtaaacaagcgaccactcccaagcgattcacgagacaccggtcaaatcgagcaggactgcgattactggatgggcatctatcgtgagggggcttatgacgagaactatccgcaaggcgataccgaattgctactcaggctaaaccgtcatggctctggcggggttgtctactgcgaacaacgtaacggagcaatttatgactgcgaccagatacaggccgaaatgaaacgccgcgaccgggagcagaggccaaaaaacaaagggggattttga

SEQ ID NO: 194866 - DNA, 897 bp, Klebsiella oxytoca
atgagtaacgtatctaacttagccgaagccagagaggccagaaggctccagcagccgcacaaacaaggcggtaaggggtttgccttgctgcaccgcaaaattatggatgtgccgttctacaaagacccagaggcggctcatctatgggttcacttacttctccgggctaactatgaacagaccttagtttctacagatgtaggtgatgtcatatgtgatcgtggagagttcattaccgggcggaataccctggcaatggaaacgggattgacggcagatcgcgtcaaagcgttgctgcgaaaatttcataatctcggcatgataaccacgaaatccaacaacagattcactgttctaagggtggttaaatatgacgaatatcagtcaaatttttgtccagccgatgtccagccagtgtccagcgcaaaaccagcaataccaacgcctgtaggacagcagtgtccagccgatgtccagccagtgtccacagataaagaagttattaatatctcttctactaacgtagaagagagtaccgtagcgcagccaaaagctgagaagaaaaaatcctcagtcagttgtcagcaagtcatcgatacctaccacgaattactacctgaagcgccaaagattcgggcgctgaatgacaggcgtaagaactcgattcaaacgttctggcggaaagccgggtcaatcacccggcaactggacggacatggattcaccctggaagactggaaatcttatctgagctatgtagcgacaaattgccgctggatgttcgaagagcgaaccaatcatcagcgtggaaccgtatggcacaaaaaaggcctcgacttcctgctgaacgacaacacatatctcaaggtcagggagggagaacacgatgaccactga

SEQ ID NO: 194867 - DNA, 300 bp, Klebsiella oxytoca
atggaaaactcaattaaccgcaacaaggtcaatgcccggcgcattgagtcctggttgcttaaccgaattgctctgaaaggtggcaataacgtagcaaaagagattggcgtcgataaagcgcagataactcgctggaaagaaagctggctgccgaagatggcaatgctgcttgcggttctggagtggggtgtcgttgatgacgatatcgcaagactggcgaaggaagttgcagcggttcttacaaagaaaaaatccccggcatctaggactgaatgcgatcagataacgatgaatttctaa

SEQ ID NO: 194868 - DNA, 219 bp, Klebsiella oxytoca
atgagcaatcttcggaaatacagagaggctctgaaggtctctcaggcaacattagccgagcttatgggctgcactcagccagcggtaggccactgggaatctggtcgtagaagcccagaccttgagacgtgccgtgagttagtgaagtcacttaataaactcggtgcgaaagttagtcttgatgacgtttttccgccatcagaaagtaacgcagcctaa

SEQ ID NO: 194869 - DNA, 654 bp, Klebsiella oxytoca
atgaaatggcatgaactggctcgctcaagaatgaaggagctaggagttactcaagagaagttagctgaagagcttgggatgacgcagggtggcattgggcactggttgcgcggttctcgacacccttcaattgaggaaatagcaaaaatctaccggtatttaggtgtcaataacgtatcgtttaactccgatggtacattttctacatcaggcgaacaatcctctacgcctgttaagattcagtacagttaccctttgttctcacatgttcaggctggactattctcaccggagctatgtacttatacaaagcaggatgccgagaagtgggtgagcacaaccaaaaaagccagtgaacatgctttctggcttgaggttgagggtaactccatgacagccgcagcaggttctaagcccagctttcctgagggcatgctgattctggtagaccctgaagagtcggttgatcctggtgatttctgtatcgcccgtttgggtggcgatgagttcacttttaagaagttgatcaaagagagcggtcaagtattcctgatgccgcttaaccaacaatacccgatgataccatgcaatgagcaatgcagggttgtcggtagggtagtagcctcaaagtggcctgatgagacttttgaatag

SEQ ID NO: 194870 - DNA, 759 bp, Klebsiella oxytoca
atgactactacagtttatgaccgattgaataagctcatagcaagcgattcaaggtggtcttgcgatcttacggacaagggctatccaggacacatcttatacattgatgatactggctttgggaagatagctgatagaaacgactttgttatgaccttggctggtaacggtcacttaatcgagctttggaaagtttggtggtcaggagacttatcagaccaagagcctcctgtagttctacctactggacaatcagtcgttttacacatagtcaaaaaatcgacaaatgaagtcatctttgacaaagggaatatgcttgctgcaacttgcactcaaaccagggagctccaggcggttttttcaggttcaggcggtggggttgccgctcaaaactggctatcgtcgcattgcgccaagacagcgattgacgaagcaagaacaattgatccgttcactgggggctcggtaaggtttgtagactttactagcaataaagtaaatttagaaaattcagtgagcactatctcagaagttaaccaagctctattgatgagggggcttattatggataccaagaatccacacgttgcacacgtatcgatcagcgctcaggaagttgcagacgttcgtcagatgttggtgaatggaaacataaccccatgcgcaccggtcggaaagaaaacacaagattgggatgaggaatcaaaagccagacttagaaccgctattaatagaatccgtgtagaagaatcggcttga

SEQ ID NO: 194871 - DNA, 219 bp, Klebsiella oxytoca
atggaacctgaatacatctgccggataacgtgtgagaccactctcacgaatcttttcaggcatgacgctatttatgatgttatggaaattgacggtgaatattttgtgtttaatgaccgttacgaacaccaagaggtttttaagtcagattataacgaaaacatctggctaacagctgatggtaaaacagcgagatttctggagtgcaacgcaagataa

SEQ ID NO: 194872 - DNA, 627 bp, Klebsiella oxytoca
atgacatccatccgattaacgaatgcaattcgcgagcaaatcgctaaaaacgcactgataaagtccggaattgttgcagcacttgaagccttgcaggttaagcgccatgaagtggcaagggatgcacgtgtctttgcttttggtggcgcagagaaaaccgcaaaggctgataaggcgtatgaaaagctggaaaaagctttgtctgaactccgcgaatccggctgttctgcttacgcatcaagcggcctatcgtcctcaatatatatatctatctccgggcgtcaacttggttggtgtccttacggaaatgacgctaagggcggggatattctccaggttactccgaaccgagacttatgccgctttggtgcggagcatgaaataacgaagcgctttgatgaaattatcaatgaagagcaaaagttgaatgatagatcaaaggaaattaaagcaactgtatgggcggcgctaaactccgttaccaccctgaaacgcctcgtcgaagtctggccggaaagcaaagaacttatccctgaaaatagcgatagcgttaaatcaacgcttcccgctttaaaggttgaagaccttaaccggatgataggacttccaacagaagaagccacctaa

SEQ ID NO: 194873 - DNA, 222 bp, Klebsiella oxytoca
atgagcgcagaaatcatcgatcaggccagcgagcttgaagagcttctccgcaataacgctatacaggctcaccgcattaaccacaacgcagtatcagcaacagagtgtgaagagtgcggcgaaaaactgacggatgcccgccggaaagcatatcctggttgcacgatgtgcgttagctgtctggaagagattgagtttcggaagaagcaagggaggatgtga

SEQ ID NO: 194874 - DNA, 555 bp, Klebsiella oxytoca
atgactctgttagagattttagtgcgggagtttccgaagcgtggcggatggccggcacaatttaaagtcgcacatactgatggtggccgactgaaaattgtctttgagtccagtgcattcatgccatggggtgccccttggtcagaaaacatggatattgaacctggaatcgtcactcgcgagcaatacgaagcggcacttgcagcagttgagcctgaatggaatggggatgagctgccgccagttggtgttaactgcgaaataattttcgaagatgatacaccacctaaatggtattcattcgtagccacttttattggttcgaatcatatcgtggcgctggtaggaatggaggagcttacctacaaaaaaagtgatcttctcagacctggtgttaaatttcgcgctatctgctcagaagccacccgaaagcgcgacgagtccatagatttcattgccgagttatgccgctcatcagcaagcaatggtcactctgcggaacttatctacgacgctatagctgccggaaaaatcccacacctaaaaatcgtataa

SEQ ID NO: 194875 - DNA, 171 bp, Klebsiella oxytoca
atggaaatcgcttcgttaaacccaatgccgacgtttaatttcaatcatgaatggccgcgagctcagggcagtgaaaaggatcggcggcttctttcagggagtcataatatgcaatgtactcactattgccgggcgattatgcattatttgcagcaacaggagcgtatatga

SEQ ID NO: 194876 - DNA, 1755 bp, Klebsiella oxytoca
atgcgctgtgctctgggcgttacgactgccgtttcccgttcatcccgaaacccgtcatggccgatagtgatgcaagccttcccctcgccgggaaaatattccggaccggaaaaaatcataaccgatagcctaagtgagggggcgatgcgaatgagtgaattactgcagcagttaacccgcagctgttttcccgatcggaatgcgcttgaggcgggacaacaacaggcggcgctgtggcagacgtggctgctgccagtgacgacggagtctccggtcgggagagaccccgtctaccacgacgatttccagctgatgcgcgacgagctgaataagctttccggcgcggataccgctctgatttgtcagcttgcggaatccctgctgctcactcaggcaaaagatgtacgcatcgccacctgctatatctgggcgcgattgcaccgcgacggcgaacgcggattagcggaaggtctcgccctactggccgggctggtgcagcgcttcgggacgcaactgcttccctctcgtccggcgggccggaaaatggcgctggaatggttaactggcgaaaagatactcgacagcctggcgcgttacccggaagtggcaaaagaagactttgccaatattgtcgcggctctcaatctgctggacgcttctttttctacatggccggaagaacaacagccgccgtccctgataccgctgatccaggcgctggagtcgcggctggcgcagtcgggcgggatgagcgcggtggtgccgcagaacagcgcggcaaccgcttcacctccgacaaattcgctacagatacagtccatcagttccgggcgcgacctgctggatcaggcaaaagcgctggcccgctacctgaacgcgcagccgcagggctggctggcggcgcatcggttgatgaaaactctgcgctgggacaccgtgcatgaactgccgcctgatgtggatggcagaacccgactggctccgccgcgtagcgagtcacgtactcagcttaaacggttgtactcgcaacagaactggaccgagctgctggaacaggccgacctgatgttcagcgccggggtcaatcatttctggtttgatattcaatggtatttgtatcaggcgctgggcaaagcgggcgcgccgtgggacaagtggacggcaattatccgccaggacctgatgctgttgcttgagcgtttacctgggctggagagcctggcgtggaacgacggcacgccgtttgccgatgaggtgacccgcagttggattacccggcaggtgctgccgcaagatgaggggaactggcttagcaggacgccaacggccccggtggaagagccggacaacgatgtgctggcgctggaaccggaggcgctggcgctggcggaccgcgagggcgttgatgctgcgctgggctggctccagtcccgtgcggggatcgtcacggcacgccagcgtttgctgttgcgtctgttgatggctcgcatagcggagcagtacggtaaaagcgaaatggcgctgctgctgctggaagagctgcatggcgctgcgcaggggctgacgttgacacaatgggagccggagttaattttcgaagtcacggcacgacagctgaagctgctgcgcctgcgggcgcaccgctatgcagataaagcccatctggcgcggaaaatggaaaatctgctggcggcgctggtggcgatggatcctgcgcgggcggcagtactttgtgatacgcaatataaagactga

SEQ ID NO: 194877 - DNA, 186 bp, Klebsiella oxytoca
atgctgattgccctgaatcgcgaggctgagctgaaaatgcatctgcgggcggcgtttaataacggtgttacccgcgatgagttaaaagagttaattatgcactccgcgctttactgcggcctgcccgcagccaacgcgacgatgcatctggcgcagcaggtgtttgatgagatgaatgctgtttag

SEQ ID NO: 194878 - DNA, 2502 bp, Klebsiella oxytoca
atggctctggtaattgaattcatatgtgatttgcccaacggcgtacatgcgcgtccggcaagcctggtagaaacgctgtgcaatactttttcatcttcagtcgaatgggtaaacacccgcacagaaggacgcggaaacgccaaaagcgcgctggggattattggcaccaataccttaaagggcgaccgctgccagcttgttgtcagcggtgaagatgaacagcaggcgtttaatacgctgacggcgttcatcaccgacgagttcccgcactgcgatgcgccgctgccggcggcggagcaaatggccgttcagccggttcctgaatccctctcgcgtcttaatcctaccctgtttcacgcgctgccggtctgcgccggcagcgcgggcggcaggctcacccatcttaagtccctcgacctgcgcgattcaggcgcgctgcctgcagcgggcgcaattgaacaggaacaggcggcgctggacaggggcctgaccctgctggtgaaaaatattgagttccgcctgctggataacgacggtaccgccagcgcgatccttgaggcgcatcgctctctggccaccgacgcctcgctgcgccagcatctgctggacgggctgttgaacggtctgagctgcgctgaagcggtggtcgcgaccggcgaacatttttgcgcccagttcagcgcttccggcaatagctatttgcaggagcgggtgctggacgtgcgcgatgtgtgcttccagcttctgcagcatatctacggtgaggatcgttttccggcaccgggtaagctgaccgaagaggccatctgcctcgccgatgaactcacccccagccagtttcttgaactggataaaacgctgcttaaaggcctgctgctgcgcagcggcggcaccacttcacatacggtgatcctcgcgcgttcgttcaatattcccaccctggtgggcgtcgatatggaggcgctgctgccgtgggtcgatcgccgggtacagattgacggtaacgccgggctggtggtggtgaatcccgatgaagcggtggcgcgctactatcagcaggaggcctgggtacaggcgcaaatccgccgccagcagcaggcctggctggataaagagggccgaacggaagacggtattcgcctggaggtggcggccaacatcgcccattcggtagaggcggcggcggccttcaacaacggcgcgcagtcggtaggactgttccgcaccgagatgctctatatggacaggcccagcgcgccgtcggaaaacgagctgtataacatcttttgccaggcgctggagccggccaacgggcgcagcattatcatccgcaccatggatatcggcggcgacaagcctgtggcctacctcaacatcccggcggagaataacccgttcctcggctaccgggcggtgcgtatttatgaggagtatcaggcgctgttccgcactcagctgcgggcgattctgcgcgcttccgcgcacggcgcgctgaaaatcatgatcccgatgatctcctcgatggaagagatcttatgggtcaaagagcagttggcggatgctaaacagtcgctgcgcagcgaacatatcccgtttgatgaaaagatcccgctgggcattatgcttgaggtgccgtcggtgatgtttatcatcgatcagtgctgcgaagagattgatttctttagtatcggcagcaacgacctgacccagtacctgctggcggtggatcgcgataacgccagggtgacgcgccactacaacagcctcaatccggcttttctgcgcgcgctggattacgcggttcaggcggtgcatcgtcaggggaaatggattggcctgtgcggcgagctgggggctaaaggttcggtgctgccgctgctggtagggctggggctggatgagctgagcatgagcgcgccgtcgattccggcaaccaaggcgcgtctggcgcagcttgacagccgcgcctgccgtcagctgcttaaccaggcgatgcagtgccgtacttcattagaggtggaacatctgctggcccagttccgcatgacccagcaggacgcgccgctgattactccgcagtgcattacgctgaacagcgactggcgtagcaaagaggaggtcattaagggcatgactgataatctgctgctggccgggcgctgccgctatccgcgtaagctggaagccgatctgtgggctcgcgaagcggtgttctctaccggcttaggctttagcttcgccattccccacagtaaatcagagcatatcgagcagtcgaccatcagcgtcgcccgtctggcgcagccggtagcgtggggcgacgacgaggcgcagtttgtgattatgctgacgcttaataagcattcggcgggggatcaacatatgcgtattttctcgcggctggcgcggcgcattatgcatgaagagttccggcaatcgctggtgacggcgcagagctgcgaggcgatcgcggcgctgctgcagcgcgagctggagctgtaa

SEQ ID NO: 194879 - DNA, 1278 bp, Klebsiella oxytoca
atgaagaacaagagggcaaaacgagaagtaaaaccgaaggacaaacgcgatcgttatcttcttctcgatccgtgtggcgtgtacatggtgcgaatcaccgtacctacatacatgtcggcctacttcgggggaaaaatgtactttatgaagtcaacggggactcgtgacattcgtcaggctcgtctattccgggatgcaatagcgttagaatggtacaaactgcgcgaccaactaagaccggtgcgccaaggctcccggattgagcagatccttgatgaacttcgtggcattgggaaatacgcgaaggagacgccagcggcatccttgccacaatccacacattttaacttccccggacaagttcagtcttgcccttctcttctgaaaatgcgggatctgtacattctgcaatttagtgagaaacgtaaactgaccacactgtcaaagacaaataaggccgtcgaagtcttattgtcccatcttcgcaagcgcgatattcaattgaaggatattaaccgtactgttgttactggctggttggataagttgaaaagcgacagagcgccccagacaattcaaaactacattagcgccctagctcaaatctgggatttagcccgtaaccgttatcacgatgcgccacaggataacccctggcgtggtcatgggttggaggcgaaaagtagcaagataagctacgaagtttttacccatactgagttggcgaaggtcttcgctgcgatggatggtgacgaagaaatgcaggccgtaacgctgatcgggatgtacagcggcatgaggctgaatgagatttgctctttgcaggttgggaacatccgcgagattgagggcgtcctatgcttcgaagtgacagaagggaaaaccaaatcagcggcgcgtatcatcccggtacatagtcgcattattgatttggtggagtcacttcttcagaagcctcatagcgggtttcttttctaccgtgcgtcaatcattgagcgtgcagacggcaagcgctcaacgtggcatacacagcgatttacacgagctaagcgtaaagctttaggagagcaggggacagagcggaaggtgtttcatagcctacggcatgaagtggcccagcagcttgatcggaaccaagtagcagaggacaggatcgccttattgatgggccatgagcgcggaaagacagagacctttaaaacgtactcaaaacatgcggcgtcgccagtggagctacggcattatgtggaaaaaatatcatttaaaatcaattggtaa

SEQ ID NO: 194880 - DNA, 330 bp, Klebsiella oxytoca
atggccgtaccttaccatgtgaaaaattttcacatcgcggaaactactgatcctgaggacatcaagcgcgttcacttagatgctcatttcatcaactctaacaggcaaaatatttctaaggagtattggcttgttgaggttattgggattggttctacatacaccaatgcagatataatcaatattataagtacaggctttagctacgccatttctaacaaggctaaggtgaaagtatctgtggataaagaccattcctacctttatttttaccttccttacaatgatggtgaagaaatgtttaagttcacaggcgaggagattaaataa

SEQ ID NO: 194881 - DNA, 210 bp, Klebsiella oxytoca
atgaaattacaacttgtaggtaaaggcaatctgccgctactgacgtttattctggatggctgttctgatgataacattttgaatctatccagccttgcccgtcgtcttggctgtagccgttccagcttgcttgaccgcatccacatgtatggattcgatagcgcagtgagacactacctcaacgagaaacgaaagaagaacattaactaa

SEQ ID NO: 194882 - DNA, 345 bp, Klebsiella oxytoca
atggcattcgaatacgaaagcaaaaccccacaggacgtgttggtttataccgattcaccgatctttcataagcgtaccgtgatccttgatctggctgctgacgtgacttgtggtgatgtgattaacccgaccactggcgcggcatatgttgcagccgatgctgataactgtgctgtagctctgcaaaaccaaattgcaggtgatgcccgtagcctcgttatcagtgatacccaatgtgttttcaacccagcgggtctggttgtagcggctgctgcaaaagatgctgcatacgctgcccttgttaagcaaggcaaccgcattgctgttgcaaacaccgcaatctaa

SEQ ID NO: 194883 - DNA, 2160 bp, Klebsiella oxytoca
atggctaacattatagtatctaaaaccataaacgaggtcacctggtctgtggaccgcaccagtttcggtcgtgccttgaaagctgttaaatctctcaaagccgctcacgagaggcccgctaaagcgctggaaaaagtgcagaagcgtaccgcccagagtgaaggcaaagcagcccttgaagcagcccgcgctcaaacacagcgcctcaaaatggctcaaaagctttcgctagagcaacaacgccaggcccaagcccaggcaaagatcgcaaaacaggaagaggctcacgcccggaaaatgcaggctattaacgctcgtggtgcagtccagcaaatcaatcaggccgatcaactggcgaaacagaatgagcgccttgcccgtattagcgcgaaggtcagagcggcggcacggtcaagatcgatgacctataaccccagcatgggcggcacagctcccgaaccaggattattagcagcgcaaacagcagcaatgaatcgcggtcatgcttctatcactaacgatattatccagacgaaaaaggctatcgcactggaagagaagcgtcagcgtgagaaagaagccagcctcaagcgccagagcactgcatacgatacactccgcagggccagcttgacgatcagccatatcgaaggtgccagcctggctgacaaaatgaaagcggtgcaggcaatcaaagaggcgacccggggttacgccgagcagcgttataccattgcagagatgagacacgagctagcgaaggcgactctggaaaccagacgccaggcacgattaaaccgccagattgttaatgataaagcgaaatctgagcgggctggtcgcattaatgccggacgtctgacccgtgaacgtagcgaacgtggttatggtggactgacgacggcaggcgttattgcaggtggttccctgattggtagcatgggtgttgctcgtgttggtcagaccctacaggggagcctcgaacgttcacgcgatgtgaaaaagctgcaacagtatggaatctcacaattggagtttaccgcacttcaggatctggctatgaatatggcggggatctctctaacagcggattccctggctgataaaactaaggacaccagagaaaaagccggagaattgctgaataccggttcatttaaacgcaactctaaaacaggtgctgtaacgttttctgggggcggtgagttcgcagatatcatcaataatgtgctgacctccaccaacggcaaccagagggtagcccaaaaggtgatcggtgaactccaaaaagggacctttgtagactttattatctatttgaaacagttgcagaaaacttttaaatggacagataaccaggtcaggcatcttgcggaagccgtgaacgatggatctcaatttctaaatgtattctccgatcgaggggataacatagtggaccggatgcagaaactttctgctgaaggatggaccctatctgatgcacagcaagccaacctcgataagttggtagcattaggagctgagtacaaccgagtgcaaaccagtctctctgaccacttttcaagcgcctttgtgaatgggcttcaggattacgccaccaatacggatacactccgccagtcaatgaccggattaatcccgattgctgacaatctgggccaatcgctgggtgaactcacaactaacgttatcgcgtgggcctcgcaaattggcggagaacttcagaagggtgcaactctaccgaccgctatctataacaccaccgttgatgaaggcagcaatgccgcagcgcagtggattaaagataagacaggttttgatcctcgtgtcataggtcagacgctcaaacagatctacccgtggctggatagttctgcacagaacaacatcggcagtggacaggcctggacaaatccggggttaacccgtggggttgcaggattcagtcaaccacaactcacctttactccgcctgagccgttcggttctactggatggagaccagacagctccaggtttaatctgactggtgaggcgacggtcaaggttgaggttgagcagactctgaacgctggggttttagataatctcattgatacaaagatcaacgataacaacgtcagacagcagaatatgatattggggatagctgattaa

SEQ ID NO: 194884 - DNA, 540 bp, Klebsiella oxytoca
ttgtgtaagcaagcaactggcgattgccagacgactaacagccaccaggctgacctagaagaaaaaattcccgacctaactcgacttttcaaaaatcgcgcacgagatagcgacgttatcaaaaaatgcaaacgcctcctgatagccggaatgcctccgggcagggtggctctggtctgtcggctcccgctggaaaaggtcttggaactgtataacagctacaacccccgctgccgtcgttttgcgaaccgcaactcctaccaggattcaaaattagccctaacgatgtttcatcaaggtgaatcactcgctgatatctgtgctgcgctgggtggcctacacctgtacacggtggtgatgtccctccggcagaatgggatcgcggagtccgctattgaacagcggctaccccctgaaggcgaccccttactaatcgaatatcaacgcgtctgcaaaaggaaggctggcagcagatataaagcgatccagattaatccggtccaacgagtcaacgtggcgcaggcaactactgcccgatag

SEQ ID NO: 194885 - DNA, 807 bp, Klebsiella oxytoca
atgaacagcagagcatcgcaaaataagccagagctatggattgaagaagatcgccgccttttctttgcagaaaccatcacaattaaagcaactggtgaatgtttcaacattgaggacaaacttgaaaagattcatacctatatgcttgaccaatataacagttaccgtgctgatggtaagaatttctatgaagatcagcgggatattgcgactaaatgtaaatgcacgccaaaaactcttggcaagtggctgaaagttcttcaagcacttggtctacttatcattgatgagagccagaagagccacgcttacacggtgcggtcagtagtcagccaggaacacaacttgattttcagctatccgaaattgttgaacggcaagccgtcatacgaccatgaagaggcgcttaaacgcctttatgcatctcagggacgtaggaacgtaaaaaatcatcagccaaaaaccgaagagagcggtaagaatgagcaaaaacctgttgtggaatctttcatggtggaatctgccgcgcctgttgctggaaaaccagacggcgtacctgttgtgggtgctcctgtcgatgatgctctacccattgatgataatgtacccctgagtgggccagacggggaaaatgttgttgagtttccccgcagtggtagacccaagcttagctttaaatttgtatcaccagatgatgacgacctagagaattattctgaagcgccccaagttgattttgacaaagatgggcagccgccgaacaagtggagagattttgatatggctacaacctgtgactttttatga

SEQ ID NO: 194886 - DNA, 192 bp, Klebsiella oxytoca
atgaatttgaagattcaacagcacgtatacgccggacttttagaagaagcgaagcgccggggaacaactgttccaaaccttgcacgcgaagtgctagaaatcgccgcccatctttttgataacggtgaacctttacccgccttggggaatattaatggagaacataatgaacagcagagcatcgcaaaataa

SEQ ID NO: 194887 - DNA, 393 bp, Klebsiella oxytoca
atggaattcgtccaaggcaaagacagctttaacgagatggcaactggaatcctggtgaaactgtttgcggactatccggcttactcttctttcgaattttcagacttcggctggaagcccagaggagacagaactcagattgacctgctttgcaacacactccaggctctcagcgatatgggttacacggagataatctcttcaaccgacagggataccgccgccaagttaactccaatgggcttaaagttgcttcaacagcaagcaccaggcgctagcgaaaccataatcaacgttctgaaagctggggctgaacaggctggaggcgcggtagctggctcaacgatgagcgctctgcttgactggatttttaaaggcaataaaagccgataa

SEQ ID NO: 194888 - DNA, 174 bp, Klebsiella oxytoca
atgagcaaatcacccaaaccgaagctgagccgggctgaggcgaccaaacgcaataaccgcaaaatccatgcccgcaagttcctggcaacgccagagggcaaggcttggcttgaacgcaaactgaacgaagaagcagaaatgaaacttgtttctgaggtaaggaagtttctttga

SEQ ID NO: 194889 - DNA, 261 bp, Klebsiella oxytoca
gtgctcccgctctcaagggatctcaatataaaccaccggttttttcataatgcatttcaccgcgtcgacgatctgctgcggctgcagcagaaaagttttgatgctggtcttaatggtgcggatgccgttgaagcgtctggcatcgtcaatttcaatatccgtcaccagcagaacgacatcggcatgggcaatatcgtcagcggtaattttgttctcaacccccagcgcgccctgggtttcgattttgatattccattttaa

SEQ ID NO: 194890 - DNA, 1143 bp, Klebsiella oxytoca
atggccctgctgaaggccatcgaggcgggcgtcgacggcgttgataccgccatctcttccatgagcgccacctacggccacccggccaccgaggcgctggtggcgacgctggcgggtactgagcacgacaccgggctggatatcctcaggctggagagcatcgcggcgtacttccgcgaggtgcgcaggaaataccacgccttcgaaggccagctgaagggcaccgacagccgtatcctcgtggcccaggtgccgggcgggatgctcaccaacctcgagggccagctgaagcagcagaacgccgcccaccgtctggatgaggtgctggcggaaatcccccgcgtgcgtgaggacctcggtttcatcccgctggtcaccccgacctcgcagattgtcggcacccaggcggtgctgaacgtgctgaccggcgagcgctacaaaaccatcgcgaaggaaacggccgggattctgaagggcgaatacggccacaccccggtcccggtgaatgcggcattgcaggcccgcgtgctggaaggggcagaagccatcacctgccgcccggcggacctgctgaagccggagctggcgcagctggaagccgatgttaaacgtcaggtgcaggagaagggcatcgttctggcggagaacgccatcgatgacgtgctgaccgtggccctgttcccgcaaatcggcctgaagttcctggagaatcgcaataacccggcggcgttcgagccggtaccgcaggctgaagaggtcaaaccggcggcaaaagccgctaaaccggcggcctccggcgtctacaccgtggaagtggagggcaaggcctttgtggtgaaggtcagcgacggcggcgatatcagccagctgacggcggccgcgccggcagcctcttccgccccggctcaggcggccgccccggcaggcgccggcacgccggtgaccgcgccgctggcgggcactatctggaaggtcattgccgcggaaggccagacggtggccgaaggcgacgtgctgctgattctggaagccatgaagatggaaaccgaaatccgcgctgcacaggccgggaccgtgcgcggtatcgcggtgaaatccggggacgcggtggcggtgggcgacaccctgatgaccctggcgtaa

SEQ ID NO: 194891 - DNA, 2544 bp, Klebsiella oxytoca
atgtcaataaaaaataataaattgcgacctgcgcgtctggcgacgcttatcgccttcgcgtttaccggtatttcacaggggctgtatgccagtgattcgtttaatacggcgctggtagaactggataaccccggggtgggcaaagcggatttatcggctttcgagtctggctcccaggcgccgggaacataccacgtggatattattcttgatgaccagctaatggatacccgggatattccatttgcgatggcaaagaccgctgacggtagtgaagcattacagccctgtttgagcattgaactcttaaaacagtggggcgtgaaaaccgatctttttccccagttggcggtagaagaaagtgattgcgccaatctccaggcgattccgcaggccagcgccgattttcagtttggcgcccagcggctggtcatcagcattccccaggcggcgatcgacctgccggcaaggggctatgtgccgccggaaatgtgggatgaggggattactgcggccatgctcaattacagcctgagcggagcaaacaattgggcgaaaacgggtcaaggcgccagcagcgacagccagtatgcgaacctgcgtccgggtatcaatatcgggccgtggcgttttcgcaactacaccacctggtcacgggaatcctccggccaggataaatgggataccgtgtatacctacgcacagcgcgccattattccgctgaaaggccagcttaccgtcggggacagctccgcgcctgccgatgtgtttgacagtatgccgtttcgcggcggccagctggcgtcagatgacgatatgttaccggattctcttaagggctatgcgcccgtggtgcgcggtattgctcgaaccaatgcgcaggtcgtggtgcgccagaacggctatcagatctaccaaagctacgttgcgccgggggcgtttgagattagggatatgtatcccaccggcggcgcgggcgacctcgacgtgacgattaaagaagccgatggcagcgaacagcacttcacgctgccctacgcctcgctgccggtattgcaacgggaagggcgcttaaaatacgccatcaccggcgggcaatatcgctcctataacagcagcgtggataagacccctttcgggcaagccaccgcaatttatggtctgcagcacggcattaccctctatggcggcctgcaagagtcaagcaaataccagtcgcttgcctttggcgtgggcaaaaatatgggagcgttaggcgctatctccgccgacgttactcagggctggtcaacgccggataaaaaggaaaaatcacagggccaatcctggcgagcgcgttatagcaaaaacttcgccgggaccgggacccacttttccattgcgggctaccgctattcgaccagcggctattacgggatgcaggaagtcctcgattcatatggcgacagcagcgcgctgcaggagcgcaggcgcaaccgcgcggagctgacgatgagccagacgctgagtcgtgagctggggtcgcttaccctcagcgcggcgcgggaagactactggaattccgccaggtcgatggcttcctggagcgtcggatacaacaactactggcgcaatattagctacggcctgacctggacatacagcagaaatggcagcgctgcgtcatacgacggcgggcgcgggcgaaacagcgaccatgaccagcagttggcgtttaacgtcagcgtaccgctggagaaattcctcccgcaaacgtgggccagctatggcatgaacgccagcaagaataacggaacgacgcacaacatcggcatcaacggcgtcgcgctggaaaacaactcgctgaactggaacgtacagcagggttacggtacgaatggcgtgggttacatcggcaatatgaacggtgactataaagccacgtacggcgaagtgacggcgggctatagctacgacagaaatagcgagcggcttaattatggtctgcagggcggcgttatcgcccacgccgacggcatcacgctttctcaaccgctcggtgaaaccaacgtcttaatcaaagctcccggcgcgtacggcgtgaatattcgcaatcaacccggcgcgcgcaccgactaccggggatatacggtggtcagcaatatttccgtctatcggaaaaacgacctgacgctcgacccgcaaagtatgcctgatgatgtcgagctggagatcaacaccgatacggtcacgccgacgcgaggcgcggtggtgagggtcgattaccttgcaaaagtggggcgccgggtactcatgaccttaacggacaataaccactttgtgccgtttggcgccgtggtgacgcttgctgatggtaatcaaagcagctttatcgtcggcgatcgcggccaggtttttttaagcggaatgcccgaacagggggcgatagtcgcaacatggggccgccagtccagccaacagtgccgtgctgatttcagcctgccgaaacaatcaacctacgctggaataaccgaagttagcgccagttgtcatcaggaacgttaa

SEQ ID NO: 194892 - DNA, 570 bp, Klebsiella oxytoca
atgagtcgtacttttgcatattgccgtgtctcgacgaacgagcagacaacagaaaaccaaatcatggcgattcgtcaggctggttatgacatccttgatagccgagtagtgtctgagaccgtctctggtggtgtacaggccatgcagcgtagggcttttgctaacatggttgatcacaaacttgaggaaggtgacacgctggttgttttaaaacttgaccgcttaggacgcgataacatcgacgtacagcagaccattaccatgttaatcgagagaggaataaaagttgtctctcttgatttgcctgtgagagacctttcaagcgctgaggggaaactcatgctacaaatgttttcatcgtttgctgagttcgaaaagtcgcgcattatagagcgaactaaagagggtttagagcgtgccaaacaggaaggtaagatattaggccgccctgttgctacagagacacgcagacgtgtacaggaagccagggagcagggattgagtcagtcaaaggcggctcaatctctggggttgggaatcgctacaattaaacgctactggaacatctag

SEQ ID NO: 194893 - DNA, 708 bp, Klebsiella oxytoca
atggttgatgataaacaagaaatacttacccattttttggaaactgaggctaaatccatcgatttatcctcaccaactttcgagaaaggattttgggaacgccctaaacttgctgcgatccaacagggagatgtaagtgtagaagcgatataccttgctgtcggcttcgctttgactcagtgggagacattagaaaatatcttggttgaacaatacttgatcttttgtggtagcgataatcctataacttacaatgccatacgtcgttccttcggtacgatagaaagtagtgacgggcgtaaaaaagccatcgatgaagcggcttatgtctatttcggtgaggatttatatcctaagggcctcgccaaaccctataaggatttgtttactgcacatggtaaagcagcccaaagacgtaacgaaattgcacacggcgtagctcgtgccatcagtttaaacggggatcacaaaggttgttttttgtttccagcagcttataactctgccagaaactctgcctttatgacccatatcaacttggatgatggcccttttctacgtgaaaactatagatacacttcaagggaaatttttgaaatagcacataagtttggtgcgctgactgacatagccctcagatgtcttgcagcatcaggaaaaattgagggtcatcataaaatcttacttgctaacttaaataaactatag

SEQ ID NO: 194894 - DNA, 342 bp, Klebsiella oxytoca
atgaaacctcaatctgcagcaacttcgcgggcggtaaaaccctgcctgacacccgtggctatctggcaaattctactgacacgcctgctggaacaacactacggcctgaccctgaacgacacgccgttcagggatgaatccgttatacaggaacatatcgatgcaggtatcacgctggccaatgccgttaactttctggtggaaaaatacgagcttgttcgtatcgatcgcagaaggtttagttggcaggaacaatcaccttatcttcgggctgtagatattctgcgagcacggcaggcaactggcttgttgcggaaaaaccgtaacaatgcagtacgctga

SEQ ID NO: 194895 - DNA, 459 bp, Klebsiella oxytoca; identical to SEQ ID NO: 21301

SEQ ID NO: 194896 - DNA, 240 bp, Klebsiella oxytoca; identical to SEQ ID NO: 21300

SEQ ID NO: 194897 - DNA, 468 bp, Klebsiella oxytoca; identical to SEQ ID NO: 21299

SEQ ID NO: 194898 - DNA, 444 bp, Klebsiella oxytoca
atgaaacgtaaaacactgcctctgctggcgctggttgccaccactctgtttctcatcgcatgcgatgacagaagtgatgacctgaaggccatcagtaaatttaaggacctcaccccaccgcgtttcagtgatgtggtcagccaccaggatgatgtcagcgaagaatggtcacaggttgactacttatccggtcccaccttgcaggttttacgtacccgccagtcgcccgatggctgcgaggatggcagttactactacctcgtggatatgcaggaaaaaaccgtccagccactgatgaatgcgctgtgtattgccgataacatcaaactggaataccaggaggtgacggacccgtataccaaagaaaaatactttgagtacgcccatgacggcaaactgatggggcgactgctgataccctcaaaccctgagaaccaggaataa

SEQ ID NO: 194899 - DNA, 237 bp, Klebsiella oxytoca
atgcccgttattgccattatcgccattgttgtcatcgtcatcattctgaacaaaaccggggtgtccgacagtctcgcggccctgacccttgccactgttgccgcactgctgacgggaggtggcgcagccggtgctgccagtgtcgcgctgacaccgttcgtcggcgtgccggtgggtattttcgtgggcatttatgtctttgccaaagtggttcgtctgatttcaggaaaaaaataa

SEQ ID NO: 194900 - DNA, 702 bp, Klebsiella oxytoca
atgacacaggcagaacgccgccatgaccggctggctgtcaggctgtcactgataatcagccgtctggtggcaggggaaacgctgagtgtgcgtaagcttgccgctgagtttggtgtgtcggtgcgcacgctgcggcgtgattttcgtgagcggctgatgtatctggacctggagtatcagtccggatattgccgcttacgcactgcgggcagtgagacgcagatggtgcccgacgtgcttatctttgcccaccgcagcgggatggccggtcttttccctggctttgaccgtcgtctggtaaacgcactgctgatgtgcgatgagtctccctgcgtaatcgcacccgccagtccggttccttcgccatcaggcgcattgtctttctggcgactgattcaggccattaccgggcgcaggcgggtaacgctgattgccgaggggcagcgctgtgagcggctggctccctgccggttacttatccaccagcaggcctggtatctggtggcagagcacgacggacatatcgccgtattctccctggatgaaatccatctggttcagcccctgcaggagactttccggcgtaacgacagtctgtgtcgtcttgttgaagacccgggctttattcagtccttaccccattttcgctttatccagcagtcactgcttacgtttgttccggccaacagctcaccagaatag

SEQ ID NO: 194901 - DNA, 864 bp, Klebsiella oxytoca
atgaacaattctgaaggtttgaagtcgtttcagcaatcgcttgctggcctgccacagtgggtgtctgaacgtatattgcagcagataaatcagttaacccattacgagccagtaatcggcattatgggtaagagcggtgccggtaaatcctcactctgcaatgccctgtttgccagtgaggtatcaccggtcagcgatgtggcggcctgtacacgtgagccactgcgctttcgcctgcaggttggcgaccgctatataacgctgatggatctgcccggcgtgggcgaaagtggcgctcgcgataccgagtatgctgcgctgtaccgcgaacagcttcctcgcctcgacctggtactgtggctgattaaggccgatgaccgggcgctgacggtggatgaacatttttatcatcaggtgattggagaggtataccggcataaggtgctgtttgttatcagccagtcggataaggccgaacccaccagcggtgggggacagttgtccacggcgcagaagcagaatatcagccgcaaaatctgcctgctgcatgagctgttccagcccgtccatccggtgtgtgctgtgtcggtccgtctacaatgggggcttaaggtgatggccgagcggatgattaagtgcctgccacgtgaggccaccagcccggtggtgtcgcaactccatccttcctttcgcacgacggtagtccgggaacaggctcgtagcgattttggtgaaaccgtcggggccgtactcgatagcatcagtgcctttcccctgatacccgcccctgtgcgggccgtcattcaggccgtgcgcaccaccgtggtctctgtggcccgcgccgtctgggatttcttcttctga

SEQ ID NO: 194902 - DNA, 213 bp, Klebsiella oxytoca
atgacaaataacgacgaaacgaaaggtcgctatatctaccacttctgtggcgcactgaaaggtcagaacgccacgttttcaggtgtcgctcaactatcgttcagaatcacgagccagcaggatttggagagattcaaagcggtcgccagttgtgagggaaaagaaatcgctgcagttttatctctgagctatctgggccgggagcacgaataa

SEQ ID NO: 194903 - DNA, 504 bp, Klebsiella oxytoca
atgaagaagaaatttgggaattcaaatgcaacaaaatatttaaaatcttttgaaggccttgcaagtcttgacgctatggagtgcaatttagcaaaaagatgcaaattcaatttctcatattttataagtaatcaaaaagcttgtggtaagatctccgattgggataaagaaactatatgtgatttttttacaaagttaataggttattccgataagtcattaaacgaactgcagatgattggtctggggaaaaatcgacacagtttactgtctatttatgagacttacccaaagaatagcctttttgaaaagccaaaaaatgttcctcatcaggcacgatgggggcgtataagattagatcaaaataaaagattgatcgggttcgttatccctgatgactatcatgggaaacgtcacgaaggcacaggtatgtattatgataaaaatacattttatgtagttttcatcgataatgaacatggtttttatgttttacagaagtaa

SEQ ID NO: 194904 - DNA, 1140 bp, Klebsiella oxytoca
atgatattgaattttggtgctaaaaacttctctagttttaaggaaggatttgatatttcgtttgagcttggcaatagttgtccaaaagaaatttcaaatggaaaacgtgtaactaatatcctttgtattaaaggggctaatagttctggaaaaactaatatactcaaagctctgagtttcataaccctctttatttctaattcttttaactccaagcctgattcatatcttcagtttgattcgtattttgatagcaaatctgaaaccgatttctatgttacatttacgataaatggaattgtgtatagatatgaagcttcgatgactgatgttgaggtaaaacgggaaactctttacagaaaaagtaaacgagaaactaaaattattgaacgtgttaatgataaagttatatttactgttaaagaatttgaagaagtaaaaaaaataaagatgcggaaaaatgtgtctttatttagcatggcaatgcaatttgatattgactgtataaagcctatacatcaatatttttctcgagttataacaaatgttgtatattcaggcctgataacagatgtccataaattggattatttgaatgaattttattacaataatccagaagcttttgagttttgcaagaggttaataataaaattcgatccatcaatccaagatatctatattgctaaaaccagtgcggataatggtgaagttacttacagaccatggtttgtttttgaatttgatggtaaaacagatattttaagttttcatctacaatcaagtgggaccaaatcattatataaacagttagggagttataaagcggttttagaattgggtggtgtacttgtattagatgaatttgacataaatttacatcctcatattttgcctcatttattaaatatttttattgatgaagagcaaaaccctaaaaatggtcagctaatttttactacacacaatactgatgttttggattttttggggaaacataggacatatttggtaaacaaaaataaaacagaaagtttttgttaccgattagatgagatccccagtgatatcttaagaaatgataggcctataaccccggcttataatcaagggaaaattggtggggttccaatcctatga

SEQ ID NO: 194905 - DNA, 684 bp, Klebsiella oxytoca
atgccgtgcaggatgtctatctggacggcaaagtcactatcgcttaagcactcgcgtcgtctgccttccccggcggcgctgcgcttggccgggctaccggttcaccgccgtctgaggatcggagcccggacaggcgcgtcagcgccgcctccgggaagctatgcagagcagggtgaccggttcaccgccgtctgggggccggtagcccggacaggcgcgtcagcgccgcctccgggaagctatgcagagcagggtgaccggttcaccgccgtctgtgggccggtagcccggacaggcgcttcaagcgccgcctccgggaagccatgcagagcagggcgacgtgttcactgccgtctgaggatcggagcccggacaggcgcgtcaagcgccgcctccgggaagccatgcagagcaggcgacgggtttaccgccatctgtgggccggtagcccggacaggcgcgtcaagcgccgcctccgggaagccatgcagagcagacgacgggttcaccgccatctgtgggccgccggtagcccggacaggcgcgtcaagcgccgcctccgggatcccgcttattcgcgaatcagccgcgccgtgtgctgtagcgttttatacgcttcatagcgccgctgatgctcggcgctatactgcgcaacgcagcgataggttttatccacccgcgtaa

SEQ ID NO: 194906 - DNA, 1941 bp, Klebsiella oxytoca
atggttacaaaaataaatattaatcatgataaaagaattgagttcgatggatatctatgttcattagtaggaaaaaacggagtaggtaaaacaagattgcttgaaaaaatagctagcagaaatgtaactataaattcaaatgacaatatattatctaaaaatgagattgcattattagatatcaacaaaatcgatggtcgctatatattttcagttggtgacgaaaagttacgtgatgagattgtatttcacttaatgggttttgttcaaaaaaaaattcgccctgaggatatacctgccacatcatcaattgaatttgatataagacgatatggtgaggggcctctctttaaagcaagagacatacttacaagaacatctgaactgttcaacaaagaaatagaagacctgagccaagatgaaatccaactttcaatttgtcttaataatgagcttcaaaaatccatcatcgacgacaatgacagattttcagttcgtaacataagccagctaataaccaatcgccgaagtgcctatcactacaataaccgcttaaaattccataaaaacaacggagaaaatctcaatccactgagtgatattgaaattgaaaaatatttaggaaaaaagtgccccagcactatttttaacgaaattctctatgatttatttcgcggaaaattcattttatcacaacctaaaactaataacagggatgaaacctacactcctaaactactactggggcactcaggtgaagaaatagcaatcaataatctttcatctggcgagaaaaatattttctggttggcacttaaaacgtttgaaactcaagctttcatcaaccatgatttcaccaagctaaaggtaatactactggatgaaccggacgcgttcctccatcctcaaatgattatagacttctttgaatccttgaaaatattacatgaaaaactcgatttaatatttgtttttacaactcactccccaacaactatagctttaattccttcagataatatctttgaaattgaaataaatcataaaaacaacgaatcagctaataaactggataaagatagagctatatcacaactcttggaaggtataactcaattatcaatagaccctagtaattcaagacaaatatatgttgaaagcggcaatgacaaaaatatttacgagctcatatatacacatataaggaacagatctcaaacattaaaaaaaattccaatactaacatttattagtgcaggcaagaaattttcagacaacgaactagacaaattaataaaaaaacattttggagaaaatgataacaccaaaaaactgattgacgatataaatggttgtggtgattgcgctcaagtaatcgggaacgtacagcatcttattgatactggcaataaaacagtaagaggcattattgattgggacaatacaaacaggcgtcatccagaagaggtaattgtttctgcgaaggattatgcctattccatcgagaatctagtatatgaccctataagtatttatgcagcattaacatcgcattccttttttgagccttcatatttttttgagtgtgaaaaagatttcccatggcgcgacgccctaacagacaaggtaaaattacaacaaattgtagacgttataacaaaggagcttatgggcagggaaaataacagagaccatgagattcactacgtgggcggaattaaacttgctggagataaagagtattacatacccaaagatggtaataatggtcatgattttgagaatgtggtatttgaaaagtatcagcaatttaaaaagctagatgcatttgataaatctctccctcgaatatacacattcacaaaaaatataacaattggattactgggatggcactttataaattctgaatttgaaaaaacattttcaaagatgatttaa

SEQ ID NO: 194907 - DNA, 1434 bp, Klebsiella oxytoca
atggcgactatcgtacaaagtaatatgaagtttaaaggtgatgtgaaattaccttcagttaatgcccctctaccggatggcgctaatttgttcgctgatttctccaccggtcggtacgtcataaagcatgccagcggtaacgtcatccgttctgcagccctgacagatattctgtcattctcatgtgccagcgtaagaagctacgttggctcatccggccttatcgaatacctccaggcaaatgaacctgctatagaatttcatccgttatctctggagtgtcttggattaagaactgaatattcgagcacaaaccgcctggcttggtcacaggatttttcacagtctgccacctggtcatccggagggctgacgttaacaccgggcgacagtgcggcgcctgacgggaataccacggccacccgacttgccgagaccgcaaacgggacatcgacagtaagaacgttactggctgcgacgaccagcgatgcggtggtaggatcgccttataccttcagtattttcgcgaaggcaaatacggcggggattattcagcttgcggcacaaggggccctggcagcaaccgcattcgctaactttgaccttaaaaacggcaagattggcaaagtttctccgggttccgcaaccgtcggcatgctccaggtcacaatggagtcttatcgtagtggctggtaccgcctgtcaataaccattacaccggcttcggcggcatcgcctttattcactgtcgccctggtaaatgatgattccagcgcgacagcggtaccgtcataccttccttccacacctaaatcactctgggtatggggggcgcaggctgagcgccgggatggttattcatcttatattccgactgcaggcacagaagtgatgcgcgcgagtgaggtgtgcacaacgccgtcaaccacggcctttatcacgtctgccgctgctacggtgctggtttcagtggttcatccccatagcctgcagtcgttaagcgggaaatataactctctggcctgtgcggtcgttctggacaacagcgcctcaggtgcacatatccgtttcgcctaccggccgcccgcgtcgggaaccgccgtggggacgcctcagggggctgcagtgggggtaattccagattcctcaggcacagcgcaaaaccttgagattccgggtatggcggcggttcgcgatagtgagcagtcctgcatctttaattttgatggcgcagccttaacgacacgactttttgatggctacagctggtattcccgttcggtgactgcttttccaccggcgctttcacgtctatgtattggccgctcaaacatggatgcgaataattatttcaacggacatatcaggaaaatcatctactggcctgctgcgctgggtgatgaaaaaatggaggagattatttcttatcagtag

SEQ ID NO: 194908 - DNA, 147 bp, Klebsiella oxytoca
atgcatggatggatcgtcgccgagaaaacagcgagaagccttacgggacaaggcttggggccggacaagccgtatctgcacggctggtcggaaaatgagattttttatgatttatgcgatgagttttgcactattcttgattgttag

SEQ ID NO: 194909 - DNA, 624 bp, Klebsiella oxytoca
atgtctggcgatattaaagcagtatttgatagcaattttattgcaactctggcgggttccgttcaggtttttcattttgattcaaatacccgtgagtttattggcattgaagatatttatgtccctctcggtgtcggaattcctgcattagcctgcctggatgaaccaccggtacaaaatgactatcaggttgctgttcgttcggaagataattcctcctggtctgttaccgatgattatcgcggtatcactgtctatgaccttcagacgctggccagtcacattattaccgagcctggacccatccccgatacggtaaccactatcgcaccgtccaccccatacgatagatggggcggttcttcctggataaccgatacagatgcacagcatgctgcagatgtcgctgctgctgacgagcaaaagaaacagcagattactcagatctcagcagatatctccattcttcaggacgctgtcactcttaatatggccacagatgaagaaaaatatcgactgacttctctgcaggcatatcgcgtgctgcttaatcgggtcgatacatcttttgcccctgatattagctggcctgttatgacaattacggaggatgataatgtctaa

SEQ ID NO: 194910 - DNA, 4284 bp, Klebsiella oxytoca
atgtctaatttaccagaacagattgcatgggaatcagggattcatcaactcgaagaagaagaccgggctaaagctggtcccggtggtgtattaaatatccaggcaactcagctggctaatcggacgagctggctgagagctcaggttgagtctgcggaagattaccgcgaatatactttttataaatcagaatcggatcccgatggaacaattgcgggacttgctaatacaccggcaggaaaaatatttcgtgttgctcagggtttaaatgatgaccttgcatttatttattatttgaataacgacggagtagccttagccctcacatcgcttcttggtcgtggctctattacgaacaatataagagaatatccctcatttgagattgctaataatgatgtattagccggaaatatccttcatggcagaactttgtatgtacgcagcactgacaatagtgcactggcagtcgagtacatcaacaacgctggaacgctggaagcgaccgggcggaagattccttcaaaggacgaactggagcaaatagccattcagttaaacgacactactgacctgacaagtgatctcgctcaactcgctctgagtgagtccctgaagatttcagcctccggggaatggacactggcaaacaatgccatcggcatgcttggtgctgtatcactttccggcggcgaaagctcatcagccagcctacaattgacgtcgggtgccgatatttttaaccgaccttttttccctggcgattctttaacagatggcgtactgaccacgcaataccaggctctttctctcgcaaatctaacagtctcaggtattaccgtcgagacaaatgtagttcgtgctgcgatgagtcctggtatatctgatggtgtggccaatcagcaccgctacaccgcattcgaccctgaccatgaatttcaatccattaaagcgcaggacgggagcgcgacgtctctacgcagcgtatcccttcattcgtccggtatgcatctgcaactgatgatcccgcgctcagaattgagcgctgccggatatactgaaactgcggcaggagttcaggcttatctgcaagcgacatgggcagaaaaggtgttttattacgcgtctacagtgaccaggacggtaagtattaacactgtattctcactgtcagcaggcacgctggtttcctcggcagaaagcgggcttgtttttacgttttctgtaatggatgcggaagaaatgagttccgttcctgctgagctacacagtaacgccatttctgcagccgtggcgaaagacctggcgctggacgggcgctattcacgactgatctataatggtccgctcctcggcgttccggggtattcggctaaaaaccgccttgtcgttattgataccattcagtcaaccagtgcggatgataaccagtatgctccgcgcatggtggatctcgctttcagcgttaacggcatgcgggttggcaggcgcattgtacctgccaatcagtcactgctgcagaatggtatccttcagggattcagtgaggcacatcgactgaatgagcttaagggggtagagatacggtacactgatggtgtctcggtaacttcaacgtcctggtttcctggtgcggtgatggttatcgcgaaattcatcagaaaggatggcaccgtatggacactgactaacactggcgtacccggttgtgtcgatttggcgggccagttcagctatgtcaccgggaatgaatcagcgctgctacggaccgatattgtcacgtcactgggtgggtataagggaaacggatgcctgcagttttcggttcctgttactctgcttgatgccgccggggtacctctgttcagtccgtcagcgattttcaattatctttacgggctgtctcgcaattcagtattcacctacagaacggcctcatggcagatcacccgtgacctgcaggacattatggctctgagggttcctgctggcgcgcttagtattgaacatctgaattcctctggtgacaggaacggtattatactccgggtctacgaagagaatgcagtgaacggggccgacgtcggcgactatgtccgcgtaaccggcgatgttaaaaatgccactacgcaggactatcttaactaccccgtagaactcaaagtccggttccctgcgggaaaagtaccgtctcaggaatgtctggttctgacggatgaaaacgggctggagtacgattgccagttctcaggcacggagcatccaaacccgcgtcagcgctcacagccgggatttcatcctgatggctccctggcagcaggctctgtctttacgctggcctctgttccggcgggagaaacccggttctttgagctgaaagcttacgccacggccagaaaatcttatgctgaaagccctttgctgactgtgccatcagcgacacagcgtacagtgacgcttgatggctatactctgacgttcaccaattccggtgtagtggctgccggggcatgggcacttgcctcgatcactgaccccaacgggaccgttcacaacatcacgcttaacgcctatctgagtggctcaacatgggcttccggcgcttaccaggaggcaggttttcagggggcttcatccattcgactgatcaatacgggaccagtgtttgtcgagattgaggtggtttcctggaatctgcccattgataacgttccttcccaggcggtacgggcagtgatgcgttaccgtctcttccgtaacgggaaactgcagatccgcctggtgtcatcgatggaagttgctctgccggtatcaaccctgtctgggatcatcgcgcgactgactttcggggacggtgcgtatccgtatgacccacaggccgcatcagttatttttacagacccgaccagcggcgataaatgggcggtgacagcagtcagggcgaacggcgatgtacatcgtgacgggcagacatatggaccgacacgtcctgccatgctggaagttcgtaatccgtcatcttcttccgtgagattgtatgctggctggaaatatcagacccaggaccacaactcctttattacctggccggtcaacaaaggttgggcctggacaagcgagttctggtttgacatgaggtcaccttcagcaacagccagggatgtgttctccagggtgctgaatcgtccggttggtttccttggacagtcatcatatccatctacccaggtccgccgggcactccgtgaaattgaactgcatctggacgggtcgatggactggtggtattccggtgatgcccggcagtgggaaggcgggccgggagatacgcgtacgttcaaatatgcgccggtaacgtatgagattgtcagatatctgaaagacggtctcgggacgctggagggaatttacacacaacttgaaacggtcgtgaaatcgttcggggtacctgtgctggcaaatattggggcttcttatctgaatggcgggcatcttctgcagttcgcttcccgcatcagtgttccggttctgcactggctttataaggttgcggttctgaaaggaaacacgactgtcagggataaaactgccgtagcgataaaaagctttgccgatgcgatagtgacttactacaacgctaatggcggagtcgggctacagggatcagttgcggggaaaggtaactcgaacagcaatgccacaggactgaggattgttgcgctgggcatcatgtccgggcaggacgctgcaggggcttatctggcaacctataatgggattcagtctctgctgatgcaaagttccgggtttatgtatgcccagaacatcctcaaggaaggggcatcagacgtgctgtcgactaactggtgggtgcattatcaggtatttgcctacaacaattacctgctggggtgtacggctgctggcagggaatctgccttcgacatggataactttattctcatgtcttcgtcagccctgggcggatttgatgagattgactactgcgcgtcggaaagtcggcggggcagtttcaacaccatcacgtttgctgcttaccctatgatgctatccggtcgctcttcgatgatgaatgccctgatggcgtctctggaattgttcagttcagaatacggtccgcagtccgggttgccaaagcgatatttcggttttgacggctatcaggcggggagcaacatagctacgacagatattccgttctgtgcaacaaccttctcagacgtctggctggatcagtatttccgtcaacgcgtattggtctaa

SEQ ID NO: 194911 - DNA, 1308 bp, Klebsiella oxytoca
atgcaaacattgaaaattgccgtcatcggcggcggcagcagctatacgccggaacttatcgaaggcattatccttcgccatcagcagattccggtcacggagctggcgctggtcgatgtcgaagccgggcgcgagaaagtggcgattatcgccgcgctggcccagcgtatgctcaagcgccatggcctcgaacaggttaaggtcagcgtccatttcagcctggatgaggccattcgcggcgctaaattcgtcctgacccagctgcgggtcgggcagctggcggcgcgggcggcggatgagcggctggggctgaaatataacctgctgggccaggaaaccaccggcgtcggcggattcgccaaagcgctgcgcaccattccggtgatattgcaggtcgcgcgcaaagtggaggcgctggcacccgacgcctttatcctcaactttaccaatccggcggggatcgtgacggaggcggtgagccgctacagcagcgccaaaatcatcggcctgtgcaacgtgccgatcaacatgcagcatacgatcgccggcatgctggaggcaaaagcagaggaggtcaggctgagtttcgccgggctgaatcatatggtctgggtacacaaagtgatgcaggggcgggaggatgtcacccgtaaggttctcgacatgctgtgcgacggtcaatcgctgtcgatgaacaatattaaatcgttgccgtggccggcggagtttctgcgggccctgaaggcgattccctgtccctatcaccgctatttctggctgacgccggccatgctggcggaagagattgaggcggcgaaaaccaaaggcacccgcgcggagcaggtgatgaaggtggaacaggagctgtttgatatctatgcccggcctgagctggatgaaaagcccgaacagcttagcttgcgcggcggggcctactactccgaagtggcggtggagctgattaacgccatctacaacaatcttggcaaagagatggtggtgaatacccgcaacaacggcgcgatccacggttttgatgatgatgcggtggtggaaattaacagccttattgacgcgcagggcgcgcgaccgctggcctttggcgcgctgccgccgatcatgaacggcctgacgcagcaggtgaaagccttcgagcgcttgacgattgaggccgcggtccacggctgccgggatagcgcgctgctggcgctggtcagtaacccgctggtcgggaatgtgaccgatgcccgggcgctgcttgatgaggtgttaaccatcaaccgcccctggctaacgcagtttaactaa

SEQ ID NO: 194912 - DNA, 1824 bp, Klebsiella oxytoca
atgtggtcggcaacgaaagaaaaatcaaatccattgtcatcgcgtgacgacgttattcgcgctcttacaacgaggctgagcgcgctcgacgcccaatttccggccggtcaggcgcagttcacgctcggcgatacctgcgcgcattatgatacgaatattgccggtatggaggggttatccagagcgctatgggggctatttccgctgtgggcgggcggtgaagagacgccttttgctgagaaatatatccaggcgattaagctaggtaccgatcccgatagcccacagtattggggcgatacggggccatacgatcagcggctggtggagatggcggcctacggcttgggcctggcgttactgcagacgcgcctgacggatgtattcagccaaaaggaactggcgaatttccaccgctggctgaatcaaatcaccgatgcgcagatgcctgacagcaactggaactatttcgctattatcgttcagcttgggtttaagcgcgcgggattagccttcgatcaggccgccatcgatcgccggtttgcgatgatggaagcctactatttgggcgaaggatggtactccgatgggccggggcggccaaaagattactacatctctatggcttttcatttttacggcctactgtacgccaccctgagtccggatgatgcagagcgggccgccacgttacgcgaacgctcccgtttgtttgcccgggattttatctatatgtcggcggcggatggttcatccgtaccctttgggcgcagcctgacctatcgtttcgccatgattgccttctggagcgcggtggcgttttccggggtggacgaattttctcctggcgtggtgaaaggactgatcctacgtcatttacgctggtggcagcagcagccgattttcgatcgcgacggtattctgacgctgggttttgcctatcccaatctggcgatgtgcgaggactataattcgcccgggtccccttactgggcgctgaaggttttcctgattctggcgttaccggcagatcatgatttttggctagcggaagagttaccgctgccgccgctggctaaggtgcgcgtgataccccaagcggcgcaaattttgcagcacgatcgccattctcgccatgtaacgatgctgacgtcgggccagctggagttaaataattacgtcaataccgaagccaaatatacccggtttgcctactccagccgctttggttttacccttgagcgggggcggtatggccttaagcatgccgcctgcgactcgatgctcctgctatctgacaacgataattactggcgcggacggcgcgaatgcgaggaagtgacggtagcggagaacgcgattttctgccgctggtcgccgtggtcagacgtacatatccgcacctggcttatcccctgcggcgactggcacgttcgggtacaccacattgccagcgctcgacggctacagtccgtggaggggggctttgcggtactgaaggcggagccctgcctggaggccggcagcagcctgattctggccagcaatgggagcagcatgatagccaatcttgctcccggtatcgccaggcagggcgaggccgttatcacgccgcccaatagcagtattatgtttgcgccctgcgcggccattcccactttaaccaccgagctggctcctggcgaacattggttggcctgtgcggttatcgccagcgctgagataaataaagtttttgccgatatgccgttactcattcgacaagatcgccgctttattattatggatagccaaaaagaaacccagcaaactatttatttttaa

SEQ ID NO: 194913 - DNA, 567 bp, Klebsiella oxytoca
atgaagacgttgactttcctgctctcaacggtcattgagctttacacaatggtcgtgttattacgcgtctggatgcagtgggcgcgctgcgacttttataacccgttttcgcagttcgtagtcaaggctacgcagcctgtcgttgggccgctgcgccgcattattccggcgatggggcctctcgatagcgcttccctgctggtcgcctttattctctgcgtcgtgaaagctatcgtgctgtttatggtcgtgaccttccagccgattatctggatttccgcgctgctgatcctcattaaaaccgtcggctcgctgatcttctgggttcttctgttaatggcgattatgagctgggtaagccggggccgcagtccggtggaatttgttctgatgcagctggccgatccgctgctgcgcccgatccgcagattgctgccatcgatgggcggcattgatttctcgccgatggtgctggttctgctgctgtacgtgatcaacatgggtatcgccgaactgttgcaggctaccggcaacgttctgcttccggggctgtggatggcgctatga

SEQ ID NO: 194914 - DNA, 570 bp, Klebsiella oxytoca
atgaatcagcggattaccgccccccttagatgtcgtatggcgctggtcaaggcgctgtggctggcgcttgtgttagcgggcttttccaccagcgtcagagcttatacctgctacgactccaccggcaccatattaaatagcgattccggcggaaaagtatccaacgtctacgttaacctgcagccaagcctcggggccgggcagaacctggtcgtcgacttatccagttcgatttattgtaaaaatgacgcaccggacaggcgcaacgacatggtaagcatgctacagggatcggcctatagcggcctgcttaccaacttcacgggctctttaaaatattacggggttagctacagtttcccgctaaattccccaactgccagccacaactttacttccggtaactacacgagctggaatacccagctctacctgacgccaatatccaccgcctccggactggcgataagcgccggctcgcatatcgctacgctggtgatgtatcaggtgggctccgatatcaacggcggcggtaacgttcgtacctcaaaatttacctggaacatctag

SEQ ID NO: 194915 - DNA, 864 bp, Klebsiella oxytoca
atgcaaaatacattaaagggatttaataccgcagtgattaaacatgaagatcattttttagctcttcttttgaaggttaaatcgcaaaatgacatctgccaaacctattatttacaagctccacaacttgcagatctttgcttaattctacaaagcagaattaatttagttgcacagcgcatctctgaggaaggtgatacttataaagaaaaattaaataatattaatgaaatcattattgctgaaaccccagaaattgagatatcagagattgaagagccagattctggacaacgaattacttctcttacatttgctccaggaaacgcgtcagcaaaaattgtcgcagtcttacaaaataaaaaaaccataatatttaacatcgatgatacgcaggttgatgcactttcagttgcaattcaacaagcattaatcaattctaatgaaaatgatttaatgcagaacatttacttcgatatgaaatacctaatgctttatacagtagatttatcaaaagaaaaaaatatttcatatcaacaacatattcaagaagactggaaaaccactttatataaaaactatctagctatacttttctgctttgaaacaccacagggcaagaaaattctgaccggagctattgtcaaaataaattcgcaacatccatcagcagaaactaataccattattaggcgagtgctggataaccactctaaattaaacgttaatgacgaaggatattcaccacatgaaatatacagtaatataatgccaaccccacctgggaaaatacttactctccctgaatgtttgaatgcccttcatcatttctatcgggaaatgaatacaaaattacctggataa

SEQ ID NO: 194916 - DNA, 1287 bp, Klebsiella oxytoca
atgcataacgacctctatcgcaaggaagcgattgaatataaaagattttactggaaaggtaaggcgctattattagccgggttacctgcatggctagtcaccttcttatctttgatattcttaatcgcgctagtagccactattattttttgtaaattcactcagcgaatagatgttcgtggagaggtcatcacactacctcattctataaatgttttctctccacagcagggttttgttgttacacaatatgtaaaagtaggcgaaattgttaaaaaaggacagccactttacgaactggatgtgtcacgaaacaccactagcggcaatgttagcgagtcccaaatagaatctatcaatgaaaaaatcattaatgctaatgatattataaaaaaattaaaaaagaacaaagatgaaactttaaatgccctggattcacaaattaaaaacgttaaggattcgctaaaagaaacgaatcatatgctggctaatactcaagcaggcttacgtaaaatgtatgaaaacttatctaattatgataagtatctaaaaaatggtcttatcactaaagaccaatataactatcaacactcattatattttcaacaacaaaacaactatcagtctctaatcagccagcaaatgcagcttgatactcaggtgactcaaattaatagtgacagagtaacaaaagcagcagattttgataatcaaatctccaaccaatataatcagataaatgattataaaaatcaattgatagagtcgaatgccagcggtaatgttgtaattaaagcaaccgccaatggtaaagttgagtctttagcggtaaccaaaggacagatggtagaaaatggtagtagtttagcccagataaaaccgacaggtgacgttgaatactatctaattctatggctaccaaataatagcattccttacataaaacctggtgataccattaatattcgttatgatgcctttccagcagataaatttggacaatttccaggcaaagttctttccatatcgtctatgcccgcatcgcgccaggagttatcagaatatacaaacgttagtaatggaaccaatcaacaagagcttgcactttataaggcaatagtaacaatcaaacataaatcatttaactataaaggtaaaaccttaacgttatcaaatggtctgaaagcccaggctgtcgttttcttagaagaacggcctctttatatgtggatgtttactcctttttataaaatttcgcaaagcgtaagtggccccataaatgactaa

SEQ ID NO: 194917 - DNA, 366 bp, Klebsiella oxytoca
atgaaagaattaactatcttcgaaatggaagaaatcgccgggggctatagctgggatttttcttccgcctccgctgggattcaatcgcttgtgtgtaacgctgttgaagccataggttctaccgctcttggcgctattgtcggcgctggtgtcggtacgctcattggggggactcagtccggtgaaaacggcggtctgttagggtttgggatgttcggtaacctggttggtatgttctggggaatgctgtggggcggcgtagcatgtggggccggcgcgctagccgtgggctgggacgaaacgcttagctatgttaaaactacagtagacaaagtactggacggtactttcgtaccatggtcttaa

SEQ ID NO: 194918 - DNA, 1026 bp, Klebsiella oxytoca
atgaaaaaactaattttgtttattagcttattatgcttcagcctaccgacgctatctatatgcaaatatagtaagacttcaaatcccacggtaggcatttcgattaaatcaaaaatattatccgataagtctttacccgcaggctcaatattaggcgtgggaacagttggtggaggcgtcgctgatatgaaaactttttatgattgtgaggctggggatgtttacgccgtatcggcatcgccgggggctatagaggctccgggcgtaaaaggaatacagggtggtacagtttatgaaacaggcatcaaaggtattggttatcaaatatcagatgctatttcaggcagtaacattcgccctatccctgccaaaatgggaagtatttctgcctaccgactgacagttaatccagtagtacaattaacagcctggttaattaaaacaaatgacgatattgatacaaatgtgacatcatcacgaacaatatcagtcatgtatctcgcaggaacaccaacgcaggttcagtccagatcatcaacggctcgcttgcttggtgcaaatttaacactaggcgcatttactttccgagaaacgtcttgtgaggtaaccccgcgcaacggaagcaccataaagttgcctaatattgaagcaagtcagctaaatgccgtcaccccggggaacgcaaccggcaaacaaaaagatatcattctggatattaattgcccaacttcatcagtagggagtaaatatacctactggtttaaccccatcacgccaaacagctcctcaactaatggagttttaatgaactccgtccccgttgcttcaggtggtgcacaagatgtcggattaattatcaaaaaagacggcactgctattaaattctatgattatgatgcttattcaattgctaaagtggctaaaacgcaggaagtaaaattaactgctgactactatcgcttatctagcaccatatctaccggcacagtacaaggaattttcgaaataattttacaggaaaaatag

SEQ ID NO: 194919 - DNA, 225 bp, Klebsiella oxytoca
atgtttaagctatcggatgttgcggcgggtacgtcgtacggtacatccactttaagcggcggctactggctactgcaacttctcgataaggtaagccccagccagtgggccgcaatcggtgtattggcgagtatattctttgggctgctgacctacctcaccaatctgtatttcaaaattaaagaccggcaaaaagaggcgctgcgcgatgagcaacaaagctaa

SEQ ID NO: 194920 - DNA, 189 bp, Klebsiella oxytoca
atgttttatctatatgaaatacagtcaataaaccaaatcagccagtatatgttatccaaagctgagggtggcggattcattacagcatttgacgctggtagtgatgaggaagccatggatatggcatcgatttatatcaataacaccctaggtaaaaaaacggagtttggtatttacatgcaactatag

SEQ ID NO: 194921 - DNA, 2532 bp, Klebsiella oxytoca
atgtcggtaccgaaccagacaccctataacatctatactgccaacgggctgaccactgtctttgcctatgagttttacctgatcagcgccagcgacattcaggtgacaatcaacggcaacgaagtaacatccggctataccgtgtctggtgtgggtaatactggtggcggagagattacttttcttaccgcgccggccaatggttctaccgtcatttttgaacgcgttacgccgacataccggctcaccgattaccaggacaatggcgacctgctggccgatacggttaataaagatttcgatcgtctctggatggcgattcagcgcgcatttatttatctcggagttgcgctcagtcgccctctttttggcggcggaccattcaatgctagcggttatcgaatcgctaatctggctgcccctgtagacgaccaagacgccgctactaaaaagtttgttgttgataatgggttggctaatctggcgcgtacgctacgcgttcctgagttgagcatctcaccattgcctgatattcatgggcgaaaaaataaaatcttggcatttaatgatcaagggaatcccctaactgttctgcctgagtctggttcggctgctgatgtgatgattgagctgggttcagttgatggtatgaaatgggtaggtaaatgtccgaatattgccatacttagatctattgaaccctcctatgatggccagtctataaccctgcggcgtgcagtgtctggtggtcatgagataaattgctcgctctggtacgatgccgatgatttgactacggctgatgatggctattctatatttgttacggcagggggtgctcgctggaaggctgatgtttccagagggattgatgttcgcctggccggtcttctggcagataactcaaatcttggtacggttttaaacgccgtcattaatggtgaggttaacaagattaaggcggccggaaccattaaaggcgccataacgaatatttttattcctgcatccagaaagacttacacagttgatacctcagtgttcattccgtcatttatgtgcctgaatacggacggttatgtctatatgaattatccatccacgacaggcagtgcgttcagcatcaataacgcttcgctggctatctcttcgggcggaatgccatctaacccggcagatgttcagggctgtaaaatatttaatgcgaatgggggaaggttcattcttaccggcccgggaggaaatgtatctacaggcaccggtctttacgtcggcgaccccaataccagcgttttcgccgttcgcgatttaatgatttgtgacctgacaatcatcggtttcaaatacgggattcagataacggcacgtaataatttcataaacacgttttatggaattatctcaatgctgaaccagtacggtgtatatgtatcaggtggtcaggccctgaatgctggcgagaaaatgattttcgaaaaatgcacaatcgggaacaactctgttgcacatttctggtttcaggctccaatgtggtactacatcaacaactgctcactggattacaccagtgctgatgtattcctggtgggaaatctgtctcaggtatcaaggattctcattcagggtggccatgttgagggggttcctggttatctggtgaactgcccggccgcaccaggcataccggttaaggttcagtttagggatacgcagctttacatgaacggcgccaacaactccatgcgtcagcttatccacgcaccgggcggcgcatgcgcagtttcatttgaggagtgtgactggacgtttactgaatattttgaaagctctcagtacatctcgctgagcggttatagcgacggcacagaggcgaataaccgctgcgtgattaccaataaaagcccccgcgttaccgggctgcgtagctcgcagatacttccgcgatataacaatggtctgatgggctggcgattcaattttgttggaacagagggtgcatcgattcttaaccttaccgatgctaacacaaaaatcactgtctccagtgcaaatactgacgtaagcgcaaaatacggcgcagcaaccagcgacggcgcgaggacgatcgagattaccgcagccgcagtaactgatgtggttgagttgctgctgaccccgtattatccggcaaaaactagacccgcatggtgcggcggcgcatcggttaatattgcaggcgtgacagcaggggaatgcgacatgtatctgatcgccagaacctacgaggagccaaccctttctttcaatagcggcatatcaactatcacgacaaaccgggctactgtgactaactacatttccgacgttatcaatgtgagcgaaatttttagcaaggccggaacgccgctaacagcggccgattacgtgggtgtctggcagagcgtgagtcaggcacagtacgctgattcatgtcgactggctctgcgtttaaccaatttcgtagggacgattaaagttaaactccccgttttctggcaatcatcggtgctgtga

SEQ ID NO: 194922 - DNA, 519 bp, Klebsiella oxytoca
atgaagatattaattccattgttgctaatctttccctttgcagcattcgcgtcaaccgatttagttgatgactctaaatatatcgttcctatatccggaccagaaatacagattaccaatccatatgccgactatacggtcattgacggtatcgacactggtaaaaaaattgagatccatgtatcggtattacacttgcggacctataaagaaaacgcagattttagtgaagctaatactcactatgtgaaaggaagcaaaaccttatctagttacaatgccaatgtttacacagacgattttataaaatttacatcagaagacgctaaaaattccacattaaaaaatttaagggatttgtattgtgcaccagatggattttacccagtgtcatctcaagagcggctattctacgaaacccgaaaagaaaataaaaaaataatgatcaattactacagtgattcaggaaaaaccctcatgtttgggtttggggtttcccccgaatcatgtaagtcgtaa

SEQ ID NO: 194923 - DNA, 414 bp, Klebsiella oxytoca
atggacatgaaaaaattgacctttaacgatcgcattacatcgagacggaaagagcttggcttgacccaacagcagctcgccgatgccgttggcatatctggcgtcagcgtctacaagtgggaagcaggtattaacaccccaaaagggcaaaatctgttttctctcgctgaggctcttcgttgctctccgacatggttacttaacggaaccgatagcgatgaaccgttgaaggcggaagaccttttacctcggttagatgatcgccaaaagctattacttgatctttttgattccctacctgaatcagaaaaagatagacacatcaatgagttgaaagataaagttgacggattccagcgattgtttgatgagttacttttggtaaaaaagaaaaaaaacactccaaaaaaataa

SEQ ID NO: 194924 - DNA, 246 bp, Klebsiella oxytoca
atgacaaataaccaattcatagaaaaaataatcgatgctggcttatcagtatttgagcacgaaaataatagcgactttggttcagggacgatgcatatcaccattgtcggcggtgttcgtcgtgttgagttctaccctaccaccggtaccgtttacgccaatgctgaaaagggaaaattcccggcattcaagcagaaaaaagccgggattaaagttgctatccgtctagctaaatccggcgtgtga

SEQ ID NO: 194925 - DNA, 231 bp, Klebsiella oxytoca
gtgaaagcagcgggttatgacgtgcaaggcgctcccggcgtcctgaaatatgtcgatattcccgatccggtcgcggaacctgacgacgttctgatttctgtcgaggctatctcaattgaagggggatctgatcaaccgccgttcgacgccgcctccttgtccttcatgggtcgtcggctacgcggccgcgggcagtctgactgtcgatctgtggtcgccaatgcagtctaa

SEQ ID NO: 194926 - DNA, 1158 bp, Klebsiella oxytoca
atgagtaaaatttttaaatctgtcataaccctcgcagggcgtgaaaaaatcgcatctgcaatagttaacggcaacaaagttatattttccgaaatgtcagtgggtgatggtggcggtgctgcaacaacgcccggcgatgagcagacttcgctggttcgtgaagttttccgaactcagttgaacagactgaaactgtccgatactgagaatataattatcgcagagatgataatcccgccagaagcgggcggatttaccatcagggaggccgcgctgtttgatgatgccggtgtgtgcatggcggttgccaacgtcccggaaacgtataaaccagtgctggcggaaggctcggggcgttttaccatccttcgtatctggctggcggtcagcagtaccgaagccgtcgagctggtagttgatccgggcatcgtgctggcaaccgtagaagatgtgattaacgccggcaatgagattaaagattacaccgatgagcagctaagtgaacacgcaggatcgcgtgatcaccctgatgccacgctggaagaaaaaggctttactcagctgagcaatgatattgacagcagtgatcaggataaagccgcaacccccctcgcggtaaagcgggcgattgagtcagctatccatgccgcatgggagctggataaccccgtcggcaccgtaaaattttacgcgcagaacgttgaccccaatgagcgctacccgtggacggaatggatctataccggggaagataaaaccattcgtatcgctaaagccagcggagcaaacgtcggtaagaccggcggcagcgataacgtcactctccagcgagataacctgccagctgttcagattgatgtaagcggcgaaaccagtgagcagggggagcaacggttgcaaactgaaggcggtggcgagcatgaacatgatggcgtccccagcagggaggatccgtgggagattggcggcgatatcagccaactctttaacccggcacataccggaaaaacggacccggccccggaccataaacacggggttgtgatcccaccgcatcaccatgacgtcaccggcaaaaccgacaacctcggcgaaggtcaatcgttcagcgtggtggaagcccataccctgctgatgtgttgggcgagggtggcgtga

SEQ ID NO: 194927 - DNA, 186 bp, Klebsiella oxytoca
atgtattatttacggaaaagacaatcagtcgataatctgagtcagtatgaagtatcaaaaagcgaaacgggagatattattgctgccttcgatacggaagacgtggaaagggcaattgatgagtcaataaatcatattattaattcgcttgggataaagacgcaattcggtgtttctgtttcctga

SEQ ID NO: 194928 - DNA, 2274 bp, Klebsiella oxytoca
atggccagaattccagaatcctcatcgtgggaagaagaaattgagctgatttccagaggcgagcgcgtttccggagggctggacggtgtggcaaacagaccgctcaaaagcctggctaatcgcacccgctaccttaagggaaagtccgatgaatcagagcggcttgtcgctgaaaaagtcagtgcggtaaagacatttgaggaaggcgcgaccctgaaatcgccgcgtgaagaaatcctctatggcaaatatcgccttgtgtggacgggcgattttccaaagaccgtaccagcaggcagcacgccaaaagaaaccggcgggacgggggcgggggcctgggcttacacttcagatgctgttattcgccagagcctgggggcggatgatggcatgaagttgctcggaagatgccgcagcctctcttcactccgggcgaccgaacccaccgacaccaatcaggccattatcctgcgacgagctgtgcaggatggtcacgacattaatgtgacgctctggtatgacgcagaagacactgaaacccctgatgacgggtattccgttttcgtcaccgggaaaggtgcccgctggaaagcggatgtatccagagggattgatgttcgcctggcgggtcttttggctgacaactccaatctcgggtcggtgctgaatactatcttcagcggtgaaacagagagggttaaagcggctggcaccattaaaggggctattacctccgttttcattccggcatcacgtcgcccgtacacgattgacgagtctgtatttattccgtcatttatgtgcctgagtacagacgggtatgtctatatgaattacccgtctgcgacaggcagcgcgttcagtattaataacgcatcactggatatcagttctggcgggatgtcgtctaacccggcagatgttcagggctgtaaagtatttaatgcgaatgggggtaggtttattcttaccggcccgggagggaatgcatctactggtaccggtctttacgtcggcgaccccaataccagcgttttcgccgttcgcgatttaatgatttgcgacctgacaatcatcggtttcaaatacgggattcagataacggcacgtaataatttcataaacacgttttatggaattatctcaatgctgaaccagtacggcgtttatgtctcaggtggtcaggccctgaatgccggcgagaaaatgatatttgagcagtgcacaatcgggaacaactcggttgcacatttctggtctcaggcgccgatgtggttctacctcaataactgctccctggattacaccagcgctgatgtattcctggtgggaaacctggcgtcagtatcacgcatcctgattcagggcgggcacattgaaggtgttccgggttatctggtgaactgcccggccgcacctgggataccggttaaagttcagttccgtgacactcagctctatatgaacggcgccaacaactccatgcgtcaacttatccatgcgccgggtggtggttgtgcggtctcatttgaggaatgcgactggacgtttactgaatattttgaaagctctcagtacatttcgctgagcggttataacgacggcacagaggcgaataatcgctgcgttatcaccaataaaaacccgcgcgttaccgggctgcgcagttcacagatcctgccacgatataacaatggtctgatgggctggcgattcaattttgtcggaacagagggtgcatcgattcttaaccttaccgatgccaacacaaaaatcacggtctccagtgcaaatactgacgtcagcgcaaaatacggcgcagcaaccagcgacggtgcgagaacgattgagattactgcggctgcagcaactgatgtggtcgagctgctgctgactccttactatccggcaaaagctcgcccggcatggtgcggcggtgcatcagttaatattgcaggcgttacagcaggggaatgcgacatgtacctcgttgccagaacctacgaggagccagcacttaatttcaatagtggaaattctaccattacgactaatcgcgctgttgtgacgaactatgtttctgacgttatcaatgtgagcgaaattttcagcaaggccggaacgccgctgacagcggcagattacgtgggagtatggcagagcgtgagccaggcacagtacgctgactcctgccggttagcgctgagatttacagggtttgtcggtaccgtaaaagtgaaactcccggttttttggcaagcttcggttctgtga

SEQ ID NO: 194929 - DNA, 597 bp, Klebsiella oxytoca
atgagtaactctctcctgccgccgtcatccggggactggctccgccataccgaagcgggcaccgccagactgtcggcgatcaccgtagcacttcgcacgctgtggacgccgacaatctgcccggtggatttactgccctatctggcctgggcgttgtcagtggatcgctgggacaggaactggccggcagaacgaaaaattgccgccatccaaaaatcgtactggctacaccggcgcaagggcacgcgcgctgcggtacgtcgggtgatcgaagatatgggattttcagcgacgtttgccgagtggtttgaggtcggtgacaagccgggaaccttcaggcttgaagtggacataaacgaggtcggcctgacacaaaagaccctggctgaactgaatcgcttgattgacgacgcaaagccggtcagcagacacccggcacagctcaatattgcggcaaaggtaaaaggggatatctggacgggctcaacgctgtgcagcggcgacattatcagtatttatccggccgattttgaggctgaagaaaacattatttacaacggcgtgattttccacgacgacaattttaattacgggtaa

SEQ ID NO: 194930 - DNA, 909 bp, Klebsiella oxytoca
atgctgacaccggcacaaaaacattttcagaaggtcatggccgagcgtcatggcaaaaccgacgagcagtcggatacagcccgcacggcacacgagcagatcatgcaccggctgcgcatggatcagagtgcattaaggcgagtgcagtctaaccaggcgaaagcggcgatgaaacgccagttgctgccgcattacgagggctggatcgaaggcacgctcgacggcgacagcggccgacaggatgaggtgattgtcaccctgatggtctgggcgattgatgccggtgattacgcgctggccgcccgcattggccgctacgtcgtcacgcatggcttgctgatgcctgaccgtttcaaccgtaccgctgcaaccgctctggttgatgagatttgcgatccgattctggtgcaggtcaaggcggatgatgcgaccgacgtcacgccgtatctggcggtgctcgatgaggtcgcggacttcacctctggcagcgacatgcccgacgtggttcgcgccaagctctgcaaagcacgcgcctttgcgctgcgtaatggcacaacagaggagcaggtaactgcgctggagctgctgcgccaggcgctgacgctggatgcgggcgccggagtgaaaaaagagatcgaccggctggctcgcgtggtgaaaaaagccgccgcagcggcggccggcgcagctggcgacgataacaccggcagcaccggcactgatggcgccgaaggtagcggcgacatggcaggagacaccgtggcggacggcacgggcgaagctgcagcatcgtcagatccggcggcagtggccagcgtcacagtgaccaaagccacacgcaaaagcccaacccgtaagccggcagcgcgcaaaacaacagcgaaaaaagcgcctgccgccaaaaaataa

SEQ ID NO: 194931 - DNA, 234 bp, Klebsiella oxytoca
atgaaacagggttatatcatccactttgtagcgcacagcgaagaagggtgcccactttttgagggaaaccgctcagtgcttatagattgtggcgagagtggattcgttgatccgcgcaagctgcttcacaagtgcacctcaatgattttgaccgaatacaaatggtggagaacctctgatgggaaaaacagatccgttgatagcgtcatcattaaaagcgtaatgaaattgtga

SEQ ID NO: 194932 - DNA, 195 bp, Klebsiella oxytoca
atgaagcgatcacctgaatacgcccagggcgcattggccgctctgcgtgaagccaaaaccctcaacctagcaaacgcgacagcgatcggtgtactggaaagcccggaggccgccaagaccctcgttaacctgatgaatctggtgcttgacccgttaatccagaaatacaccgcgatggaggcgaaccgtgattaa

SEQ ID NO: 194933 - DNA, 225 bp, Klebsiella oxytoca
atgtcgatcacgtcaataaaactggatggcggaataagcgatccagagtttgtggaaataagcgccaacgctcggaagcacgaacgcgcccaccttctgggtctgctgcgtatttttgtcggccagctgaaaaaggaaagcgccaccccggaagagatttattcatcaatcgaacagtgggctgatgcccgcgaattaaccattaacgagggtaacaagcaatga

SEQ ID NO: 194934 - DNA, 282 bp, Klebsiella oxytoca
atgtcaaacaaccaaaaaaccgatgctcagggagcgttcaacagacttatccagaccctcactgatgccaatgagatgacaaggaataaggccagcgctgttgctttgcttgcctctgccatgtttaacgtcttaacccccgaacagcaggaaaaggtactttcgagccttgagagtgctttcaaacaaggcccctccgctatcgctggtgtgaatgcagagattgaagcagagctgtcatactttcttcatgcctacgcgatgaggcggaaattgtcttaa

SEQ ID NO: 194935 - DNA, 294 bp, Klebsiella oxytoca
atgcagacattcgaaaaattaaaggccatcaggaaagccgaaggtttaacgcaggctaagttcagtgaaaccagtgggatagcgctgggtacgattaaaaactacgaaagcggacataaagaacctggtcttagcatcgtaatgagggtcactaacactccgcagttccagaagtacaccctatggttgatgactgataagactgctccgcaggctggtcagatcgcaccggccctcgcacacattgggccagaatcaacggaatcagaccaatccgggaaacagactggttaa

SEQ ID NO: 194936 - DNA, 1197 bp, Klebsiella oxytoca
atggcatcacgtattctcggtgaagtggctacaactcgcagaaacccgaacgaccagcggcgggaagataaaaacaaatccatcatcctggctgacgcgttagcggagtacatcaaatctcgagccgagcgtatcaagcagacaactatagagcagtataagggtgtgctgactaacttctctggagactggcttaaaacaccactggcggcaattgatcgcgagagagttgaagtaaggcataaagccattactgatggtggcgtatggtttggcgataaaccccagcgtgctggcgtggccgagggcagtaaagcccaggctgacttatgggcgagagttttgcgtgcagtctaccggtattcgcatgaccattaccgcgacagcgacggcaaccggctgttacctgatccgcctacgatggtactgagcaccaaacgaaaatggcacggtacaacccgtaaaacctcccgcatccgcaataatgaactttcccgttggctggcctctgttgatgccgttcggcagcatggaaccagtatcagagatgatttttccgtatcggtctgtgatgcgctggatgtggctttatttacaggtctccgtcgtgcggaggtgttcgggctggaatggtcgagggtaaatatgtccggccgttacttctggattgaccagacgaagaacggagacccgcttgaactaccgatcaccgatacattactggctatcttccaacgccgaaaagaattatgtcgtgataataacccgtacgtatttcctgcggaaaaaggaggaatagttacggatccccgcagggtgatagaccagataagagaagcaactacaaaagacggtacagaaagtgctatcggttttacctgccatgatgcacggcgaactttcggcagtgtggcggagctggtgggcgtcggttcatatatcctcaagcgcttgatgaaccataaaacgatgcgtagcgctgacgtcactcagggctatttgcacttctcagcagatgagctgcaggagccagcccaaaaaatagaacacgccatactggattacgccgggctggtggaaaaaacaggcggccttgatgcacaactccttgccgtgatgggaacgatggctgatgaagataaacgtaggatgctttttgatatccttacgctacagaatagagagaataaagcatga

SEQ ID NO: 194937 - DNA, 717 bp, Klebsiella oxytoca
atgaaaaaacttcccgagagactttattatccaatccctgaggctgctgaatatttaggttgttctgtaagagatgtgtatcacttttgttccactgaaatgctaaatttaaccgtataccttcatggcatttcaattgaagacgcggagtttatgtcagttgattcagatagttatgaaataactccattgagtggtaataagaccattgatattattaataattactccggcctttatggtgtttattataaagaagatgcaaacagtattgtagctgtgaatgagctttatgggctgttttctgttccatctcttcattgtgttttattagagttttcaaatgatgattttattagtattaacagtgttatagctaaaaacaatagtgggaaagattttgttatgatttcttttaatgagtttattaatgttcccaaaagtcatttgtgtataatggcgagtgatattaaagatataaaacaatcgagtactctcgtcatgaataatgttagggaacattctagaacttctaatcgaaaaggtgaaataatcccttctctgctatctatgatccctgattttgacggggttgatttgcagaatgaaagcgtaaataagattgccaccattcttgaagctgcagcggcatctagaggggttgagttaactatcccagataaaaatacgtgggcgaagtatttggggcgaaagtga

SEQ ID NO: 194938 - DNA, 201 bp, Klebsiella oxytoca
atgactaccaatacacaacaagagaaaaaatttacccgcccagaagctgcagactatatcggtgtaactgcgagaacgatggcaaactggcatagcactgggcgagtcaagatccctttttacaaggtgggtcgcaagaagactatctacctgaaatccgatctcgatgcgtacttggcatcagtccgtcaatcggcgtaa

SEQ ID NO: 194939 - DNA, 927 bp, Klebsiella oxytoca
atgattaggagaagaacactctcattgctggtggaccaaggtgccagtataaccaccaacaacgctatacagccactcgtacctttacctgttatcgagtggtgcggcgttcgtgtcgtcactaccgacacactggcgaagggctacggtgtgcccgaaattaatatccgcaataacctagccaataaccgggatcgctttgtcgagaatgtgcatatcttcacgctgcgtagtgccgctctgaaagcattccggaaccaagtaaacgatattcactcggttaataaacacacaacagcgctcactctctggactgaacgaggcgcggcccgcatgtcaaaaatcatcgacagcgatcaggcgtggaattttttcgaaaagatggagggtagttatttttcccgtcgacataacggatttcctgctacacctaatttttccgaccccgtcgcggccgcacgagcctgggctgatgaatatgaggcaaagcagcaaatcaccggctatgtccaaagacaggcgaaatatattacccaccttgagaatctgtttactgaagggttaacaccggtgcagttctgcaggcgtctgaatggtgtgaataccagcaaggttaatgcctggctggtgattaagcactggctgtacgacgataccccgaacgcccatcgtgcaacatggcgtgtcctgtcttatgcgcgagaccagtacctcaccgagacatcaaagaccatcagaccgaacgaatgcactagctttgaggcgtttaccgccgtgctgttaaaaaagggggctgtgtggctctacaggcgttatctgaaaggtgaattacccatgaaaaccgactggaacggagagttgactcacgataaagagctgtcggagttggtgaaacattccggtgcaccgagcgccagcggacaataa

SEQ ID NO: 194940 - DNA, 594 bp, Klebsiella oxytoca
atgcagatgaaaaataatggcctaaccggtcagggccggactcaacctaaaaccagcctgattgataattcagtgtcaacaatgagcagcttgaaaatggttgcatatataaatgatgaacgtaaatccaaggccgaagcggaggggttgagtttcccctgtaaagaataccgggtactgcagcacaaggattttctcaagaaaactccgaaggtattaggtgaggagcactcagcgaaatttttcgctcagtacaaagacagcacagggagatatctgccgtgctatcagttccctaagcgtgaagcctgcctgatggccatgagttacagctatgaactccaggcagcagtttatgactacatggaggaactggatcgccaaagggatggttatttagcccacaccatcaacgagcttcaacacatcgttacttccgctcgccagttctctgacgaagattcgagtgatgcaggtcgtcgcctgagaagacgccaggatgatctagtgctgctggagaaggcggaatatctggttaaaaatctgagccagttaccgctgaatttcgggggaggtacttctggtgctaaataa

SEQ ID NO: 194941 - DNA, 813 bp, Klebsiella oxytoca
gtgctaaataaaacaaaggcagctttgcagagctgccaatgtcactacggaatattcaagcagagccagcataccagggttaatgctggtggtcaaaacttcacccaactcaattttgaggacgctggttttactcagcttttatggcaaagcgtaaaattgcgttttgtacctaagtcattgattgttaaattcttacccgctttaggggagactgctggaaagttcgctttgcagcataatcaaaaagttaagtttttgataaaacagcaaacctcagatttaaggtttacgtataaaccattgattttctctacgccgtcactttggtttatcgatagctggagctacaaaaatagcggcgctcagccattaggttcttctttggcctttttgcgctggcgcttcttcagtccattcagcacgttgtcggatagtgtgcttgtggggttattagttggtactggtggccgtgaggctggcttctgggtatcagtcatgagtcatccttttggctcgataccttcacgttccagacgttggcggcaagagtccttaacccatgagctgaagtttccttgtccggctacagagtctatttgtttaagtagcgcatcttcaaagcggatgttcttcactgtgctgttagaacgatcaaattctcgttttgtttttttctcttgcattggtatataccatcgatgtagtgtatttgcagatggtatataccatttgattttgaatcaagtgttaaaaacagcgaagcccggcagtgcgcgaacactaaccgggcctctgaccacaaaccgttaa

SEQ ID NO: 194942 - DNA, 213 bp, Klebsiella oxytoca
atggctggatcacagcatacccaaactcaccctaaatttacatggcgttttctttctacttctgagcgtttccctgctggcaagccgttggtgatctacgtcaacgcatccagcgaacaggaagcccgcaacgctatgccaggagtaagcctcatttttgccgcccgcctcccgttccatgcctttcaggttatggaggttcgccatgtttaa

SEQ ID NO: 194943 - DNA, 450 bp, Klebsiella oxytoca
atgtttaaaatcatcgtgatccataccaaccacgtaacaggcatcgtcaccaacagtattgagcctaagcgctataagactcgccggaacgccgagaaggcagcggataagattggctatgtttgttcgcctgacagcaagaccataaccatgagtattggcgctgtagttgaggaggtgaatgccgagccagatcacgacgcaaatctgcctgttttatctggtaacacgtctgtgccatccaaaggtgatgcggccgctgccgtgcttcttgcggcggaattgcaggagttatgggagctccatcttgatgctcgcttgcgggaagccaatcccagcgccggcgccagattctggacgctcatcaatgagctgaacctcgcaacccggcgaactgaacgcagatataaccgccttcttttaaagctggaggggagaaatcatgcgtaa

SEQ ID NO: 194944 - DNA, 207 bp, Klebsiella oxytoca
atgcgtaaatcaataaaaatgcccgttattcatttatcgctacccgtccctgaaaacttcacagggaaagtactcgtgaatgtcgaaaaaggcacagctattggcggatttccgttgagaccagatgagtttgttggttccgtcgatagctttattgaatgttgccgcctgacagggttccagattgtagaggtgcaccatgagtga

SEQ ID NO: 194945 - DNA, 201 bp, Klebsiella oxytoca
atgagtgatctacccgtccgacagtttgccgacaaagcatatcaggcagaaattattctcgccctaatgcaggcaaggcaggttgaaaaaatggaatccagtgaagtggccgcgatgataaatctactcaaagatctggttggcagtgtaggcggttttcttggtgaagaagcatttcgagaggaggaggaaaatgcttaa

SEQ ID NO: 194946 - DNA, 1107 bp, Klebsiella oxytoca
atgaaagtgttagttgacgatattgttgctcttatagaagcgtctttagatgcaaactattctgaagtacgtagtgtgagcaatcgaattgccaaagctataagtaccgataatatggatggtgcgaaaaaaataaaatctgttttacgacgtaagggggtgccgttacgtagttcaggttacagcgatagcctacccgttgatccaaagtcaagaatgcctttggtagaagagcatcaatggcctgtcacgcctcttttcttagaggagagtgaacaggatacctttaacacttttgttgaaagtgtaaagcaacaagataagctgattgcgaatggactagttggtaaactaggtttgctgctttctgggccaccaggaacaggtaagacattgattgcagggcatatagcgtcacaacttaatagaccactttatgtggtgagattagattctgtaatttcttcacttcttggtgacacagcaaagaacctaagacagatctttgattttgtaccgtcaaaaaatggtgttctatttctcgacgaagttgatgccgttgcaaaagtaagagatgaccgccatgaaataggagaactgaaaagagtagtaaatacattaattcaaggtttagactctcttgatgatagttctatagttatagctgcaaccaatcactctgaattacttgatcctgctatctggagacgttttccttttaaaatacgtctcgatttcccttctcaggagttacgagagtttttatggagccattttttattcagtgataaaggctcctttaaggaattaaaggcgttgggtattgcttcaaagggactaagtggtgctgatattgaaactatagctatttcggctaggaggcaatcagtattatcgaatacacctttgaatattccttctgtattgttatcaattatggatagtgaatacaataattcagtgatgcctaacgctaaggaaccaagtttacataccaagaaaagattgataaatcttttatacgaagcaaaatctttcacacagacagaaattgccagcctgttaggtttgagcaggcaaacaatttcaagccatttaaaggagtaa

SEQ ID NO: 194947 - DNA, 2229 bp, Klebsiella oxytoca
atggcagatggtaataaccgtaagaaagtgttaaatcctctactttcgtatttggaggatcctgcgccaaaagcgattaatggtggaggtaagaatgctgacgatattcagtgggctaggttagatattcaaaaagagactttaagtaaaagtcttaaaagtatcagtgaaaacaaatctattatagctcacgctggtaaaatccatctgctaattaaaatgtttgatgattcattagcaccttcatggaccccgacggatttatttgaaacaaatccttttactagactggtttctcctgcatacaacggatttttagttgaaacaagcaaggaaaagatacctgaaattatcaagaagataaaaactgctagcaatgatagaattaaagtagatgtgtcacgacttgaaagtataaaggcatttgataggaacgcagttttaagagggaaaagcttatctgactttgattttagtaatgatgaaaaccagtttaatatttggattttaccatttcatgatccaaatgcgcgcttttcggttgctgaggagttagaggatcttgttgatgaggatgttattacgtttggtgaatccatttatgataatgtttttgatggagaaaaaagaacctctggtactcgttccttcaaaagaaagttaaaacaatatctatcgcatggacatttgacatttacagccgtagtaaaaaataataatgatttcataaaattaattggctccggagctatatatagaatcgaaccggttaagaaggtgacaactaagtcattgcctcctggtgaaggagaagaaccttcaccaaaactaattaataaagaaacagctcccgttgtggtcatagttgatggtggttgttcatcgaagtcttacttgccattgaatgtgattaacattaagccgcttattgatagctatcatgcagatttaaaacatggcaattgcataacttcattagtttgccaaggcggggcttggaataataaattacacttgccacaattagagtgtaaatttgttagcgtacaagctataagtaaaagagatgtaagccctcaaccgaccaccgagcagttcattaattatctaagagttgtggcggagaaaactaaaggtgtttcttctgtttggaatctatcatttaatgaggcttcgccatctgatagtgttgatgaaattagcaggttgggacatgaaataagtcttctggctcgcgaatttaatatattacccgtgatttcaattggtaatgttaactctgacaacccgaataccttatgtcctccggctgattgtgaagcggcattgactgtatcaggtagaaaagcgtctattttaggtgagatatcttcacattgtccaaaaagtttgcgtggacctgctcctggtggaatgaagaaacctgagctttcttggttttctaaattgaggatgttaggcggggatgttaaaacaggtacaagttttagtgcgcccttgatatcaagcattgcggctcacacgttcaaaaatctaaaagagccaactccagatttagttaaggcattgctgataaacaaagctgaaggtatcgagcatgatcttggcctaggttgggggtctccatggaggaaagggagttctatgccatggatgtgtgaagatggaactgtgacattagcttggagttctaaattaaaagccggtagtgcatactattggaataatatccctatccctcctgaaatgattgttgatggaaagatcaaaggtagtattattcttactgctatcttaaaaccagtagtttctgaattagcaggggataattatttttcaacaagattacaatgcgcactacagcatgttaataacgcaggtaaggccaaaaatcttcttggtactatgaaagagtcaaccgaaaaggaaattgattccagaagtgaattagctaaatggagcccgattagacatcatggtaaaagctttaaaggggttgccgttgataatgataaagtaagactttatgcgcgtatttttacaagagatcttttccaatttaattatgcgagtcatcatgaattagatgagcaagatgtggcatttgttttgacctttaaaagtcctagcgacgatccatcaatttacaactcaatgaagcaacaacttggtaataaggtcaaagctgcggtaattgaacaggatattattctggatagcgatgtttga

SEQ ID NO: 194948 - DNA, 180 bp, Klebsiella oxytoca
atgtccagacaaaacgtaaaaccggtattactcagccatgagcagataaaggcgctgggtgaaatccgcgaacagcaccgcaaggcgtccagcgtgggcgtcgcaccaactatccacgagattgcccgcgggctgattgataaagcgctggaatctctgtctgacggggcgaaagcatga

SEQ ID NO: 194949 - DNA, 591 bp, Klebsiella oxytoca
atggatattctttctacgttgctccagcagcatagccgtaatatcgggattatcgtgccggatgtagtggtatcagaaaagcacagcgatgtgctggagattaccgagcatcccgtcgagaaggtcaccagctcaggtacgggggtgatgacagaccatgcctaccgccggccgtccgaagtcgtcatggaggtgggtttcgccggcggcgggtcattgctggatttattcgataccaccagctttggcatcaaagcgaagctgagcccgaaagaggtgtatcagcaaatcctcgacctgcagcgctcgcgggagccattcgacgtcacgacgggcaagcggctgtacaccaacatgctgatccgtagtctggaggtcaccactgaccgtaccagcgaaaacgtcctgcgtgccgttctgacgcttcgagaggtcattatcacgcagacccagagcataacagtagccgataaggctgatatggcgctcggcgttaatacctcagcagtccaggacaagggcgtaaaaaacccggttcctgtcaatgagtcattaatctacaaactcagcaaactggcaggtgttaaatga

SEQ ID NO: 194950 - DNA, 306 bp, Klebsiella oxytoca
atgagtgtgaccgaaattccgttaagccccgacagccagagcttcagcgcaaccctgaacggcaccgaataccggatgcgtgtgttatggcggggtgcctgctggttcctcgacctgatggacagtgccggtacgctgataatcggcggcatcccgcttatcactggtgctgatctgctggcgcaatacacttacctcaatctgggattttcgctgtatgtggtctgtgatgacccggcccgcgaaaacccaactcagtttgatctcggcattaacagtcatctttacgcagagacagaggaataa

SEQ ID NO: 194951 - DNA, 1068 bp, Klebsiella oxytoca
atgtcaaagaactggatgcggcatttcgagctggtgctcaccgataacgaaggtaaaggcctggtactcagcgagtttaaagcgacgttcgaaatcgaatggaacgataacaaatggcccagcgtggcgaccgttcgcgtgtataacgtggccagcgagacggcaaaccgcattatgggccgcgagttctcgaaaatgaaaatcatcgccgggtacgatggcattgcgccagttgtaccggccagcgaagtgggcaaagttcatgaggtggatccggctcaggttgggcagacgaacggcgccaactacggggtaattttcagcggagatatccgttttaccgtcaccgggaaagataacgtaaccgacagttgggtgcaggttcaggcgtgcgatggtcaggaagcgttttctaaggcgtttatcagtacgacgctggcgaaaggctataccgtgaaagacgtgtataacgtgctgatgcgtgcgcttgagcctttcggcattgtcagcggcgcggtaccggaattcccgtctacggttttcccgcggggacgcgtgctgcacggtaccgttcagcaatatctcgataacgtggcgaatcagtgtggcgcccgctggcagttcgcttatggccgggtagatatgctcaccgctgatatggccatgcataaggcggttgtcctgaattcggataccgggctggtgggcatgccgcagcagacgatcggcggcggggtgaacttgaaatgccttatcaatccgaacatccggttaaatggccttattcagttggatcaaacctccatctaccgcgctcagttgtcaggcgagcaggtgaaacagtctggccctattaccgtcgataccgtcaacggcaaccaggtgacaaccggtctggcccagcggcagaacccggccagcatcgcaacagatggcgtttatctggtgcgctatatcatttatcgcggtgatacccgcggacaggagtggtatatggacatggcctgtgaagctcgtggcgcggcagatgtctactcggcagctgcgcagcagagggtatattcatga

SEQ ID NO: 194952 - DNA, 357 bp, Klebsiella oxytoca
atgatgggaacaaaattagtagtgaaattggcgttattggggattgtgtttgccagtccttttgctcaggcggatttagtttgcggcggtttccgcctgcatgctgcaagcgatggctggactcgtgttaacggagaaaaggttaacactcagaagatcaccttcctcaaacgagagggggactgggataatatcaaaaccgacatgaccctgatgcccgccagagacggcaatatgtacggctacgagtttattaagcagaacggcaaagcctttctgaacgtagagctgattcgccgggttatggaagaaccccgcattatcggtagtttcgactgtaagcgcgtacagggctaa

SEQ ID NO: 194953 - DNA, 756 bp, Klebsiella oxytoca
atggcgaatatcagacctgctgaacttcaggaaacactggatcgcgtgaaggacaaatccgtcgcgaacgccaggacagcattacccggcgtaatcctgtcatttgacccggatacggtgacctgcgctgtgtcgctttgcagcaaatcgagcaagccggtaccgtacgaagatatcggcaaaacggagtctatggatttcccgctgctggtggacctgccggtggtctttcctcgcggtggcggcgttacgctgaccttcccgctggctgaaggtgatgaatgcctggttgtgttctccgaccgctgtatcgacttctggtggcagaacggcgggacacaggagctggtggactggcgcagtcatgatttatcggatgcgtttgttattcccggcccgcagtcgcaggcgaagaaaatcagcggtatcagcaccacggctgcgcagttgcgtaccgatgacggcgccgcattcattgagctggccgcagggcatgacgtcaccgttaaaactccgggtaagttgacagccagcgccgatagcggaacggaaataacctcacctgaaatcatccttaacggcaacgtgacgatcaacggcaacctgtcgcagggaatgggcgatagcggcggcacggcaacgattctgggccctgttaccgtaaccaaagacgtgactgccgccggtaagagcctgatgacgcacacgcacggaggggttgagcatggcaacgacagcaccggcgcaccgcagtaa

SEQ ID NO: 194954 - DNA, 186 bp, Klebsiella oxytoca
atgaaacctgaataccttgcagaaattgtcgcagccagtatcagagtagacggcggtacggtatcaccgtttgatgcccgcgaactggaacgcatgattgtcagccgtgcagtgaaccggaagaggtttattcagaagatcaggtctcccacgttcgaatggaaaaagccgctgccaagacgttaa

SEQ ID NO: 194955 - DNA, 501 bp, Klebsiella oxytoca
atgctgcgcatctgtccgggctaccggactgcagacggtaataaacctgtagcccgggcaaggcgcgtcaagcgccgcccccgggttcaaagcgcagagtcgctgaatttcccggaggcgatgctgcgcatctgtccgggctaccggactgcagacggtaataaacctgtagcccgggcaaggcgcgtcaagcgccgcccccgggagcagagcgcagagtcgctgaatttcccggaggcgatgctgcgcatctgtccgggctaccggactgcagacggcggcgaactcgccgcccgggctgtgggttcactgttcgccagcaacaaaaaaagccccattaaggggctcgacattgctgcgtgcttattatgtggcgggagccagaccagccgccgtcaggcgacctgtccggcagctccctctgcaaccattcggttatttagacagctcggcggtcatatgaacctggttaccggtatacgcttcggtaatgtggtatga

SEQ ID NO: 194956 - DNA, 675 bp, Klebsiella oxytoca
atgagcctccggcaacggcataccctgtgctggctggcgctcccggcgctggctgacatcgcggaacaactggagcctctgcccgctgcgctgcggcaacaggcgcggggatttctgctcagcggatcgctgccggggattgtgcgccgcggcggacggaataatggcgcgatcccgcttgggttttgttttccgctgcgctggcaggggcagcgtttacgcctggccgcagaggcgccgctatcggcaataacgcgtcatttaacgccggaacaaacggcatgtcttcccattgccggaggttcccatgcgatacgcgctttcaatgcattgcgtcaggaatggcgctggccggaaatccagcttggcgtatggggttcggtggcgcaggaaatcgtcacgccgtggcagtggactgacgccgattccgatctggatattcgtcttatccccggcgcgcttgccggactcagcgaatgtcaggaaaggttatgcaatatagaacggcaatttcagttacgtattgatggcgagattggtttagctgacggatacgcaatcaatatcaaagagtggttcagcggaagcgcaactctgctggctaaaggagaggatgatgttcaattaagatcgcgacagcaggtcacggcagcaatgagaacatatctctgttaa

SEQ ID NO: 194957 - DNA, 486 bp, Klebsiella oxytoca
atggaaagcaaatatatcgccttaaatagcgcccttctcttttggctgcttggcctgatggcctggtgcttcgaatccacgtatctggcctggctatcgggctctttctccttatcctccttcgtttttcattttcaatatcagcggattaaccatatgtttaaaaaaaacaaaagcattgaagctacgccaccggcggtgaatacagcggtactcaacggtgaatctccatccgccgtggcccgaaaaccggccaccacggttatcgccagcggtatccgctttgacggaaacattatcgccgagggagacgtcgatatttacggcaacgttaccggcacgttggcctaccgcacgctgaccatcaaaaagggcggtgttttttccggccaggcagaactgctgccggcggcagataagagcaacgtcgtggggtttatcgcggataccgctattgaaactaaagataagattgaggcgcagtag

SEQ ID NO: 194958 - DNA, 1041 bp, Klebsiella oxytoca
atgagcacagcatatgaacaactcctagttgaaaaagttatcgattttggggacagcttttccgatgtaaaacaacctaacaacgtcataaccagtttaaatctgtttggagatgagaatctcagcatcaataaggtcttgaatgaccgccttgttgaagatgcagatcgcgtcaatagtgaaaattccccttacgtaaacagtgattttaacactactgaactacctacatttgatagccatttcgttgaactccgaacatttaaacgggtagacaaaattagctctcgctcgttcgaacaggctcgtggttttggcaaaactgtagctgaaaccatggatgaccagattgcaaaataccttattgaacacgatattgcgtatcaaaacacgctggaaagtatcctcgctgagtccgtcctggcagggaaacaatctggggtttataccgcacaaggcgatttagatttttttgctgaattcaatcaaactaaatccacagcaacattcgattttagttctacatccaatgttctggcacaactggacactgtacagcgccaaattcgacaggctgcacgtagtaaactgaaatctatgcagggcattgtttgtttatgcactggcaatatggcgcagaatttggcctaccacaaatcaattcttgatgcagttatttacgcaactcctgttaatgacccagctaattttgttggcactctacaattttaccttcaggcgtatcctgtatggtcactgaaagggatcacttttgttgatgtcactggtgatagctatctggagtccctaattggtgagaacaacgctgtttttgttccccgttttgcgcaggatagcggcgtatttaaactgtttaacggtattggaaccatgcacgcaacgcttggtaaaactccggctaaattccatcaatatgcgattgttgatgaaatgcaatttccgacactgatatcagaatccgcacacctggcaattaataaccttccacaggctgtggtatacgctagtatctccaactaa

SEQ ID NO: 194959 - DNA, 1818 bp, Klebsiella oxytoca
atgagtggaacacagattaccgccagtacattggtaaataaaatagtttaccgaacagatttaaatagtctgaaaaaagtcagaaacgatatgaggaagttgcaaaaggagttttctaaatcaaacaaccaggtagctaaggccaaacaggcagcagataaacaagtatatcaagcacagattaaacaacagcgtgatattgataaacaacagaaacaagcagctaaacaagctgctgtagacgctaaagcaaaagctaacgaacagaagaaattggcagcagcccagagcaaagcggctaaaatgcagcttcaacagcaagctaagactacgaaagttaatgaaaacgccatgctcgcacaacgcaaggctctatttgacattggcagattacaggggctgcatggtgctgaacgattccaggctatcaaacacgctcagtcacttgttaatcagtaccagcaaggggcgatttccctacgggatatgaatcaacaactctcacagcatttgactacacaacgcgcgatagccagaaataatacaaaacaagcgaagcagtcaggaaaaaaatcaaaggctggtcggtctggtagttctggttggttatctcaaaatgttaatgcaattgtcccacagcaattattatcaggagcagcaggtgtatacctaggacaacaaatgtacgccatctcctcacaggcaatttctgattcactcgccagaaatcaggacaggaaaatggttagctctatggggctaaatcccctggaggccgatgcggctattatggagacgctaaaacgaactggatttgttatgtccggtgctaagatttcggatattgcaaaggatgtccaggacaagatcggacaattaagccttggagaatggaaaactgataaaaaaacagggcagtcaacatattcaggcggtggggagatgggagattggctccagatgatggttagtcgtggaggctatacccaacagggagcattaaaaactcttcaaaatgttaaaggcccagttgagttagctgtacttttaaaatcccttcagaagagtgcaaaactaactgaatctgagtttaccgcgctagcagaaacaataaatgacttttcttacctagcaaaatcggtagatgcatctggtcagaatgtcatcgacacaatgaatatgatggtagaaaatggattagcactgaacgatgctcaacagaaaactattgatggattaaatcaaatggggattgtgtggagcgctattaaaaattcgtccgctgatcactttacattaggatttgctgaggcgatgaaagaggccaatttaaattctgacaacctcgctaaatcattctcgggtttaaaccctctgatggaaaatctaggtcaatctgctggtgaactctcaagagtattccttgattttgcaaacaaaataggtttaaacgttgggaaagggcaaacgttgccagatgctgtttataataccgtggttgatagcagtgcgaatagtgccgctgactggatacaaaatatgattggttttgatcctcgtagtgtagggcggttttttggttctgaatcctcagtcgcagcacaagtgcaaagtggtggttggtataaccagatgatgccagcaacgtcagctatgcagtaccaaccaatcatcccggatttaaaagctgattttaacctcacagtgaatccatcgccagaatttggaatgatggtcgaagctgtcgccgataagcggatagagtgggcatttgatgatcagaatttccaaatcagtcaaagtattttaggacagtaa

SEQ ID NO: 194960 - DNA, 135 bp, Klebsiella oxytoca
atggtggacccaacctctttagctgcaatctctggcacgcttgatcttgtgaacaaatcggtggatttagttcgtaaccttcgcaaaaaaggtgatgaggagctaacatctgctgagatgggctttgttgaataa

SEQ ID NO: 194961 - DNA, 702 bp, Klebsiella oxytoca
atgagtatatctgatggagtcaaggttcttattataacggtgtgtggttataccttcacatatgcttattacgtggggttttattccgctagagaaatccctatcgagtttattgatgtttctttattaagcatgatgaaaatcggttttgttacatgtgctatattatcttttgtattctattggcttgatcttttcaaagaggaaatagaagatccaattggtgtaagtgtaaatacaaaaagatttctaattcgacattcgttagggattattacaatgttattatttactgttaacatgacattgtcagggaagtggctttctcttatccctccatttatgatctggtatattagtttaaagcaagatattaccatttcgtttaaagattcagagatgaaacgctttagatttaaaattgcaataaaacctttgaaaaaattaggaagcactatagttgcagaaaaactaaatatccattcatattatgcgtattttagttggtatttggctttgttattcctactgtttaatatcggaggggtgttttcgcacattgccaaagagactctcatttgcaatgataacaattatgtaatcaatgttgggagttctgatgtactagtaacaaaaaatgatagagtgttcgagtttatggataagaaaaattgtaaatttactattcccgacataaaataa

SEQ ID NO: 194962 - DNA, 291 bp, Klebsiella oxytoca
atgctagcaggcaaaaagttaaaggttcgttacacccggtgcggtgaaaagttcgaaaagacatttgtatgggacggctgtgatcctgttggaagtaccttatctagcctagtagcagaatataatctagtgtctttaatctcagcacaggaaaggagagaattaggtggaacacgaaatcttagaaaaccaataaatcttcttgagcatggtattgatgatgtgtttttctttgatgatgaaattgataattggcaagaaatctccactaattggcttaccgatgcctaa

SEQ ID NO: 194963 - DNA, 1899 bp, Klebsiella oxytoca
gtgaaatggacattaatctgtcgcttttttcttctgctgtggctgttcagcgtgccgttcagccctgcgcattctgaggttttatccccctggcaagaagctatcgctctgtttgacgttcaggctaccatgcgccaggacggcgtgctggacgtgcgagaaaaccttcacttccaggtgcgcaacaggcagatcaaacacggtttctttcgcgatcttccgcgtatgtgggtgcggccggacggcaacgcggccctgctgacgtaccatgtgatcggcgtgacccgcgatggcaaacccgagccctggcatctgctctggcaccgggggacgatgaggatcgtagtcggcgatgagcaaacttttctgccggaaggcgattatcgctaccaggtgcactatcaggtcagcaacgcgtttatccgcgatgacgaagatgatgtgcttatctggaatgtcaccggcgccagctggtcgttcgaaatattccaggttcgcttcgcgctgcaactagcggatgcgcaaggggacccgttcaggcagatcgacttttttaccggcgatgatggcgaaaggttaaaaaatggccaccttctgccggatgggcgcattgagtcccgcgaacccttctaccagcaggattttaccgtactctatcgctggcctcgtgcgctgttgcctgatgccgcagagccgcaggcgactcatctactcccgcatctttttatccccacgttatcgtctttaagcgtgtggatcccctgtggattaatggcgggttatttcttgtttttatggctgcgcaggccgcgttttactccggttgacgtgccggtgctgacgtcaatgtctacggaattttctccaggctatttgcgtatggcggcgaagcaaacgtacgacgataaaggtttttgcgccgatgtgaccaacctgattgtgaaggggcgggtggcgctggagaatgtgccgggcgatgaaatgctatgctcgttggttcgggtacgttctggcgcaattcacacaggcgatattccgacccaggaagagcagctattgatggatctgctgtttcataagagcgataaagtggagctcaaggggcgctacaacagaacgctgcgcaaagcgtttaagcgaatggataaatactatcgtcagcagcataagggcgcgggctatcggcctttgagcttcctgttatgcggtattgtggcgatgtttgcgactcagattctcgctaatgcgcagagtctgggctggacggccagaaccttaactgcggattggtttgcgggtcttttcttcgttattccgcttctctttagcagcgtgtttttactgagcgatagcgatcccggcaaaccaattcgcaagcgtctaatggcgacggtgttgtggccgcttatcggcggcggcctgatttttctgtttctatgggcgaaaatgggtttttcgctctttcaatggtatatgcccgccggatacttcagcgcctggtgcctgtccggttatatcaccgcgctgggcttttgcctgctcccgcagcttacgcaattgggccagcagcgctttgccagagctgaaggggtcatccgttatcttggacggctggaggcagcaacgcacagcggcccacggcgcaaaggcgaatcccgttacctggatatttcattgcttagctgggcggtagccgcagggttgggtaaggcgtgggccaatcgcctggctccatccctggcggcggcgattaaggcgccggagatagcccgatccggggcgtttttgaccttgcaggcgcatctgaatagtggatccgccagcgcttttggtctcggcggcagcggcgggggattttccggcggcggagcaggaggcggcggcggaggcggatggtaa

SEQ ID NO: 194964 - DNA, 1416 bp, Klebsiella oxytoca
atgaaagggaatgtagctaaaacagggagatcatttaaaaatagggttgattatatattaaaagatgatcacagttttatttgtagcaatatgtcagcagataaaaataacgttagtgagttaactgatgagtttaaaactgtaagcggctttagacaagatataaaaaaaccagtctttcatgcatttttatctcttccaaaagatgaaaaattaacagatgaaaaatggcaggagatagcaaaagactatttgaaagaaatgaatgttgatatagaaaaacatcaatatatttgtgtgcgtcataaagatacagatcaagaccatattcatattgtagcaaacaggatcggccttgatggttctgtatggcatggtcagcactcagcatttaacacaatagcagcttgtgaacgtttagaagtaaagcacagcttaaccattactaaaggcttacaggggcaaaaatcagacgtatcagcaccaaccaagaacgagatcgagctggcattgaggacaggtgagaaaccagcccgtttagtgcttcaagcctctctacaagccgctatggtaggaaaaccagacttagggacgttcgtagaacgtctgcaggccgtaggcattgaacctcagttcaatgttgccagcactggcaacgtggcaggttgttctttcagtgtgggagatgtggcatttaaaggctcacagttgggtaaaaaatttagttggaacactataaaaaacaaggtgaaatatgacaaaaatagagatgatgaactcgttagaagattcgcagcaagaaaaacagatgacgaaaatagtattagacgatcatttgttgaaccaaatatcaatgacgatagaaccattatcagaaacgatgatgatattatcggagtcagtcagcacagcattaaaccagacacaacagacactaataagagtgaacaactcattagaggcaacaacaatcgctttaaactcagcgaaaaatacaatagaccaacaagcccaaaagttagaagaacaacacaaaaagctgcacaagtactcaacagagttaaaaaacaataccataaagaaccaatcaaaacttatactaaaagtagcttcaatagtaggggttctaaacttatcagcggttctattggtaggatacttgatcatgcagaaacagcaaacgcagccacaaataaatttagactcaagagcggtagccgtttcaatagtagagcaactaagctcgaagagatgagatataggctgggaataataaaaccagttattaagtctaaaaataaagagaagaccatgaaagaagaaataaagaaaaaaccatcatatatggttgattatgagaatatatttaaatacaaggtaaagcacgattcaaaaggaaaacaacccaaggggtaa

SEQ ID NO: 194965 - DNA, 1119 bp, Klebsiella oxytoca
atgaaagataattggccattctgcggaagaactgtatttttatcaggcggtcctattgctacaattgaaccattaagtgatgaagttttaatttggccaaaaactaaagatggaaaaataacacaaataaaaatagatcaatacggtaaactcttttatgcagttaataaaatcaacttaaacattatcggcgttgagtttacttctaatgaaagtgaatatataggtgagtctccaagagagtttcgaggctatgttaaccaaaagaatatttggtctaattgggatgccatacagacatggggtggaatagctctgtcatcatttcataacaaaaatggaattagctatgatctttcaaatagaatccgatttcaactgaacacaattaacaaccggttaaaaaacttagctgtttcttatcaacaacaattaaatgcattagttttaaaagaaagtttcaaaagcgggcaacgatttcaggacggatataccgatttagtttatcaagaattccattcatttttatttgattctggaatccttcgagataatctttgcgagtatgtatacaacttctcaaatggaggaatcagtaagcaacaaggaaaagaaattacaactgcaggaggcctgctaagatttttaaactcaaagaaagatcattcggaaatagagacttatctgaaaaaggaaatgagcattggtggatggctgtttgagttgggaaattatagagatctagtaatgcactctgcaccaataaatattgcaagccataatttatatgcaattcatgagcctatcgctatgcctgaaggtaaagaacttcctgcagttcgtttcccgttgcccgctaatcccgaaaagctttatagtgaacgatgtaagaaaagtgattttaataagtatatagaaaactttaaagaaatatcgcgaatttctcttcaagatcgtggtaaatatgattgcttagaatatgcacataaagcttttggtttgctcacaaatttatcattagaagtagcaaagcaatcaccatttaaaccaatgcggcacaggtttattcgcacagaacaaggacttgtatctattcctgaatatgaagaaaaaacttga

SEQ ID NO: 194966 - DNA, 762 bp, Klebsiella oxytoca
atgagcttgagtgaaggggtgaacgatgggtcagcttggccgcttcgcccatttgtccagcatatccttccaatttttgcggcgactcaggcaaacgatcaatttcagattatgtcgattatgcgtaacgagtgcccaaagctggagccatcacgactgcatggtcaagctatggtggcagttttaaatgaactacaacaaggcatcaatagcctgcttgcactgctggaagaaggatcgcaagcaacagttcgggatatattgctacacgttagagactgtgaactgctacgtcttgacgatcgctttgataaccacttaagtgatgaacctgtgaatgatggtaatgatgacttcggaaatgttcagaattatctaagatgcaatgcctatgaactttgggcgtaccgacgctatctttcagaagaatcaccttttgccactcaccatggtgtaaaaggtgcacagtttgagcgcgtattggttgttatcgatgatgaagaggctcgcttcagccaatattcgtatgggaaatattttcaatacattcccctatccgacaatgatctagccaatcttgaagagggtaaagagtcagtactcgatcgtactcgtcgccttttttatgtatgttgctcccgtgcactgaaagatttggctgttgtcatctttgttcccgatgttgccgtcgctcaagcggcaatcgttgagcaaaatttatttccagcatcggtaattttaggggagcatgatctggcctag

SEQ ID NO: 194967 - DNA, 1734 bp, Klebsiella oxytoca
atgagcgagtttataacacctgaacataaaattgttgcccttattctggaggcatcgggtgagccagctgactttgagcgtgttctccggctttgcgacgaagatgatattgaacaagctgttcgacagttgagggaaacggtcataaaacggatttcatgtaggagagtctctgaagaagccgttctgactgatgtggacagttcatctaagctcctgtcagatagtaactctcacccacaaaacacaggcgaaaatgaaagcactttccctgtgacagacgcaatccacgcagatattgaaacaaccggaaatgaggcgcatgaaacgcataatgaaatgcctgatgaagccgctgccgggggagttcaggtaaatatggaggaagatatcgctgaaacgaaaaatgatttgctactgactcccgacaccgtgcagccaaaggagcaggcaacttcccgttctgctgaaacagatgaatattttcctcccgtcgcagtcagtgctttaaggcccggagaggttcctcagaaagcaagtaaggaggattaccctttcctcaagaaaaccccagaggtgtctattgtgctgccaaatgcccgggtgggtgaacggtttgacgtttctttggagatagtgaccgataatggtgtcccggcagacattactgagattaatatgcctcaggacattggactgatttttaatcacaacgaacgacgtctgcaagggacgcccactcgcagcggagacttcgaactttcagtgaaatggtcctgcagcacacatcctgacaatgacaaaaagttactttttgtcgtcaaccctgacccaaaaagtctctggaaagtgatagatccaccttcggatggacctttttacaaggacagtatcgcacatcagggggtctcccagtcaggtatacatattgctggtgcaagtcgtcgtggacgttcccatgaacatgtgggctccttccgcgacgatgatttctacctcaatttcagtgaggtatctggctggagtgtattactggtggcagatggcgcgggtagtgctaaattttctcgggaaggctcacgaatcgttgcagacaccgttgggaattatcttttcaaccagctgaagggtgagaagggtcatgaaataaaagacaaagttttacgctggaataatgatgatcagcgtattgtttgggatttcatgaatcaccacttcagacaggctgcggtactggccgtaaacaatatcagcagtgctgcaattatggctgaagacaaagtgaagtcattctcgacgactttactcgcgaccgtcacttttcgcgacggtgccgatttgtttgccgcttccttctggttaggggatggtgccatagccgcatatggtccagttgggaaagtcagagtcctgggcacaccagatagcggggagtatgcaggccagacaaggtttctcgatgcggaggctgtcagtgataccgggtttagtaaacgcataagtataggcaagtggagtgatatttcgcacctggttcttatgactgatggtgtttccgatccctggtttgaaacggataatgggcttcagaacccggttaaatgggacaagctaatgacagagctttctccccatctctcagcccctgaaaaggcgtccgaacaactggtgggctggttaaacttcttctctcccggcaatcatgatgatcgcacaatcattgtgctctggtga

SEQ ID NO: 194968 - DNA, 486 bp, Klebsiella oxytoca
atgtggcgaatatacagcccaaataaagatgggataagagtaaagactacagcaaagaaattatttaatattgtttataatagcttagatgaatatgcaaaattaaaatatttcattggaaaagtaagttataaagaaaaacaggaaatcataaattttgtaacaaaaagctcgttttcagagattatattaggtgggcaaaatgatagttttgcaaaattgctgtgtacaaaaagaactgcattttctcatgaaaatgaaataagggttctcgtggatgatattcataataaaaaaggtgatggtggcttgtacaaaatagacattgagccaatgcaattatttgatgaggtttgtctggatcctcgtttatcagatatggaggccaataatcttaaggcaaaattagtggcgatgggtgtaacatgtaaaattttgcaatctgacctttataaattaactttaccccgcctaaggataagctga

SEQ ID NO: 194969 - DNA, 822 bp, Klebsiella oxytoca; identical to SEQ ID NO: 121408

SEQ ID NO: 194970 - DNA, 183 bp, Klebsiella oxytoca
atgccatacggtgaagatagtattttaaaaaacatcattgatatagatagcttggatatgtctatctataggattttcagcattaaatatttcgatgagttgataacaaataaggagttagttttagttcaacctgatatgtgggatggtaatccccccatttttaaccgggcagataagtag

SEQ ID NO: 194971 - DNA, 996 bp, Klebsiella oxytoca
atgtcagatttttgggcacgtatgcgtttagaaatactccgtagcaacggtgtagaatatcaaagactatttgaaaccgtaatggagttatcttaccctgaaaaattcaggaaggtcaaaccttgggggaaaaaaggtgatggcggtaacgatggttatattccagagcgaggtgaatattatcaagtatacgctccggaggaattgaatcgtgacaaaataaatacagcaataaaaaaaatcaaagaggacatcggaaaaataataaaatcatggaatgaatcttgcgaactaaaagtgttttatgcggttatcaacgataaagaaatgggatttccaaaagatatatatgtcactcttgatgaaattaaaaaagaatatgaattagagcgagcagaagtattcagttcggcaatgcttcttcatcttgcaatgggacttccagcatcaaaattaaaaacattcctgaatgtcaacacaccttcatataaaaaagaaatggttgcgcacaaatatgtaatcaaacatttaccattaagaatggttggactttttgttactaatttgtctagcaattttattcttgaagacactctaagagatatgttaaaaataatcagttattgcaatggcaaaacgtatgacatcccaggatttaaagaaaccatagaagcaatgtatccttggattctagctctaaataagcacttcatggagtttagatataccataagattaaaaaacggatataaagtttcgcgagactggaagaataatgagccttacgagaatcatgatagacttcagcgagagcacaatttatgggaggagaattgcagcattatctgtaataacttgtgttatgctatcaatgaatacattttattgtatagagaatattttgacttggaatttcttgatggtgaacttatactattagaagatgagacactaccttctgagtatattgatttattaccaaatgtcatttgttaa

SEQ ID NO: 194972 - DNA, 597 bp, Klebsiella oxytoca
atggataaaacaaacaaacatttagataatttgaaagatgctgtaagacaatctcttttgagaaaaatagatgacgatagtgttgaaataatagacctagatgttattaggtgtgcaaatatttttataaaatcagacttcaataaaatggaggttctattatttgtaatttctactgttatcgagatggagggtttgaggctagcccttcagtcaaatattaatttcaaagactctttcgataaattgatggcgtcagtacgagaggctgaaaaagccgaggatgatttttcaaagctggcgataagcagtatccacaatctagggtcttccgttacagagttgcgaaagcaacttgaacaaaagccttcagagatggcaagggcgggaggcaaaggtaggaaaaagaaatacgatccattggtacaacgagcaattgagctgtatgaggctaaaaactggcattcagcacgacaagcagctaggtacatggagtcggagattgttgaaatgggcaaaaatattggcgtacctttaaccggtgagcagccctgggaaaccatacaaaaatggatactcaagtatgcaaaaaaataa

SEQ ID NO: 194973 - DNA, 1308 bp, Klebsiella oxytoca; identical to SEQ ID NO: 147214

SEQ ID NO: 194974 - DNA, 765 bp, Klebsiella oxytoca
atgaaaaaatgcatcactttcagcgcaaacaaaaaatctactattgatgcaattgatgactatagccgtgcaaaaggatactccagatcagaagtgatatcatttttgttaaacgctactgccccagtattaaataaaataacatcgcaatatcatatagctcaaactttagagtcaacattaggctgtatttttgaagagaagaaatccttaacagcacggagtgagccgaaattaacctacgaagagtttttttactctgtatggaacactcacattcgacacaggaacgaagttatcgatcaggatttttatgcacacaaaatacctcatgataagatggggaggagtgaaaaaaaattaattcatgaaaagctctcatgcattataaaaagttttcatgtgaaaaaagcaattttcatttacacagatcgacgcgtgaatcacaaacatcttattgcaggagggttatcgaatatcattctgataaaagaaacagtttatgatgattatttttttgattttagcagtattgtgattatgccaatctttgaacttattacatttggagttgaagcagtgttgaaacgaaataaaatccaccctgaacaatcatgctattgctggataccaatttattacacaaatgatctagcggtaatggttccggtcattgccgaaggcgatgcacctcaaaaggctataaaaggaagagacgccatcatcattaacccctttaacggtgaagttaaccatacattctga

SEQ ID NO: 194975 - DNA, 621 bp, Klebsiella oxytoca
atggaattatatcatggttcacatggtgagcatgtgctcgcctataaaaaaaatattgaacgagtcgtcaatgatgcactcagtgaattccccagaacaatggcattacgtgttgatgtacattacccccccattctagacagaggtgatactgtttgctgttttcctaatctagagcctggtgccatatcccgtttccgtaatgcattaaatgccatgttggaggccaatgagagagccagagccgccaacggtaaaagaatatattcaaatcgtgttcgtcatgtttgggtaagggagttttccgaagaggggaaatgtcattttcatcttggtcttttttttaacaaagatgcttattaccatttaggtgattatgaggctgaaagcaatttacggatgatgattgtaagggcatggtacagtgccctggggttggaactggatgattatccgggattagttcactaccctgaaaattgtcgttatatattagacgtcaatgattttaactttgaaggagaatacaataaattactgaatcgcttcgactacctagctaaactcgatacaaaagcatatggagatggcgaccgtagcttcggctgcagtcgcggttaa

SEQ ID NO: 194976 - DNA, 495 bp, Klebsiella oxytoca
atgtcggttactgtaacagttgaaaaagtaggggcggcatttgcattgatcaaatgccaccataggcctgaagcagaatatgaatttactggtgagtttctcgggctttcacacgagctgaagtttgcagggaagaatttacgagaactgagagaaactggctgttctatttatgaaatttatcaggatgaatacggcatgaccttacttcctgatcatcccggcattaaactggccgaaatactagcggtatcaaatataggactgaataaattttcggtttacatgggatgtcgcgagcaagagatagttgaattgttgaacggttcagtttcactgacgaaagctatggcactccggttatcgcatgtagtcggtggaagttggtcgaagtggatgttaattcaagagcagtttgaattacagttggcacaacgagagattaaagaattaatgattttgactaatatcggggatgaggtcgttggattatag

SEQ ID NO: 194977 - DNA, 1188 bp, Klebsiella oxytoca; identical to SEQ ID NO: 143766

SEQ ID NO: 194978 - DNA, 1359 bp, Klebsiella oxytoca
atgagttttgaaactcttgagaatttatcaataaaactaattgatggtgatagaggtaagaactatccaaagcaatctgacttttttgatagaagtgattgcctctttttatctgcaaagaatgtcactaaaaatggttttgagttcacagattgctcttttatttcaatggaaaaagatcatcaactgcgagctggaaaattagaacggaatgatattgttcttactactagaggaacgataggaaacttggctctctatgatgagtctgtcagcataagtaatgtccgaattaattctggcatgattattttgcgcccaaacacaacgatgtggaatccaaggtttctctattttttattgaattcagatttagttatacagcaaattttggctctaacttctggatctgccgttcctcagttaccagcgagagatcttaagaaatttgtattacctgtcgtccctttaagtaaacaaaataggatcgtggaaataataggggcgattgttgataaggttcagataaaccgcgtaatcaaccaaaccctcgaacaaatggcacaagccctgttcaaaagctggtttgtcgattttgaaccggtaaaagccaaaatggcagtgctggaatcgggcggttcgcaggcagacgcgacgcttgcggccatgtcagcgatttccgggaaagatactgatgcgctggaggtttttgagcgtgaacaccctgagcaatatgccgagctaaaagccacggcagaactttttccgtctgcaatgcaggacagtgagttgggagatattcctgaagggtggtatttacaacgattttctaatattgcgacacttcattacggaaaagcacttaaaaaaacagaacgtatagaaggaccttattcggtttatggttcaggtggcatcactggctcacacaacagttatctcgttgaaggtccaggtattatagttggcagaaaaggttctatcggcactctgtattgggaggatggaaagttccatccaattgataccgtttattatgtcgaaaataaagaaggtgttccactaacctatctctattatttaatggggacattaaatctttcaagtatgaacactgatgctgctgttcctggattaaatcgggataacgtttatcggttggaaaccataaatccagaaatagctattttgaatgaattcaataatcatgtgtctgcgttgagaaatatgattcagagaaataagagttcaacagaaactctaacccaactccgcgacaccctgctcccaaaactcctctcgggcgaaatcaccctgccggacgccgagcaggcggtaagcgaggtggcaaatgtataa

SEQ ID NO: 194979 - DNA, 1710 bp, Klebsiella oxytoca
atgaacaacgccgaacaacagttcctgaacgagctggataacaaattctggaaagccgccgacaagctacgcgccaacatggatgccgccaactacaagcacgtggtgctggggcttatcttcctcaagtatgtgtccgatgccttcgaggcgcgtcagcaggagctaatcaccttgttccgcgatgtcggcaacccggacaacatctatgccatgtcgcgcgacggttacgactctgatgaagagtacgcacaggcgattgtggatgaactggaggtggaagattactacaccgaaaagaacatcttctgggtgccgaaagccgcgcgctgggacacgctgaaaaacaaagccatgttgccgaccggcaccgtgctgtgggtggatgaaaccaccggcaaggatgtgacgctgcgctctgtgtcctggctggtggataacgcgctcgatgaaatcgaaaaaaccaacccgaagctgaaaggtattctgaaccgtatcagccagtatcaattgggcaacgaagtgttgaccgggctgattaatactttctctgacgccaacttcagcaacccggaatataacggcgagaagctcaacttaaagagcaaagatattctcggtcacgtgtacgaatatttcctcggccagttcgcgctggcggaaggcaaacagggcggccagtattacacgccaaaaagcatcgtgaccctgattgttgaatgcctacagccgtataacggccgtgtgtatgacccggcgatgggttccggcgggttcttcgtgtccagtgaccgttttattgaagagcacgcgggcgagaagcagtacaacgccgctgagcagaagcagaaaatctccgtttacggtcaggaatccaacccgaccacctggaagctggcggcgatgaacatggcaatccgtggcatcgactttaattttggtacgaaaaatgccgataccctgctggacgaccagcatccggatctgcgcgccgacttcgttatggctaacccaccgttcaacatgaaagagtggtggagcgcgaagctggaaaacgacgtgcgttggaaatacggcacgccgccgcagggcaacgccaacttcgcatggatgcagcacatgatccaccacctggcctctaaaggttcgatggcattgctgctggctaacggttcgatgagttctaacactaacaacgaaggtgagatccgccgcaacctgatcgaagccgatttggtggagtgtatggtggcgctgccgggtcagctgtttaccaacacccaaatccccgcctgtatctggttcctgaccaaagacaaatccggcggcgacggcaaagcacaccgtaaaggcgaagtgctgtttatcgacgcgcgccagattggttatatgaaagatcgcgtgctgcgtgatttcacgcgtgagaatatcgccaaaattgccgacaccttccacgcctggcaggcggataaagactatgaagacgaagccgggttctgcttctcggccacgctggacgatattcagaaaaacgactttgtgctgacccctgggcgctatgtgggtgctgccgagcaggaagaagatactgaaccctttgccgagaagatggcgcgactgacggctcagcttaaagaacagctggcagagagcgcgaagctggaagcgcagattaaggcgaacctgggggggctgggttatgagttttga

SEQ ID NO: 194980 - DNA, 447 bp, Klebsiella oxytoca
gtggataacccgcatctcagttttactaaagacctgtttacggtcacaaccgatcccgccttttttgagctggaagccattcatgattacctttcgcaatcgtcctgggctcctggtattgatatagaaacggtcagtgtatctatccagaacagcctttgttttggcctactggatggcacaagacagatcggtttcgcccgtctggtgacagactttgccacttttggttatttgtgcgacgtctacgtgctgaacgactatcagaaaagtggcctcggtcgttggttgattgaatgctgtcacgcccatccattgatgtcacgcctgcgacggataatgctggtcactgacagcgcccccttggctataccagaaaatggggtatctcccgttgaaccgaccagactttgtctggcagatcaaccgaccagacatgtatcgtaa

SEQ ID NO: 194981 - DNA, 603 bp, Klebsiella oxytoca
atgactaaaaaagtcaatttaatgaccgatgctggttcgattgccagcacagtaaatgaagctgtatctcagcggattaagctgtatcgcaaacaaaaaaaaatctcccttgatgaactctcccgccgggcgggcgtcagcaagggtgcactggttgaaattgaggggtgccgggcaaatcccagtattgctctgttgtgccgcctggccgtcgcgatgggggtttcggtggcagactttgtggatgtcagttcgaaaccaacggtgcatctcatcgctgaagaggaaatccccgaattatggcaaggcgaaaaaggtggacgagccagactgcttgcaggatcaggtggccctgatatgaccgagatgtggatgtgggaaatgcaaccgggggaaaagtttgcttcccccggccacacagatggaacgcttgaattgttttacgtccaggaaggcacactcacactgggtgtacaagatcacctgtatcaagtgaacaccaactgttcggcaaccgcgagaacagacgttgcgcattgctatgaaaaccgaggagcgagcccattggtgttcatcatgacggtacatgagaaatcatcctga

SEQ ID NO: 194982 - DNA, 696 bp, Klebsiella oxytoca
gtgttaacagtatctccgtcaattgcccctgaaatttatcgtattgcacccggtttccgggcactcagtatctatgtaaacgctgcgccggtgctgaaccctgatattggtgaaacagcgctgagagaagcttgtgaagcggttcttgtcggtgagcctgagtgggcagaatcgcatttagctgcatgggctgagatttttcagacgtttggcgctaagcctaaacgcaccccttgttcagctgatgcgttacgtaagcgtgtattacgtgacggcgcgatgccagcacttgaccccatcgttgatctctataatgccgttagccttcgctacgccgtgccggtggggggcgagaacattgctgcctatcaggggctaccacgcctcgttgtggcaacaggcactgagccgtttgatacggtaaaagagggtgaaatcgccgttgaatatccttcgcaaggtgaagttatctggcgtgatgatgccggtgtgacctgccgtcgctggaactggcgacaaggagtcagaacccgcttagatgtggaagcacagtacatgtggtttattctggagagtctgccgcaaatgccactggaaaaacttcacgaagccgggaagatgctgaccgatggcctcgaagcaatgatgccaggtctgcgggttgacgtaactctcattgaagagcaacaaccgtaa

SEQ ID NO: 194983 - DNA, 345 bp, Klebsiella oxytoca; identical to SEQ ID NO: 78955

SEQ ID NO: 194984 - DNA, 579 bp, Klebsiella oxytoca
atgatgacccaaggcactttggtggatgccaccatcattgaggcacccagctctaccaagaacaaagagcagcaacgcgatccggagatgcatcagaccaagaaaggcaatcagtggcactttggcatgaaggcccacattggtgtcgatgccaagagtggcctgacccacagcctagtcaccaccgcggccaacgagcatgacctcaatcagctgggtaatctgcttcatggagaggagcaatttgtctcagccgatgccggctaccaaggagcgccacagcgcgaggagctggccgaggtggatgtggactggctgatcgccgagcgtcccggcagggtaaaaaccttgaagcagcatccgcgcaagaacaaaacggccatcaacatcgaatacatgaaagccagcatccgtgccagggtggagcacccgtttcgcatcatcaagcggcagttcggcttcgtgaaagccagatacaaggggctgctgaaaaacgataaccaactggcgatgttattcaccctggccaacctgtttcgggtggaccaaatgatacgtcagtgggagagatctcagtaa

SEQ ID NO: 194985 - DNA, 2163 bp, Klebsiella oxytoca
atgccatcagtaacaaacaagacaaatcttaaagaaaaagatgaaattgatttagggcgtcttatcggtgagtttatagatcatcgtaagcttattatatcagtaacttctctttttactttaatagcattaatgtattctatttttgcaacacctatttaccaagccgatgctttagtacaagttgagcaaaaacaagcaaacgctatactaagtaatttgagtcaaatgttacctgatagtcaaccccaatccgctcctgaaattgcattacttcaatcaaggatgatattagggaaaacagttgatgatcttaatttacaaactcggataaaagaaaaacactttcctttttttggaaaaggtttttcgcgtctatcgggagataaagatggtgtcgttacgatatcaaggctttatcttccggagaacggacaagatgactcagaattgcttttgacggttaaggatccaaaacattacatcatatcaaatgacgattttgaaattgaaggaaaggttggagaattactggatgaaaaaggtatatcgcttaaggttgatatgatagatgcggtccctggtacacagtttattatcaactatgtcagtcgtttaaaagcaataactgacttacaagagaaacttgctgtaaatgatcaaggcaaagatactggtatattaacgctttcgttgacaggggacaacccacagttaattgaagaaataattgacagcattagtgctaattatctagcacaaaatattgctagacaggctgctcaagatgcaaaaagtttagagtttttgagcaagcaattaccacaagttcgaagtgatttagatcggtctgaggataaacttaatcaatacagaagacaaagtgattcggttgatttatcacttgaagcaaaatctgtccttgatcagattgtaaatgtagacaatcaactgaatgaacttacatttcgggaatccgaaatatcacagctttatactaaagaacatcctacttataaagcattaatggaaaagagaaaaactttacaggatgagaaagttaaacttaacaagcgtgtaagtgcaatgccagaaacacagcaggaaatactgcgattaagtcgtgatgttgagtctggtagagccgtatatatgcagttactgaataggcaacaagaattaaatattgcaaaatcaagcgcaatcggaaatgttcgtatcattgataatgcagttactcaaccaaaaccagttaaacctaaaaaattattggttgttctttttgggattgttttgggagctatagtatcagctggaattgtattattaagagttctgttacgtcgaggcatcgaaactccagagcaattagaagaactaggtattaatgtttatgcaagtattcctgtagcagaagcattcgctaagaaaaatgttgctgagaagggatggggtaaaagaaaccctgagcaaaatcaaagtttcctagcgattgaaaatccagcagatcttgcaattgaagctatacgcggtttaagaaccagtcttcattttgcgatgatggaggcacgtaataatgtgcttatgatctccggggcaagccccaatgccggaaaaacatttgtcagctcgaacttagtagctataattgcgcaaaccgggaagaaagcaatatttattgatacagatatgaggaaaggatatactcataaacttttcaatgtgagtaacgataaaggcctttctgatatcttatcaggtaaatctagtatagatgatgctgttagacatattaatcaagcaggcttcgactatatatcaagaggtgctgtcccacctaaccctgctgaattattgatgcatcgtcgttttggggagttacttagttgggctagtgaaaggtacgatattgtcgtacttgatactccacctattttggccgttacagatgcagcaatcattggtaattatgctggtacaaccttgctagttgcaagatttgaattgaacacggccaaagaaatagatattagcgttaaacgttttgaacaaaccggggtgaatgtaaaaggatgtattctaaatggtgttgtgaaaaaggcaagtagttattatggttatggttacaaccattatggttattcatatacggataaaaaataa

SEQ ID NO: 194986 - DNA, 789 bp, Klebsiella oxytoca
gtgatcgcccttgccgatgccgccaccgagcatctcgcgcgccagcgcagtttccagctcgctgcggatcaggcgcttgagttcacgcgcaccgaactcgggcttgtagccttcttccgcgaaatggtcgatcagcgtctgatcgaaagtgagcgtcacgccctggctggcggcgctgcgcgccacgcgatcgagctgcaggccgacgatgtggcggatctcctccttgcccagcgcatggaagacgatgatctcgtcgatgcggttgaggaactcgggccggaagtggccgcgcagcacgtccatgacctcggccttggtcttttcgtactcctcgtcggccgccccacgcgccttcagccgtcgctggatgatgtccgaacccaggttggacgtggcgatgatgatggtgttggtgaaatccaccacccggcccttgccgtcggtgaggcgaccgtcgtcgaacacttgcagcaggatgttgtagacgtcagggtgtgccttctcgatctcgtcgagcagcagcacgctgtagggcttgcgccgcaccttctcggtgagctgaccgccttcgtcgtaaccgacatagcccggaggcgcgcccaccagccgcgccacggtatggcgttcgccatattccgacatgtcgatgcgcaacagggcgtgctcatcgccgtagatcgattcggccaatgccttggcgagctcggtcttgcccaccccggtcgggcccagaaacaggaaggtagccaccggtttactgccttcgcgcaggccggcgcgggatag

SEQ ID NO: 194987 - DNA, 255 bp, Klebsiella oxytoca
gtgcagccgttgttccaagtgcagcagcttttcgcgctcttccaccgtcaactcgttgaccgggatgccggtcaggcgcgagacaacctgcgccacgtgttccgccttgacctcggcactgccggaggcccgctcccgctcccagtcctcgacgagcttcttgagctcggcctccttggcttcgatgcgcttgccgagctcggctgcctggtcgtactgcttgcgcgcggccacgtaatcctgttcacgccgtag

SEQ ID NO: 194988 - DNA, 1389 bp, Klebsiella oxytoca
gtgcagttcggactccagctcctgcacggccaccggccgggccgtggccgacagcttcacgcgcgcggccgcctggtcgagcaggtcgatcgccttgtccggcaggaagcgcgccgtgatgtagcggtcggacaactcggccgccgcgatgatcgcgtcctcggagatgctgaccttgtggtgcgcctcgaaggtgtcgcgcaggccgcgcagaatcatgatggcctgggccaccgtcggctcgggcaccgtcaccggctggaagcgccgctccagtgcggcatccttctcgatgtatttctggtactcgttcagcgtcgtggcgccgatcaggttgagttcaccgcgcgccatcatcggtttgaacacgttggccacgtccagcccgccttcgccaccgccctggccggcaccgacgatggtgtgcacctcgtcgatgaacaaaatcagctcgccctggtgctcggtcacctccttcagcaccttctgcacgcgctcctcgaactcgccgcgatatttggcgccggccaccatggcgttgatgttgagttccaccaggcgcttgtcgcgcaaggtctcgggcacttcacccgccaccatgcgctgcgccagcccttcgacgatggcggtcttgcccacacccggctcgccgatcagcaccgggttgttcttcttgcgccgggccagcacctcgatggtggtttcgatctcctgcgcgcggccgatcaccgggtcgagcttgccgtcgcgcgccatcttggtcaggtcgcgcgagtacttgtcgagttctggcgtgttggtcggcgtctctgcgcgtccatcctcggcgcccttgccgaccaccttgctgacctgttggcgcagcgcctgcggcgtcaggccgtagcggcgcagcaggttggcggccagcccttcgccttcctcggccagaccgatcaggaaatgctctggaccgacataagaatggccgagttcattggaggccacgaaggcgcggctgagcgcatccttcacgcgcggcgacacgccgatctcgccctcgaagggcttgtccccgcgcttggcctcagactcgatctgccgcttgaggtcatcgaccttgatcttgaactgacccaggatggtcttgaccacgtcgctgtcggccagcgccagcagcagatgttcggtatccacctcggagcggccaaattcggcagcgtgtttggcggcctcctgcagcaaggcttccgactgttcgctgatgcggctggccagcccactgccgcgacggcgcggcgcacccgaacctgcggtggcgggctcgccaaacgaggcatcgaccacgtcatcggtatcggcggcaactggcgtcgcgtcttcgccgatgcggaagaagtcactgcctag

SEQ ID NO: 194989 - DNA, 432 bp, Klebsiella oxytoca
atgaaaaaatcggtagacaaccaaaataattactttaaatcatattacgacatttttaaaatcaacactatcaacggcaaaaagttttcaatctctgcaaaatcaatctacagttatctaaaaagttttagtgatgctggtctcaaggtatttcccagtcataacgaaattgctgacacttttggtattacccgaaatgctgcgataaaacagatagaaaaactgattgaactaggtttgatcgaacgtgagacacggcccggtaattgcaatgagtaccacgtcctccccattcaaatagagaatacagcaggacggacgtattcggaaaacaggggaaccaggcacgaggttaaaggagatttcgggaatgagtcagaaatagtattaattgaagactataatgatgatcatgatgatttaccgtggtga

SEQ ID NO: 194990 - DNA, 360 bp, Klebsiella oxytoca
ttggcatatgcacgacaaaatgtagtatttgaagaatcgattgaaatcggatttaacaacagaaataaaaaagttagagtttctaaaaaactaaaaccattatcaatcattaaactcagcgaaccatctgcaccactgacaccagaagaacaagaaacaattaactctatgactgatgttaaatggaaacctcgccagagatacatcggctttaaatttagcagatcgccgcttcagtgggaggcgctagggtttatatctgaatatcactatagtcactggctctatttccaaaagctatctaacgaacaatacgacgtagattttattgatgttgtgaataacggcatcaacgactaa

SEQ ID NO: 194991 - DNA, 276 bp, Klebsiella oxytoca
atgattaattttgaacagcacaagaatattgtagaagacttcgttgaacagtactacccactggcgcatagtctgatggttgatagctatattgacccggcagcctattactcaaactaccaaatgttgcttggggctatgaacactctcccggaacatcctgatttctttttggagtggttactggaagatgacgcagctttgtatattaacctgatggagttagttatcatcactagaaccattaataacgtttttgaacaagtctcgccttaa

SEQ ID NO: 194992 - DNA, 204 bp, Klebsiella oxytoca
atggttacaatcacgaaaggcgtcaaaacgtttaacgggaaaatccccgttacacttttggttgatgacgtcgaaacagccaatactttagtaaaaatggcaaaagacgccaacgtcactgttattgaacaggacgaagatattaacaaatgtacaatcaatccagtattcaaacatctggatcggattgcatctaataaataa

SEQ ID NO: 194993 - DNA, 384 bp, Klebsiella oxytoca
atgtctttttttgaaaattatggtgaaaccttttcggggcgccgtggatacgtgcgcgataccgttgtcgcttacttgagcgatggtgttaaacaagacgaactggttaaactgtctgccgctattcctgctgatttgcctgttggttctgtcgtagattcaaccggggcaattatcaccactgctgccgatgctgattacgtcgtagttgaatttgcaaaagcaggtgccacagcaattgttgttgctaacccgtaccacaccatcctaaaaaaatcaggtctgattaccaacggtgttgatgtaaatagcgttattgaacaactccaggccctgcatcattcgtttgctgattacgccactgtcgcgctacgcacaacctga

SEQ ID NO: 194994 - DNA, 1020 bp, Klebsiella oxytoca
atgccttttgatactcgcaacaatgcattcgaatatgcatcaccgtttgaatattccaacgaagctaatctgattatcaccaatttgggattgttcgaagaagaaaatcatactaaaaactcaattcttctggataaaatcctgattgagtcaaatgaaactgctcctgaaaagatgccttatgctcaaagtgactggaacagcgcccagcgctctgattataccagcgttctctatgacatggtttacacaaacagtctgaatactgtttcaagtcgggacatcgaactgctacgtgctccaggttcagaccatgaggaaaatattgcaatggtgctggctgaatactcacagcgacagtattcacagatttctaatacagttgaacaatatttgattgatgctctgtttggtctcaaagttgaatctcagtacgcaggacagggaaacattgacttcctggcaggcaatgctaaaacgtcttacgtgatgaatgttgccaataccgcaaacgtatttgaacaactggatgaagttaaccgaatcatcaacgttaaattaggctctggtctcgccaaaaagcgtaagggaacggtcattcttgctgctggcaatgctgctaaggctttgaaatatcatcagtctatcaaagattatatggtttacactttgagtcttaacgattctgataactttgctacaaagattgttagccaaaacccagcattctcaagctggaaactggattcggtaaacgttatcgatgtaacaggttataccgagatcacagattatattggtgaaaacggctttgctgttgtgccgatggttgacggcggatttaaacttcatacggggattggcgttcgtcatagccgcttgggtcgtgaacctggtctcgtgcatcaatatatgactgatgtagaccgtatggggtggcctgctattcataccgaaagtgcattcttgccacaggttaacattcctgattcaattgtattcggttctgtctccagctaa

SEQ ID NO: 194995 - DNA, 1809 bp, Klebsiella oxytoca
atgagcgtgaatgtaaaagccgccaccctaaccaaccttgttaaatataaaacagacagggcgtcattgcgtagagtacgtgatgatatgaaaaaattacagaaggattttagcaaaacagagggagctatagccaaagcaaaaatgcaggctgataagcaggtgtacactgcacaaatgcagcagcagaaacaggttcaacaacagcagaaacaagcagcaaaacaggctgctgtagatgctaaagcaaaggctaacgaacagaagaaattagcggcagcgcaagcccgcgctttaaaaattcaacagcagcaggcaaagagggtggcaactcagcatgagaatgcggacttagcaagaaaacgtgccgcttttactctggggcgtcttcagaatatgagcggagccgatcgctacactgcgatcaaacaggttaatgctattgtagatgcctatgccaggggcaataccagtttaaaatctatgaaccaggctctgagtcaacatcttgttacccaacgtagtattgccagaaataattcaaaacaagctaaacaatcaggtaagggaaagaaatctggttcatctggttggctgagtcgccaggcgagcgctttcattcctggggagattctcgggccagtagctggcgcttatgctgcccaacaggcatatcagattatggcggggacactacagggagccattgagagaaaccagggcaggaagatgatccagagttttggtggaaacgaccttgaatatatgagtttgcgccgtgcctctctcgctactacaggttttgatatctctagggaaaaatatgctgatatcagcaaagattggttagataaacaaggtgatttatcttttggtaacacggataaaaatggcaactttaccggaggtggggaactatcagaccttgttaacgtaatgcgtcaacgtcttggatataccaatcaaggggccgtcgccaaattaaattcctttaaaacgccagtagagtttgctgtatttatgcgtggtctcagagatgcaggtaaagtgactcaacaagaatttgttaactttggtgaacgaattaacgatatgagctatgtattgaattctgtttcaagtggtggtgaaaattttctcaagattcaaaatgaattggttgattctcatttagcactaacgactgctcaacagaaatctattaataatctgactgagatgtcagcagtatttaaccaagctaaagaatcattaggtgatcagtttgccgcttcgtttagcaaaggtcttgaggatttaggaatcaatacacaaaatctatcttctgaaatgggttcactggttccactggttaaagatttggggacggggacggctcagactgtgaaaggttttaaagatcttcttgatgtattgtccattatcacagaatggaaaaataaacttctcggaaataataaaccagagggacagaatattttccagcaaggggctacgtttgttggtgagtctttattgccgccgggcgtcctcgatatggcaagtcggattaaaaatatagttactcctggttctgattcttcatatgctaatcaagtgcaaaatggtggttggtataatcaaatgatgccagcaacgccagctatgcaatatcagcctgtcatcccggatttaaaagcggattttaaccttaccgtaaatccatctcctgaatttggaatgatggtcgaggcagtcaccgataaaagaattgaatgggcatttgatgaccagaatttccagattagtcaaagtattttaggtcaataa

SEQ ID NO: 194996 - DNA, 1263 bp, Klebsiella oxytoca
atgaaattcaagcatggtcgctacagaccgaatcaatatctcatttgtgatccgtatggtttttaccatgtgagaattgcaatacctgactacatgcaatcgctgtttagtggaagaaaaacgctagttcgaaccctatcaaccagtgaactaaaaatagccagaatgaagcgtgatcagatagcggatgagtttcaccgtttgcgagatgccattcttccagacaggccagatagtgtggcagacgtgatcgagttatttcgaagcaaggcaaagtacgcgaagacagcaacgaaggtgcaggttattaataaatgtcctgctttacgtgggatgttggatatttaccttttacaaaatagcaacaaaaagaaagttacaacgctatctaaaactaaaaaggcggtagaggtatttctcgatcatcttcgtaaacgtgatattgcactcaacgaggtaaaccgaaccatagttacagcgtggattgatgttcttcagaagaatagatcgcaacaaacaattgctaactacattagtgctatggctcaaatttgggatttggcatcgtcacgatatgaagatgccccggagaggtctcaatcaccctggcggggtcataaactggatgttgcagagagtagggcaagttatgaggtttttactcctactgaactggcgaaagttttctctgccctggaaggtgacgaggagatgcagaacgtaacattgatcggaatgtacagcggcatgaggttaaatgagatttgctctttacgtgttgaaaatattagagaaatcgaaggtgttttgtgtttcgaagttaccgaaggtaaaacaaaatcagcgtccaggatcataccagtccacagcaggataatagatatggtgaaagggcttgtacaaaagccccataacggttttctgttttacagagcgtcaatcattgaccgtgcagacggaaagcgctcaacgtggcatacacagcgttttactcgtgctaaacgcaaggcattgggtgagcaggggaccgaaagaaaagtttttcactcgttacgtcaccaggtggcccgaattttggacaggggcggggttggtcgaggtaagttaaagccagttccagaagaccgcattgctttgctactcggtcatgagcgaggctccacggagagtttcaaaacttatagtaagaatgccgcttctcctgttgaactacggcaatatatcgagttgatacgctatccagaaatagaaaaggggcattaa

SEQ ID NO: 194997 - DNA, 2034 bp, Klebsiella oxytoca
atgaatctgtcgagaaggttacttatgaaaagtattggatatctcgcttgttttactatatttactaaaaaggcatcttcggctctaaataatccagtagaagcaagacaaaagataaaggatactatgatggtaggtccgctgagtacatcaaaaattcagtgctcgtgcttagatgacttttatggtatttcttcgaattctacagagcatgtcataaatctgcagcgactgattaaaaatggtcctttaataaatacacaacttttatatgataaagacgattcgataagttccgatgatggatattcagttttcgttagtcatgacaattcaagatggaaggctgatgtatcaaatgggatagatgtgagattagcagggctactacaggatggttcaaatttaggtagttgtgttaacaagattgtaactggtgagatagcaaaaattaaagcagggaagtcactttttgaatgcataactacaatatttatcccagctaaatttaatggtcgtgataaccctaactatatactcgatgagtcaataatgattccttcctttttttctttgaaaactaatgggttagtttatatttctgtacctgcgagtttaaaatacgcgctgaaaattactaatgatattcttcatttttccacaaacacacttcttagttcacctactgatattcaggggtgtaatccctttgaggctggaggagggcgctttgttttcagtggtgctgaaaacaataatgtcacgactggattatatattggaaaccaacgaccgaacaggtttgcagtcagggacttattgattaaggatgtcactctgcaatattttaatgcagggattgaatttgcaccaaacaacaattttataaatacatttgataaaataaatattttgatgtgtaagtacggtttttgggttaaagcatataaatcaattaattccggtgagaaaattatattcgataattgtgtctttggaaataaccaagtggctcacttttatttgggggcgcagataagttattatataaataattgctcgttagattatacaggggagtatgtcttttatattagtgaaacatctgccctatcaagattgctgattgacaaggggcatatagagggggttccgaaatatcttgtctattgccctgaaaagcttcctttgcctttaaaaatccaatttcgcgatgtcatgctttatattaatggtgctccatacaattcaatgagacaattggttttttcgcctgaagggaaatgccatataattttcgatggatgtgattggacctttactaattattatgaaaactctccatatatatctcttgtaggttataatgatgggactgaggtgaataatagagttgtaattaataatccattgcctagagtcacaggattaaggtctaatagtattttatctcagtataaaaacagcttgctaggtgataactgtattgcgcgtggagtaaagggaacgtcattgctaaatagatatgatcatcaatcaaatattttatttataagtgaaactcctgatgtggaagttgtttatggagacatagatgatgatgaatcccaaattatagaaatagtttcaaactcaaatgatacaatcgttgatttggtaagtaggttttctcatcatggttccatgtcatctctgtggagtggtgggtgttcgatagaactagctgatgttatcactaaaaaatgtaacatgaattttatagttgatttatttcaaaagccttatattagcattggtaatgcggatgaaaacaatagattaagaaaagaattgtttgaatcatatatatctgataatattgatttaataaaagttttctcttctgctaagggtactgaaaataactcgggttttatcggggtttggcagagtgttactcaaaataaatatgctggcacttgtctgccaaaaatccgattccaaaattttatgggtaaacttagaattaaattgccagttttttggcgtcagtga

SEQ ID NO: 194998 - DNA, 1467 bp, Klebsiella oxytoca
atgaactcgatggtcgcaggagccaaatatcgtggagaattcgaagagcgggctaaacagctgattgacgaagtgacggccaagaaaggggaattaatcctctttatcgacgaactgcacaccattgttggcgcgggtcaggggggaggcgaaggtggactcgacattgccaacgtactgaaacctgcactggcacgtggtgaacttagtctgattggggcaacgaccctgaacgaatatcagaagcacatcgaaaaagatgctgctctggaaagacgttttcagcctgttctggtggaagaaccaacagtggatcagacgatcgttattctgcgcgggttacgtgacacactggaagctcaccatcaggtgactttccaggatgaagcattcgtcgctgcagcagagctgtctgatcgatatgtgacttcccgctttttaccagacaaggctattgaccttattgatcaggcagccgcacgtgttcgtattggcgcaagttcacggccagttgccattcaggagcttgaggcagaaatcgcacacctgaaacgggaaagagactacgcttccacccgtaagctttttgacgatgtgaaacgttttgaaagcgaaatttcagcgaagcaggagtccctggagcagcagacagaagcgtggaaaaacaaaacgggttcagagacgcttgaggtaaccgttgctgcagtcgcggaggtggtctcgagactgacaggtatcccggtgagtgatttgacgcaggaagaaagaaaaaaactgctaaacatggaagaacttctgcagaagagagtcgttggccaggatcaggctgttgccgctgtcagtgatgctgtccgcctttcaagagcaggtctggggcaggcacatcgtcctgttgccaccttcctgttccttggaccgaccggtgtcgggaaaacagaactggccaaagcaattgccgaagcggtatttggtgatgagcaggctattatcaggattgatatgtctgagtatatggaaaaacatacggtagcccgtctgattggtgctcctccgggttatgttggttatgatgaaggtgggcagttgaccgaaaaggttcgacgtcgtccttacagtgtgatcctgctggatgaaatcgaaaaggctcacccggatgtttataatgttctgttacaggttttcgacgatgggcgattaaccgacgggaagggccgcgtgatcgacttcagtaacacgaccattattgcaaccagtaacctcggttcggccgtcattatggaaaatgctggattacctgaagctgagcagaaaacacctaaagcactgcacgaggagttgatgcaactgctgaaaggacatttccgtccagaattcctcaaccgaatattggtttattcgtttgtttacctggcatggatccgttctctccagtatcatctttcgactctccctcaatgttggtggtaa

SEQ ID NO: 194999 - DNA, 984 bp, Klebsiella oxytoca
atgcccgcattatgcgatatttgtcaggaaagaccggcaaccagccgcgtcactgttgttcagaatggtcaacgtaaaacgatagatatttgtgattatgactaccgtcagctgatgagacatcagaacatcatgaacccttttgattctttactgggaagaggggggctctcagggctctttaatggatttggcaataacacccgagggcgtgatgaggatgatatttttggtgaagtaccgcgagaatcggtagatacaacagaagcattcagtaagcagtctctggagttattgcaacgagctgcagaaaaagctcaccagctcaatcgcagcgaactggataccgaacatcttctgtatgttctcgcggacgctgacgtctgtgctgcgttgtttaaagagctgaaaatatctcccgaagacatcaaaagttacatcgaccagaatgcctatacaggtgcctctgagacaggtacttcacctggagatctttctatttccccccggcttaaaaaggcctttatgtatgccttccaggcctcccgtgaactgggtcattcttatgtcgggccggaacatttactgattggactcagtgaagtgactgatagtgtcgcgggttcattactgaagaaatacggaattacgccagagacgattcgccagaaagtggtgaaaatcgtgggtaaaggagcagaggatggtcgggtggatacccctaccggtactcctaaccttgataaagtcggccgtgacctgacggaaatggcgagggccggtaagctcgatccggtcctggggcgcgcgcaggaaatcgaaaataccatagaggtcctggcacgccgtaagaaaaacaatccggtgctgattggcgaacctgcgtgggtaaaacggctatcattgaaggactggcacaacgtatcgtcaaaggggatgttccggaagtctttcgcgataagcgacttgtcgagatcaatatga

SEQ ID NO: 195000 - DNA, 159 bp, Klebsiella oxytoca
atgtcaggatgttggggggcaagtattttaaattttgacagtcaagttatgcacaagttcactatggattgtgaatattttatacaaataataatgttgttgatatttaatacttttattgatttttttggggttttacgggtcttgctgttcctgtag

SEQ ID NO: 195001 - DNA, 246 bp, Klebsiella oxytoca
atgacacttaaaaccaaatgttttaaatttattcagcactttaccatcgacaaaatgactgatgatgtgaatctcataaccagcatctcgggcggcgattgcacgatctatccagtgcaaatcaaaataccaatccgagtttatgaaataacacagttttttcattgctatatccacttaatgattcttaccgctgattccttttacaccatggataactccacgacgcaagcatttaaaatataa

SEQ ID NO: 195002 - DNA, 1290 bp, Klebsiella oxytoca
atgttactggcaggcgctatttttgtcctgaccattgttttggttatctggcaaccaaagggattagggatcggctggagtgcaatgctgggcgcaggactggctctgatatctggcgttgtgcatgtgggcgatattccggtggtgtggaatattgtctggaacgcgacggcgacctttattgccgtgattattatcagcctgctgcttgatgaatcaggctttttcgaatgggcggcattgcatgtttcgcgctggggtaacggtcgtggccgtttgctctttacgtatatcgttctgctcggtgcagcggtggcggcactgtttgccaacgatggggcggcacttattctgacgccgatagtcatcgccatgctgctggcattagggttcagcaaaggcaccatgctggcattcgtcatggcggccgggtttattgccgatacggccagcctgccgcttatcgtgtcgaacctggtgaatatcgtctcggcggacttctttggactgggcttcactgagtatgcgtcggtaatggtgccggtggatattgccgctattatcgctacgctggtgatgctgcatctgttcttccgcgaagatattccgccgacttacgacctggctctcctgaaagcaccggcaaaagcgattaaagatctggcaaccttcagaaccggctggatagtgttgagccttcttctggttggctttttcgtccttgagccgttgggtatcccggtcagcgcgattgctgctgtaggggctgtcattctgtttacggtggcgaagcgaggccatgccattaacactggcaaagtgcttcgcggtgcgccatggcagatcgtcatattctctttgggaatgtatctggtggtctatggtctgcgtaatgccggactaacagaatacctctccggtgtactgaacgtgctggcagataaaggactttgggcagcgacgtttggtaccggcttcctgacggctttcctgtcttccataatgaacaatatgcctaccgtgctggttggtgctctctctattgatggcagcactgcaacaggcgttatcaaagaggcgatgatttatgccaacgtgattggctgcgatctgggaccgaaaattacacctattggtagcctggcaacgctgctctggctgcatgtcctttcacagaagaacatgaccatcacctggggatactatttccgcaccgggatcgtcatgactctgcctgtgctgtttgtaacgctggccgcgctggcgctacgtctctctatcactttgtaa

SEQ ID NO: 195003 - DNA, 423 bp, Klebsiella oxytoca
atggccagagtgtctattagtgaagcggcacggcttgttaaggttagtcgccccacaatttacaagatgattaacagtgggaagttaagttacacctctgttgtaaagcacgggaaggctattaaagttattgatacctcagagcttattagagtgtttggttctcttgatggtgtcatcgatactgtaaaatatgatgtaaaaagtgacgcagaatctacaggtgttaacagcgttggtttacatgatttacaacatagaattgctttactagaagctgaaaacgatggtcttaaaggggctgttaaggctcgagatgagcatattgattcccttcgtcaggctatgcagcttctggagtacaatcacgaaccttcttcaccaccccattccccgtggtggaaattctggaaaaaatcctga

SEQ ID NO: 195004 - DNA, 252 bp, Klebsiella oxytoca
ttgatatttccagtaataactatgggaagatatcatacacaggacgggaatatttatattttatatgatgatggctactggcggcagaacgtcaactacctggctgctgttcctacacaatacaactgcaatacctttgaggaacagttagagcggatagccagactgattgaaaatggcaaattacgtagttcctacacgtcaggacagccttttagtatgcagggcggtagattgtatcagattaaataa

SEQ ID NO: 195005 - DNA, 417 bp, Klebsiella oxytoca
atgaacaaaaaagaaccaccatttctggcgattgattatcgtatcctggcattagatattaaaacagacatcaacggaaaaaccatcgagagcagcaccattctcaaactcaaattagtctattgttacctcctagggttatccaaaaaatgcagggagatttatccagaacaggcaaaaatgggtaaaacattgggtatcggttcccgacaggttgttgggagatgtatctcgctacttgagtctctggaatggatatcacaaacatccagaacaggaacatcaaatctatacaaggtgaaaaccgtcgagcaaattttagtaggtgttccgcgcgaggttatagaagaggaaaagaaatttcccgaatcaatcccagaaacggtattaattgatgatgatgatttaccgtggtaa

SEQ ID NO: 195006 - DNA, 402 bp, Klebsiella oxytoca
atggccagagtgtctattagtgaggctgcccgactgacgggtaagagtagaacaacactgcacaggttaattaaagcaggtgacctgtccacctgtagcggtgaacgcaatgcaaaaatggtagatacttcagagcttttacgtgtctttggtccctttgaacaaccgaagggtgaacaccattctgtacaggtctctgaacagcgtgatacagcctctgctgaccagagtgaacaggtgattcgtcatctgaaacaggagattgaacacctgaacaccttacttttgtccaaggattcgcacattgacagcctgaaacaggccatgctccttcttgaaaatcaccaggcaaaattaactgaatccccggcgccatggtggaaattctggaaaaaatcctga

SEQ ID NO: 195007 - DNA, 1005 bp, Klebsiella oxytoca; identical to SEQ ID NO: 133534

SEQ ID NO: 195008 - DNA, 849 bp, Klebsiella oxytoca
atggttgataatttgatactcattgttttatataataaaaaaattgaagatagcacaactgtacggaatttacttgagtgtaaaaccctttcaaattcaaaggttgtgatttggaataatggccctttatctattcccttaaataacattaacgaaagattcatcgattgcggatatcagttcgagtatattgaggagttaactaactcatctttagctaaagtatataatagcgtgcttagaatacctgcgtctaagtatattattcttgaccatgactctactgttaatgaatcttatttgaaagaagttgttattatttcatccaatgaggttggaatgcctaggatatactcgggcaatcagttagttaacccttgcatcaatatgctgccaatcgttgatgtatcaagtagattatcgggggaagtaataactaccattggtagtgggttagtcattggtaatgctgttgcatcattaatgaaggataagtttggggaagtattcgatgagcgattcatactttatggtgtcgatactaccttttgttacaggttacatagtctagacaaaaaggctacaataaaaattattaacgggtttgaacattcactatctcgtcttgaaagccataacgaaaatttagaaactttaatttttagaaagaaggagaggagttgtgacttagggctgagaattaggttttatagcgtaggtcgtattagagaactgacctcttatttattgagctcttgtaagcgatttttgttgagaagagaacaacaatattattttttaattgtattacattgcattatttttggaaaacatattagaaaacattaa

SEQ ID NO: 195009 - DNA, 771 bp, Klebsiella oxytoca
atggagaagatagccgtttatacagcaataacaggtagttatgatgatttaaaaccagtgctttgcattgaaccttctttcgattatatttgttttacagactatgattttaaagggaaaatacctgttccctggctgcatatacgtctgcccaaatcatctttggtaaataaagatgttgctcgttattgtaaactgaatccacataaattacttcccatgtatacaagcagtgtctggattgatggaaatatttctattaagagtgaaatatctaatctggtaataggggtattaacttcatcagatgtggcttcatatcaacattggggacgtgatgctactgagcaagagttttatgaatgtgctagatgtggttttgattacgcatggcaattgaaagctcaattgcaaaggtattatgatgatggttatagttctgcagacttttttgaaaacaacgttatttttaggaatcatatgaagccatcattaattatgatgcatgatatatggtggcttgaatatttaaaaggtgggaaaagggatcagtattctttcacatatgctgcatataaagcaggtgtgataataaaatccttaggtatgcatgatcctagaataaaaaaaatgttttttgattactctcaacatgctaaaaatcgcccactgaagcagacgattatcaaaattgttaatcggttgtatataatggctactagatggcgcgtatcggaatcgaaaagagaaaatgctttagctaaaaaataa

SEQ ID NO: 195010 - DNA, 1443 bp, Klebsiella oxytoca
atgactcaccacattaaaggtcaaggcagacatcaggtgacgttgctccctgaagtgctggatgattttgtcacagaagacaaccctgccagggttattgatgtctttgttgatgaattacagcttgatgctcttggcttcgagcgtgttaatgcaaaacaaaccgggcggccaggatatcaccctgcaaccatgttgaagctgtacatttatggatacctgaaccgcatccagtcatcccgcaggttagaaaaagaagcccatcgtaacgttgaattgatgtggttacttgagcgattaacacctgattttaaaaccattgctgacttcagaaaaaacaacggtaaaggcatcagaaatgcttgccgggctttcattgatctgtgtcggcagatgcagatgttcaccgatgtggtggttgccatcgatggtagtaagttcaaggcggtaaacagcaaatcgaacaacttcacgccccagaaaacaaaaggccacatcgaaagggttgagcaaagtatcgctctttacctgaataagctcgatgaagctgacaaggctgcggagcccgaaaaaaatgcagggttaaccgctgcaaaactggcatggctgcgaaagcgtctgaaagaactcaagcaaatccagcaggccgttgtgcagcaccctgataagcagttgtcactgacagatcctgattcccggctaatgaagataaacaatgttaaccgccaggttagctataacgtccagactgccgttgatgctaaatatcacctgattgttgcgcatgaagtaacaaatacaccagaccgtgggcagctagcagcggtgacaaaattagcgcaagatgcggttggcaaggtggatattaccgtactggctgataaaggttattacagccggggggatattaaagcaacgcaggacttaggtgccgtagccttagtacccaaaggtgatacctctggcgctgaccgcaaaggtcttttcaatcgttcattgttcaaatatgaccaggaaaaagatatttatatttgtccgatgggtagcgagcttcagaacagatttactgtgcttgaggatggtttagaacaacaaatgtactttaacaatattgcttgtcgtaattgcaggcagcggtcaaggtgcaccacatcaaaacgcgatccgagacgtataaggcgctgggttcatgaagcagaaatggaagacatgcaagccaggcttgacgcatcgccacaaacagctgtcgtgcgcaagcaaacggtagagcatccgttcgggacaattaaaatgtggatgggagcgactcacttcctgacgcaacggtttaaaaacgtcagcacagaaaccagtctgcatgtgctggcttataacctgaaaaggatgatgtccatctggggtaccgaaggattggccattaagctgcaagaacaatgcaactaa

SEQ ID NO: 195011 - DNA, 747 bp, Klebsiella oxytoca
gtgtatggaaatataggggccaatccagcatcactatcggaatcggagtcgctgtcagagtccgagtcactgtcggaatcggagtcgctgtcggaatccgaatcactgtcggagtcgctgtcagcatccgaatcactgtcagagtcagaatcgctgtcagagtcggagtcgctgtcagaatccgaatcactgtcggaatcggaatcgctgtcagagtcagaatcgctgtcggaatccgagtcactgtcagaatccgaatcgctgtcagaatccgaatcgctgtcagagtctgaatcgctgtcagagtcggagtcgctatccgagtcagaatcgctgtcagaatccgagtcgctgtcagaatccgaatcgctgtccgaatccgaatcactgtcggaatccgaatcgctgtcagaatccgagtcactgtcagagtcggaatcgctatcggaatccgaatcactgtcagagtcagaatcgctgtcagagtccgagtcgctgtcagaatccgaatcactgtccgagtccgaatccgagtcactgtcggagtccgaatcgctgtcggaatccgagtcatcgctgagatcgacagtcaattcaaatatcggggaacgctcgctgacgttcccggccttgtcggtcaccgtcgtgctcaggctgtggctaccttcggccagcgctcccggggtaaagctccagcggccatcctcgcccgctatcgcagtgcccaggacggtatcaccgtcataa

SEQ ID NO: 195012 - DNA, 375 bp, Klebsiella oxytoca
atgaatgatgatttaggttttataaataacatagatgggaaaattttatttgagcattatcaatatttaactaatgccatactgggtgatgatgacacaaaaaaagaatttgtgaaatatgaacattatgacttggattatttaaggtattatcttgaagcgagtatctattttttaggtgaggcaagagatgaagcaaatagagatgttgaaataaaagatttaaacgaagcagtggagataataaataaattatcaaatagggctaaggttgctttagctgaacatattatattgtggtttgaagatatttcattggtaggttcttataatacactatttagatttttaggcagggagaaaagaatattatga

SEQ ID NO: 195013 - DNA, 924 bp, Klebsiella oxytoca
gtggcaaagcaaaagttcaaaatcaccaactggcccacctacaataaagccctcatcaaccgtggctccataactttctggctggatgatgaagctattcaggcctggtatgagtcggcaacgccttcatcacggggaagacctcagcgctattctgatctcgccatcaccaccgttctggtcattaaacgcgtgttcaggttgaccctgcgggctgcacagggttttattgattccatttttacactgatgaatgttccgttgcgctgcccggattacaccagtgtcagcaagcgcgcaaagtcggttaatgtcagtttcaaaacgttcacccggggtgaaatcgcgcatctggtggttgattccaccgggctgaaggtcttcggtgaaggcgagtggaaagtcaaaaagcacggcaaagaacgccgtcgtatatggcgaaagttgcatctggcagttgacagcaacacacatgaaatcatctgtgcagacctgtcgctgaacaatgtgacggactcagaagccttcccgggtcttatccggcagactcacagaaaaatcagggcagcatcggcagacggcgcttacgacacccggctctgtcacgatgaactgcggcgtaagaaaatcagcgcgcttatcccaccccgaaaaggtgcgggttactggcccggtgaatatgcagaccgtaaccgtgctgttgcgaatcagcggctgaccgggagtaatgcgcggtggaaatggacaacagattataaccgtcgctcgatagcggaaacggcgatgtaccgggtaaaacagctgttcggaggttcactgacactgcgtgactacgatggtcaggttgcagaggctatggccctggtacgagcgctgaacaaaatgacgaaaacaggtatgcctgaaagcgtgcgtattgcctga

SEQ ID NO: 195014 - DNA, 288 bp, Klebsiella oxytoca
atgaatatcaaaaaaacaacattagctgatggtcggcaggggattacaatttttgcagagccggatattatttctgaaatggtagctctttgcaaacaacggaatatccccgtggaagaatcaccggaggtttcccaggagactctggataatctgaccaaaaccgctaaacaaatctcagctattgaaaaagtaaaggctattgccgatgaactaaaaaacaaaaaggctgaggaaactgaatctccaaaacaaattattaaaaacattctaaaggggaaaaaatga

SEQ ID NO: 195015 - DNA, 234 bp, Klebsiella oxytoca
atgctgccacgcgtggaccgtggtaatcagcaccgcgtcggcaagcgtatctgccgtgcactgcaacaacgctgcttcggcctggtaatggcccgtcgccttccagcgttcgacccaggcgttagggtcaatgcgggtcgcttcacttacgccgtcgttatccagcggtgcgcgggtgaactgatcgcgcagcggcgtcagcagttgttttttatcgccaatccacatctgtga

SEQ ID NO: 195016 - DNA, 396 bp, Klebsiella oxytoca; identical to SEQ ID NO: 145063

SEQ ID NO: 195017 - DNA, 912 bp, Klebsiella oxytoca; identical to SEQ ID NO: 191413

SEQ ID NO: 195018 - DNA, 183 bp, Klebsiella oxytoca; identical to SEQ ID NO: 128549

SEQ ID NO: 195019 - DNA, 549 bp, Klebsiella oxytoca; identical to SEQ ID NO: 128550

SEQ ID NO: 195020 - DNA, 402 bp, Klebsiella oxytoca; identical to SEQ ID NO: 108030

SEQ ID NO: 195021 - DNA, 306 bp, Klebsiella oxytoca; identical to SEQ ID NO: 82736

SEQ ID NO: 195022 - DNA, 1173 bp, Klebsiella oxytoca; identical to SEQ ID NO: 82734

SEQ ID NO: 195023 - DNA, 273 bp, Klebsiella oxytoca
atggacatgaatcaggcttatatcagcgcagcccgtatccacctgcctaacgcggtagaaaaaatcgccttcgatcacttccatgtcgcgaaaatgctctgtgccgtcgtggataaaacacgacagtccgagatgagaatcatcccgttacaggcccgaaaaagtgcacatcgctcccgttatctgtggttgtacggccgccataaacgtcatggtcgaatagcagaaaggctggaggcggcgcagatggtcctgccttgtcagcgccagtga

SEQ ID NO: 195024 - DNA, 594 bp, Klebsiella oxytoca; identical to SEQ ID NO: 128555

SEQ ID NO: 195025 - DNA, 192 bp, Klebsiella oxytoca; identical to SEQ ID NO: 82784

SEQ ID NO: 195026 - DNA, 3168 bp, Klebsiella oxytoca
atgaaattccctcatttctttatacagcgacccatttttgcaatcgtcctttcactatttatgctgatagcgggtgccttagccttctttcaattgccactcagcgaatatccttctgtaactcccccaacagtgcaggtgactgcaagttatcctggggcgaatcctaatgttatagctgataccgtagctgctcctcttgagcaggctatcaacggggtagaagggatgctatacatgagctctcagacttcgtctgatggccgtatggtgttaactatctcattcaggcaaggtaccgatccagatattgcgcaaattcaggttcagaatcgtgtatccagggctttacctcgactgccatctgaagttcagcaaatcggcgttgtaacggaaaaaacctcgccggatatactcatggtagttcatctgttctcaccagataatcgatacaatccgctttatgtatctaactatgcgatgttgaacgtgcgtgatgagctttctcgcttacctggtatcgctagtattgcgccttggggggagggtgaatatgcaatgcgagtttggcttgatcctaataaaattgcttccagaggtttgaccgcaagcgatgtcacttcagcaattaaagaacaaaacgttcaggtagcggcagggtcagttggacaacagcctaatacttcatcctccttccaggtcacagtaaatgcgttagggcgtctgacaaccgaggagcaattcggcgatattattattaagtcaggaactgatggccaggttactcgcctacgtgatgtagccaggattgagctcggttcagataactattcgttacgaagtctgctggataataaagatgctgtaggtatgcagattgtaatgacacctggagccaatgcgctggacgtatcagcatctgtacggtcaacgatggaacgcctgaaagaaaaatttcccgaaggtattcagtatagtatcgcgtatgacccaacattttttgttagcgcatcgttgaaatctgttgcaacgactttactggaagcaacaatcctcgtggtgcttgtcgttatgttatttctacaaacatggcgagcatcgattattccattagttgccgtgccgatttcactagtaggcacctttgcgttaatggatgtattcggattttctctcaatacgttatcgttgtttggccttgttctttcaattggcatcgttgtggatgatgcgatcgtcgttgttgagaacgtagagcgacatattgcaaggggactatcacctaaagatgcagccagaaaggcaatggatgaagtaacgggtcctatattagctattacttctgtactggctgcagtatttattccttcagcgtttctttcgggattacagggagaattttatcgtcaattcgcgttgacgattgccatctcgaccatcctgtcggcgatcaactctttaacgttatctccagcactggcttctgtactgcttaaaccacatcaaggtacagataaaaaagacatgctgactcgggtgttggagcgccttttaggttcgttcttcggccgtttcaacacatttttcgacaggttatcggaaaagtacgtagatactgtaagacgtatagttcgcgggagtactatagtcctgattttgtatgctggttttctggcaatgactttcctgggattcaagcaagttccgggtggctttgttccggcgcaggataagtattatctcgttggtatagcgcagttgccgacaggagcctcgctggacagaacagaagcagtcgttaaggaaatgaccagacttgcattagctcagcctggagtggaaagcgtggttgcatttccaggtttatctgtaaacgggccaaacatgccgaactcagctttgatgtttacgatgctgaagccttttaaggatcgtcaggacccttccttatctgcatatgccatagctggtagccttatggggaaatttagcaaaatacctgatggttttgttgggatattcccaccaccacctgttccaggtttgggaagtatgggcgggttcaaactccaaattgaggacagagcaggattaggttttgaagaactggcccgagtgcaaggaacgatcatggctaaagccatgcaaactccagaattagctgggatgatggctagttttgaaactaattcacctcagatccaggttgacatcgatcgcgtaaaagcaaaatctcaaggagtggctttaactgacatctttgatacattgcaggtcaatttgggatcactatatgttaatgattttaataggtttggccgtacatatcgtgtaattactcaagctgatgctccattccgcatgcaggctgaagatatcggattacttaaagtgcgaaatgcggctggagaaatgatcccgttatcggctttgattaatatcaaactaacttcaggccctgatcgtgtgatgcgctataacggttatccatcagcagatattacaggtggaacagcccccggttattcttctggccaggcaaccgatgctattgaaaaaatagtgaaggaaagcttacctgaggggatggcatatgaatggacggatctcacttatcaggaaaaattagcgggtaattctgcgctatatattttcccattagcagttttctttgcattcttgatcctggctgcacagtacaatagctggtcgctcccattcgctgtactactgattgcgccaatggcgttgctttcggcaattggtggggtctggatttctaatggtgataacaatatcttcacacaaattggttttgtcgttttagtcgggctggccgctaaaaatgccattttaattgttgaatttgcccgaactcaagagaatgaaggactctctcctttggaggccgtacttgaggctgcacacttacgcttacgtccaatcctcatgacgtctcttgcatttattgctggcgttattccattggtactggcgagtggcgcgggtgctgaaatgagacatgctatggggattgccgtttttgcaggaatgctaggtgtaacgttctttggattactgcttaccccagtattttatgttgtggtgcgtagtttttcgataagacgaaaagtgaactcccatcaattgttgagtgagaaaagatag

SEQ ID NO: 195027 - DNA, 1206 bp, Klebsiella oxytoca; identical to SEQ ID NO: 128559

SEQ ID NO: 195028 - DNA, 180 bp, Klebsiella oxytoca
atgaatatcagtgctctcaccactgtccgatgcctgtttcttgggcatcgttttgaaactcaccttattggatgtaacggctcacattttatctgccgtaaatgcggaatgcatatctggcgctctgttcagccaaataaaggcgacgttattcgtgaatttagagagggctcaaaataa

SEQ ID NO: 195029 - DNA, 582 bp, Klebsiella oxytoca
atgaccagtatttcaaccataaccaaagaacaactaaccgaatgggttgcacagcttgatagcgacggcggatgcgatgcaacagaccaacagctagagacgctaattcgccagtcactggccgcaacggccagcgagccggtggcatggcgctgtgtcagcggtactcttgccgcgcggaggttagtcaccgtaagtaaaccagtgtctgatttctggcgtaaagagggttgcgaggtcagaccgttatacgccgcccctcagccagttccggtattatatttgtccgatgaacatatcgacgccgtgctcgattctcgcggcaacattgaatacgtcattgccgacaaacgggagcgcctgcgtatgtttgcgcgtgaaattctccgtgcagctagctcccagcctgagaaccaacagaccagagctctggttatgtggattaagcgtctttcgctggcgcttcgctctgccagccctgataacaaattacccaaagtggcgatgggctatctgcaaaacaacggtctcatcagcattgctgattgccttcgggggaacaatgaagagcctcctgcgtaa

SEQ ID NO: 195030 - DNA, 624 bp, Klebsiella oxytoca
atgtctggcgatattaaagcagtatttgacagcaatctgattgcaactcaggcaggtaccgttcaggtatttcattttgatatgtcttcccgtgagtttatcggtaccgaggatgtttacattcatttcggtgttggcctgcctgcattttcgtgccttgaagaaccaccggtacaaagtgaatatcaggttgctgttcgttctgaagataattcgtcctggtctgttaccgatgattatcgcggtatcaccgtctatgacattcagacgctcgccagccacgttattaccgagcccggccccatacccgacactgtaacgacctcagcaccatcaactccatacgacaaatgggacggctctgcctggttaaccgacgcagatgctcagcatgcggctgatgtggccgttgctgacgcgcaaaagaaactgctcattactcatgtctcaggcgatatttcaattcttcttgatgccgttaatttaaatatggcgacagatgatgaggaatcccgtcttactgctttgcaggcttatcgggtgctacttaaccgggtagatacatcgcttgctcctgatattgtttggccggttatgacaaccctggagggtggtaatgtctaa

SEQ ID NO: 195031 - DNA, 2523 bp, Klebsiella oxytoca
atgtctaatttacctgaaacaccatcatgggaatctggtattcatcaactcgaagaagctgaacgggccaaagcagggccggggggagtattaaacgtccaggcaactcagcttgcaaaccgaaccttatatctgaaagaagcaattgacgatttatctgatgccgtttattccggttcggatatttacgagacgaaagaagatggattactgaaaaccagcgagggggaatactttaaagtacccgttagcggaataagtgatatctcttacattctttatcagaataaatcaggcgtagcggttgagatacttcgcgagaagagcccttattcgtcaggttaccaggcggctacggtggtcagcagtagcgcagctaacacggtcgctattactattcccggcctgctgggtgatggcagtctgatttattttctgtccccaatcctgaatactggtgctgtcaatgtcacggtgactaatgcgaaagggagcatcgttacccgtgccatccagaaacaaaactttgcagcattagtcggcaatgagctgctgctgaatcagccggtactgatggagtatcgcacaggcacggcaaacaatttcgttctgatggcatccggtccggtggcggcggagctgaatgcacgcctgctgagtcttgagctgaactcactgaccattgtatcttctgtcgcagcatcagccgacgcctatacgggaaccaccgctaacaccacctcatcacaggtcctggttaccggccgcgcatttgtattcacgcccagcgcgaccaacaccacgagaacaccgacgctgtcgctgaacgggtggacggcacgcacgattaaacaggctggcggtactgctctggctgtcggggacctggtatcgggtaacccgtgcttcctcatgttcaacgctgcttcttctgattttcgtctgctgacctatccaggcgacagggcccgtattctcaacgcctatgtcaaaggaacggtgacaagcgacgctacgagcccgaacgctatttctctgactatccccggcctgctgggtgacggtactcagattacgtttgaacccgtggtagcgaacaccggcgcaacgacactggtgattacggacctgtacggaaactccgtaacccgcaccctgctgaaaggggcaaacaccgcgctaacgggcggcgagctgcaggcagcaaaacccgttacagttcagtatcgcggctctccggttaataatttcaaactgcttttctcgggtgacccaacgactgacattatcaacctgggcaaaagcgttaccactctgcagggtgctatcaccgacccgtataccaaactgagcaaaaagctcataggtgacggaacgcaggccaacaccgcgccattcggtgagatttcatttagcaatggcgtaagaactgttactaagaaacgcatcatagtcaccactcccggttcgtctgtggggctaggagccgggtcaactggtggtggcgttgttggtgctcctttttctcccagcgctttatttattaattctatgaaagagcacctttctggttatggtgagtttgagtttatcgacgacaaccagagtatcggaggccaggcgatacaccagtttgccgcgcagctgaaaaattccccgtatttcaccagtagtaaccctgacgactggccggatatcgtgctgattgttggcgggatgaatgatgccacgccgaacggaaactttaaccgcgggcgcacgtacccgcttcagcgggcagtcctggaaaatctgattgaccagtgcacggcaaagggcgccgtggttattgtctgcaccacgccacaccacaatgtcgagcacagcaccgtcaaaaacatcaaactgggtgacctgaatgtcctctggccggtcagaacattcaacgtccctacgggtttcacctttgattcagctaacaaaactatcaacagcacggcatttgcctatgacacaggaaacgcagcgaccagctggggcgggcaaatcctgcgaccggggcatgtgctgcgggttatcggggagaatgccggtgattacaccattgctgccatatccgaggaccgaaaaaccatcaccgttgcagaaaacatcccggtttctggcctgattaataccaccattcagcacatcaatctcgacagcattattgaagaggtgctggacccgcctccgtcaaaatcgtttgtggaggccaactggtcggggagcggcgttaaagttgttggggatgtgcgtttcggcctctacaacagcatggtgcgtacagtggcacgtgggaaatcagcgtttgtaatggagaacgaaattccctggttcaggctgggtgttgaggatcacggatggtccgcgcttttcaactttcctaattacaaccacccgaatgacctcggctataccgtcagttacaaggctggcgcagatgctgcggcattcagtctgtgcaaactgatttacggcgaaaaatactatcgcgcttcgtga

SEQ ID NO: 195032 - DNA, 288 bp, Klebsiella oxytoca
atggcgtttacattatcagcacctaaaaccgttcagattcattatctcggcgggtatctctgcgatcaggaaactgaaattgagctgatttacgccgttgaaagcgtcaggcaggatgattcggggcaagtgaaagcgtcgttatcggttcgctacgatgaccaggcaaaaatcatggtaggtgattatccggtgaccctggatgtctcatcaactcaatcatgggtcgaacaggcagaagcgcaaattatgaacctgggagaattttctggttctatgactgcttga

SEQ ID NO: 195033 - DNA, 654 bp, Klebsiella oxytoca
atgaaatggtatgacttagcaaagtccctgatgaaaagtcagggcgttaaccaggagcagctggccgaacacctcgggataaccaaaggtgcggttagtcattggctgaatgcccggagagaacccagccttgaagagatagcgaaaatccttaagtttcttggaaagcagaatttctctgtgggggctggcggcatgatcattgacgaaactctaaaaggcgatgttggttacattggcccctacaatcccggcaataaataccctgtcataagcagtgttcaggcggggtcttggtgcgaagctgtagagccttacacaacgaaagacattgatctttggctggagtcgaatgcacatattcagggtgatgcgttttggcttttggttgatggtgattcaatgacggcaccagttgggctgagcatcccagaaggaacgtatgttctctttgatacgggtagagaacccattaacggcagcctggtgattgctaagctgtcagactcaaacgaggcaacgtttaaaaagctgatcatagatggtgggcagaagtaccttaagggcttaaacccacagtggccattggtgcccattaacggtaactgtcgaatcattggggtggcagtggaaactaagcttcgcttggtttga

SEQ ID NO: 195034 - DNA, 867 bp, Klebsiella oxytoca
atggaaaacactagcattcaagatgttaatttttcacttagatatgatgggcttgacgcggagaagcatgagatagagctttcttctcttggggagtcacttaaaggcttctctaaaattttagcaactgcaggcacctttgctttaacccaaaaatatagccgaaccacctctacccaagaggtgaaggtttacgcaaaagaagccagagctaactgttttaccttagatacggttatgaattttatcagccagtctcaattgttctcaggatcagcgggggctatacttggggcgctgataccttatatcttcgcaaaaaacgcgcagaagaaagaggaaatgaaataccttaaagacgcacttgagaaggcaatagaagccctcggaaacaaagataaagataccatcgaaggcttaatctccgtgattgataagatggcaggagagttgcgtccgtcagttaggcaggctgtatcacccatcggtaatacctgcaataagatcagcgtaacatctgggcaaggatttaaacctgccatcattgatgaggatgacaaggctatcattgaccaattagatgatgacgaagtgataggactccgtgagtacagaattttcctcacagaatttgacgcgcacagaatgacagctaaggtcattctcgaaggtgatgattcagataaaaggatttcagcccagataagcgatccatcggcatctaagtcagaaaacccctacctcatatcccttagtcgctttctttcctcagggttaagcaatgattcagcggtaaaggtcactgcaaaagcttcagtgagaaaaggggccatcagtaaactgttcatagtagatatcgagatataa

SEQ ID NO: 195035 - DNA, 189 bp, Klebsiella oxytoca
atggaacagattcaagttgaaggttgttctgattttgattgcggtcgcatcggtaagcgttcagtgctggggtggcgtatgagcaagcatggcattcgttcactggttatcgtgctggcattgagtggcgttttctggtcggtgatagttgtttcaattctccatgctacgggggtgttcaatggttag

SEQ ID NO: 195036 - DNA, 207 bp, Klebsiella oxytoca
atggttagtcatcattacggaacacagaccgttaaccgcggcgccgttctgccagggatgctcgttaagcatcgggaaagcacctggacagcatcagcaaataaacgcggccgcctgtacctgcatcgcgggattgagcgcacttacacaaccgatttgctggttgaagtttatctgaacgggttggggcaaggcctccgccggtaa

SEQ ID NO: 195037 - DNA, 345 bp, Klebsiella oxytoca
atgagcacgttaacttttgtcgttgattttgaagatggaaaggaaccggcagttcattcccgaatgaatattcttggcggcgaattggcggctgtggcttggagggactcgcttaaatcaaatgtggttgccgttgtggattgtcttccggctgcgaatcagcaggttttgctcttcgatgctaacggagagggttgggttattggctggcgctctgtttggctttctgaaggtatgaaagaaactggcgattgggaatggagctatcaaatagagagccttgatgatgaggatatgaacattactcattgggctcctacgccctcagaaccggaggccgaatga

SEQ ID NO: 195038 - DNA, 282 bp, Klebsiella oxytoca
atgaatcagacaacgcacaccacctatatcattgcagaccctggtgagtgggtttccgaagagcagataatggcactgaagggattgaaagaagggacattaaaaaatgccaggaagaagagttttatggaggggcgtgaatacaaacatgttgccgctgacggtgagccttttgataacagcccctgcttctacaacataaaggctatcgaccgctggatagcaagccagagaccggcaaagccaagccgcaagactcctgcgaaagcaggaaaaaactga

SEQ ID NO: 195039 - DNA, 519 bp, Klebsiella oxytoca
atgctgaataaagaaagacttgatgagttattagattattcgcctgattcagggttatttacttggaaggttaaccgccggggaaaggctaagtctggatgtatcgcaggaagcaaaaatggacaaggttacattctcataaaaattgacgggaagttttattttgctcatcgcctcgcgtggctagttacgcatggaacattcccaatcaacatgatagaccacattgatggcaacagagaaaacaataaaatcaataacctaagagaagccaccgccgaacaaaatatgtggaatagcgcagccgggaaaaataacaaaacaggagtaaagggtgttagctgggatggcagaaggaaaagattccgggccagcatatccataaaagggaaaaacaaagaaatagggagttatttgtcacttaaagatgctgagtcggcaataaaggattatcggctgaaactccatggcaaatttgcaaataacgaagttattaataacaaccttttggagggttaa

SEQ ID NO: 195040 - DNA, 192 bp, Klebsiella oxytoca
atgttttgtgctcaagaaaataccaggaagggtgttggcatagcgaatgaggatgggtttttcgcagaaatgcacccgcagattgcgcaggttatcgggatagcggttatgcaactgctggttgagaagcaaagcatctcaaaaaacacgattattgagatgattcaggtgttgtggcagggggccaggtag

SEQ ID NO: 195041 - DNA, 342 bp, Klebsiella oxytoca
atgacacagtttcaacttgcattaatcgccagagaagttgatggagaagtcatccatcttcgcaccaaagacggttacatcaatgccaccgcaatgtgcaagtctgctgggaagctacttgctgactatacacgactaaaaacaacgcaagatttttttgatgaattatcccgcgatatggggattcccatatcggaattaattcaatcatttaaaggcggaagagcagagaatcaaggggcttgggttcatccagacatcgcaattaacttagctcagtggctatctccaaaatttgcagtgcaagtatcgagatgggtgcgtgagtggatgtcaggctaa

SEQ ID NO: 195042 - DNA, 507 bp, Klebsiella oxytoca
atgactatcacattacaggcagtaaacgagctcatcgccgctctggagagcgctggcgagctgtcgatcagagagacaaagtttatggcgctggcgaaagcgtaccagcagctggcggcggagaatgtggcgttagctctggaaaatgtagcgatgaaacagatcgttgactccgtaaccaacctggataacgaacctcagtaccacgacgaaggcatggggtgcggactggaagaccgaggtattactgaccggtacgatgcctgccgctatggctgggatgaagctatggagcggatatacggcgaagttatcccatgcgccgatgagctggacgtttcggccaccgatcgcatcgtagccgggattaaggctgatggggtggaggagttcgcggcaaaacttcgaattcctggtgatgaccagttttttgacgctttagcaaaaggggttgcacttgctgctgacgacttcgccaagcagctgcgcgagggggccgacaaatga

SEQ ID NO: 195043 - DNA, 201 bp, Klebsiella oxytoca
atgagcaaatacccaagagtcggcagtgttgccgccaaaagcaaaaacacctcggccaaatgcaagtgcggtgcagttgcgaagtttaaaaccacggttgaagtaaatgttttccgtggtgatgacgaagtggtctggtcttgtaacgagcacaaaaaagactgctcatttttagtcggcgggcaaggcggtgctgcatga

SEQ ID NO: 195044 - DNA, 198 bp, Klebsiella oxytoca
atggcaacgtattttgaaagaaacatcatgtgtaccaaagacggtggtgacggttttcaggttggtaacgtttacgaacttcttgagattgatggaatttactgtgttgaaaatgatgaaaacaagccgatcgaggcctttcgtggggaccaacattgcaccgctggaaattctaatttcgacaactggaatcaatag

SEQ ID NO: 195045 - DNA, 732 bp, Klebsiella oxytoca
atggcaagcatggccgggggcaaccctgagcatggccgggttgtgaattcagacgctgagcgccttgttgacgcgctgttcatgcagctgaagcagattttcccggctgcaacgcaaaccaacctccggtccgatgctgacgagcgagtggctaagcagcagtggatagcggcattttcggaaaacggcatccgcacccgcgaacagttatccgccggcgtgcgccatgcaagagccagtgaatcgccgttctggccatcgccgggccagtttatcaagtggtgcaaggacagcggcacggtccttggtatcaagctggctgatgtgatgggtgaatttcagcgatacaaccgcgagaaggggctccacaccggcggcgcggaacgcttcccctggactcacccggtcatgtactggattgtcaccgatacccggcgggcaatgtaccagcgccagctcagcgaggcagaaaccgagaaatatgccgccaagaaactggaagactgggcgatgaaagtcgccgccggagagcaaataccttcaccggtgctgtcgctggagaataaccaagaagtaatccccacaaatcacgccagcaggcagcgcggttaccacccggaaggcaaaagcttcggctgcatgcctggcgccgcatcactcggcgcgttaaccccagctcagtggctgcgggacgaataccttattggcaaagaaaaggggctgattcaatga

SEQ ID NO: 195046 - DNA, 1119 bp, Klebsiella oxytoca
atgtcactaagtgtggtaagagaacaaattcttaactttgtttctaaatcagccccttcggttatggcaattaaaggagagtggggagttggtaagacatttagttggaataaatttcttctggaagcaaagagtgaaaatatgatttcagcttcacgttattcttatgtttctcttttcggcatatcttcgttagatagactgaaatattctatttttgaaaatgcagtttcaaaagattccataggacatgatccaagtttagatagtttaagaaaaaataccttaggtatgcttgaaatattggggagaggttcttggagtaaattgaaagagctaccgtatataaagtctgccgctcctgccatagaagcatggtcatttatgtctgtgtcagattcattaatttgcatagatgatttagaacgtaaaggctcatcattagaactcaaagatgtattaggtcttatttctttgttaaaagaacaaaagaaatgtaaggttatacttttgctcaatgatggtactaaagaagttgctgattatgaaaaatttaaagagaaagtaattgatattgaattgcatttttcacctacaccaaatgaatctgcacagatagcatatgataatagtaaagacttccataagccgttagcacaatatactatttcgttaggtattaagaatattagaattttaaaaaaaatagaacgaaatgtagaaaatgtatggcgtgcttttgaaggttgcgaaagtgaagttaaaatgcaatttttacatacagttgtattaatgaattgggcctatttttgctctaaatcagataacgatattcccactttagatttcctagaatctatggaaagtatttactcaatagctaaaaaggatgctacagaagaagagaagaaatggaagggtattctactgagctataattttaccagagttgatgaattagataggaagattgcaaagctagtcaggaatggatatatagatatgacagagcttagtgagtcgataaagattgtaaataaacaggttttagataataaaaagcaaactcatttagaagtgcatgggatttgtttcataatagttttgatgaaaatgtag

SEQ ID NO: 195047 - DNA, 336 bp, Klebsiella oxytoca
atgctccaagggaccgggcaacttccgcaacctgtttatgtactcccccaacgggaaaaaaacggcatccagatcattccactgtcagaagtagcggcaaaggatgagtttctaaacattaagaacgtgagccgtgatgacatgatggcagcgcaccgcgtaccgccgcagatgatggggattatgccgagtaacgttggtggttttggggatgtcgaaaaggtgagtttagtatttgttcgcaatgagttaatcccccttcaaaaacgacttgcggagctaaatgaatggataggagaaacagtaattagccttaatgaatataaattaaattga

SEQ ID NO: 195048 - DNA, 627 bp, Klebsiella oxytoca
atgcgtaaaccagcacgccgtacctgcaaaatttgcaaggccaaattcattgccaccttcgataacgtctggtggtgttgtcctgatcacggatacaaatacagccagtttctgctcgctaaaaggaaagccgattcagagcggcgacgtaaattggaggtgcagcaggagcgccgttctctgaaagtcagaaaggaagctctcaagtcaaaatcgcaatgggataaagaggctcaatcagcgttcaaccgctacatccggatccgtgatgagggaaagccgtgcgccagttgtggcaatccactcatcggcaacagcaactacctcaccggcagtgccattgacgccagccactatcgttcacgcggcgcggcgtcgcatctgaaattcaacgtgttcaacgttcactctgcctgtacccgctgcaaccggcaattgagcggaaatgtagttgagtaccggattcgccttattgatcgcattggcctggaacgcgtagagcgccttgaagctgataacgaggcccgccggttcgacattccctacctgcagcgcatcaaatccatattcacccgccgagcccgagcgctggagaagcgccgcgcccgccatcaggaggccgcatga

SEQ ID NO: 195049 - DNA, 690 bp, Klebsiella oxytoca
atgacaccgcaatatttagaatttgttcgccagcagctgatagtggccaccgccgatctgagcggcacgacgaaagggcaacttgtagctttcgccgaaaacgcgcagttcaccgctacggcgcgcagccggggaaggaaaaaggtattagacaaggataagcagcgcatggtgaacccggacggcccgccgatggccggcagccagtcccgcgcaaagggatcgtcaatcgcgctggtgggcccggttgagttcgtgaccgcatcatggcgccgcgctttgctgtcgctggaggaccatcagaaagcgtggctgctgtggaattacagcgagaacgttagctttgagcaccaggtagctatcacccagtgggcctggtcggggttccgtgaacagctcggcgcgaagaaggtggccggcaagacgatagagcgcctgaagaaactgatatggctggcagcacaggacgtgaaagcagagctggctggtaagtatgtatatcagcaccaggagcttgcagcactgtgtggtgttaaacctgataactggtgtcataactatgctgattactggcgggccatgtgcgccatctttaagcgacttgatagcgattctcttctttgcgccgtgagaacacgatcacagcaaaaggcgactttttcgcagcagggtcttgcaaaagtcaattaa

SEQ ID NO: 195050 - DNA, 525 bp, Klebsiella oxytoca
atgttgtactgtgatttaattgagatctttggtccggacccgttgaataataaagatgaaggaatttccattcttcgcgagaagtatgggattgaagcgccagaacaagtttttgcgcaaatttattgcgggttatctaacgattctagatttcaggccttgtatgggcatctaaatcttaaatcacttaaatgggatttggtcagattgaaaactgctgagttcactgcgtttggtacaaatgctacctatcctgaacacatgcttgagatttcggaagattttaatacctgcggcaaccagttttgtattgatgcaagagaagaggttgcacaacattggctcaaattcggcacatgggacgaaccaccgatgtttattgagcgttctctcatttcgtctgatgagagaggcttgcacctcatggaagggcatacaagattaggtactttgcttggtgctattaagtacggatttgtgaagttagctgacacccatgaaatctatatagcctccatgaaatag

SEQ ID NO: 195051 - DNA, 1620 bp, Klebsiella oxytoca; identical to SEQ ID NO: 128562

SEQ ID NO: 195052 - DNA, 1386 bp, Klebsiella oxytoca; identical to SEQ ID NO: 128563

SEQ ID NO: 195053 - DNA, 1434 bp, Klebsiella oxytoca; identical to SEQ ID NO: 128564

SEQ ID NO: 195054 - DNA, 1200 bp, Klebsiella oxytoca; identical to SEQ ID NO: 128565

SEQ ID NO: 195055 - DNA, 483 bp, Klebsiella oxytoca; identical to SEQ ID NO: 128566

SEQ ID NO: 195056 - DNA, 309 bp, Klebsiella oxytoca
atgggatttccttctccagcatctgactatatcgaggataccctcaccgtcacgaaactgtgccgcgtggatggcaactccaaaatcgtcaaaacagattccggttatgccattttagatctgtcgctgcgtccgcagcctggtgattatgttttgattcgttacgatgggataacggatttcggtcggctgcaggggcaatcgttcattacccgggatggtgaagcggtcgagggcgatggggttgaggtttacggagtggtgacgttttctgttaacgacctgcgccgggacgactgcccgatttga

SEQ ID NO: 195057 - DNA, 288 bp, Klebsiella oxytoca
atgtcgtttaaattatcaaagccaaaaatatttcagattcattatctcggcgggtatctctgtgataaagaaatcagcatcggcctgatttacgcagtcgaaagcgtcagacaggacgacgcagggcaggtaaaggcaaccctgtctgtgcgctatgatgaccaggcaaaaatcatggtgggagattaccccgttactctggataccacatcatcaaaatcctggactgagcaggcagaagcgcaaattatggacctggaagaattttctgaatcagttcctgcgtaa

SEQ ID NO: 195058 - DNA, 2526 bp, Klebsiella oxytoca
atggctttatataaaacgggtaacccagtcccgtcttctgctatgcctgacgtatgggataataaccgcgttcaggatgtaatactgaatagcgatgaactggaagttgagactcgcaccggggagatgactccaacctggaaaggtgtattaaagaaaaacgaagacgaaattgaagaaacccgccagaacctgatccccctgagcaagcagtaccagacgttggcggcagcgcaggcggatatcgctaatatcccggaggggagcaccacttatgtgcgcagctccgatgacgcgtatctggctattgagtatatgaatgtcgccggtacgttggttaccacagggagaaaaatgctctctgcgctaccaactggctatcaggctgcgaccgcagtcagcagcagcgcggcaaacactatcgctatcactatccctggcttgttggtggatagcagtctgatttattttctgtctcctattttgaataccggcgcggtcaatgtgaccgttactgacgcgaaagggaatacagttactcgtgccatccagaagcaaaatttttcggcactcgcgggtaatgagctgctgctgaatcagccggtgctgatggagtttcgcacaggcacggcaaacaatttcgtcctggtcgcatccggtccggtagcggcagagctgaattcacgcctgctgagcgtcgagctgaactctgttgcgattgtttcggcagtggcaatgacggcggacgcgtatacagggactaccgccaacaccacatcatcacagcttctggtcaccgggcgcgcatttgtattcacgcccagcgcgaccaacaccacgagaacgccgacgctgtcactgaacgggtggacggcacgcacgattaaacaggcgaatggcaccgctcttgctgtgggagacctggcggcaggttacccatgtctacttatgtacaatgccgcttcttctgattttcgcatgatgacttacccggcggacagggcacgtattctcaacgcctatgccaaagggattgtgacgagcgacacaagcagcccgaacgccatttccctgactatccccggcctgctgggtgacggtactcagattacgtttgaacctgtggtggcgaacactggcgcaacgacgctggttattactgatctgtacgggaactctgtgacgcgtaccctgctgaaaggggcaaacaccgcgctgaccgggggcgagttaaaatacgcacaacctgctactgtgcaatacaggggtggatcggttaacaattttaagttgctgtattctggtgacccaactaccgatatacagaatctgaaaaccagcgtgaccgccctgcaaagcagcatatccgatccgttttctgcgctgtccaccaagctggtcggcacaggagcgacttcagatcaatctccatttggtgcaataacctggtcagctggtgtcaagacagttacaaagcgccagattatttgtacatccgttgggtcatctgtcggagttggtgcgggatcaaccgggggcggagtggcaggtgcgccatacgcacccaatactctttttgtcaatgcgctaaaggctgagctagctcagtatggtgagtttgatattgtagatgataatcagtgcatcccgacacaggcatttcagcagtttgcagctcagttagctaattcgccatattctacgtctgattttgtgttaatagttggcgggatgaatgatgctcctgttggcaacttcaacatgggaagaactttccccggtcaaaaaacaacacttgagagactgattgatttgtgcctggcaagaggtgccattccaatagtgtgcacaacaccgcaccacaatgttgaaatgtccgctacatacccaacaatacccggaggaaaccccttatcttggccagtcaggacgtttaatgttgcaggtacatacgcattcaactctaccgctaaaaccattactcaggcatattttgcaaactcgtcatatggtggggatattctgacgactggaatgacccttcgagtagagagcggaaataattccggaaattatactatatccagcatctcttcagacagaacggtaattaccgtaaatgagtccattccagaaacaagcagttattcaacaacggtccgccatttcaatctttccggaattattgaggatattttgtatcctgcaccctcggaatcatttgtgacaaaggactggacaggtggcggcgtactggttcagggggatgttcgctttgagatggtgaataacatgcagcgctctgtgacaaggcagaaaggggcgtttcttgcggattgtgcatattcattcttcaagtatggggttgaggtcggaggatatggttccgtttataatgtaccagctggtaactataaccatatgaatgacaatggatataacgtcacattcggatatacgttgaagtcggcagccaggaaagtttcagcacttattttcggtgagaaatattactatgcatcataa

SEQ ID NO: 195059 - DNA, 774 bp, Klebsiella oxytoca
atggctgaaaataattttaagccgtttgccgttggtgcaggtgcaaacgtgtcctcacagacagactgggaaaatctgcttgcattatctaccggttttaccgcggggatagcccgcgctgaacaggtcaacaaagcgctgcggcagggtaccgtaatggcgagcgttctggggcagataattctggagcaaaccgccgaggatgtcctggataacggggacacagatgcgctaaaagtccagttattattggcccttgcctcattacaaattgattccgtatacccggtgggtgcggtgttgttcttcgctcagaacaaaaaccccaacgcgcttttccctggcacaacctggaattatatcggagaaaacaaaacaatccgacttgggcttcaggacggatcggatgttctggatacggggggcgcggatacggtatctcttgccaaagcaaacttacctgcacaggcattgagtattaccggaactgcagcttcagttgatctgggcacaaaaactaccgacagccagggtgaccactcgcacggctggggtagctcaatgcagaaacaaggtggttcagatcaggcggtgggctctaatggcggtactgattttggcactacatcaacgggtggggcgcatacccacagcgttgccttaggttcccacagtcatggtgtttccggtaataccgaaaacatgggtagtggtaccgcattaaatattaccaactcctacgtaaaactgatgggctggtatcgttctgcctga

SEQ ID NO: 195060 - DNA, 654 bp, Klebsiella oxytoca
atgcccgtagcactaaactcccagctcggcagcaaagagcaggccgacgcacagctggcgcaggcgattatgtccgcgatgcgcgtatccattcccggcatcatccagttgtttgatcctgacaccgtcaccgccgttattcagcccgcgattaaaggtgtcgaacatgatgtttctggcgcagaggtatccgtaaacctgccgctgctggtggacgttcctgtcgtcttcccccgcggtggtggttgtacgctgacatttcccgttaaagaaggcgatgagtgcctggttatctttgccgaccgctgtattgatttctggtggcagaacgggggcatacaggagccagtagacgggcgtatgcatgatttatccgatgcgttctgtatcgtggggccgcaatcgcaggctaagaaaatcggcggcatcagcaccagcgcggtagagctgcgcagcgatgatggctcagtgaagctggccctcaatcccgccagcggagcaatcagcggtacggcgccgggagggtttaacctgaacggccttaagattttgcctgacggacgcctgcagctggtggatggctcaatcgttgataagcatacgcatggtggcgttgaatctggtgggagcaatacagctccgctgggagggtag

SEQ ID NO: 195061 - DNA, 507 bp, Klebsiella oxytoca
atggcggtcagtacagggaagaaaattgttttggctgttattgttgtcgttggatatttaatcggcaaccactcgaacgatagtaaaaagtatgaagaactaaaaaacaaggagccatcatccctgagcgaggatgataagtcgtttattaaaacgattgaggatgggcgggcgaaagccgaagctgagcgacgcgactaccagaaagaacaggcagccgagaaggaaaaggcaaaaccaaaacctttatcggaaaaagttttgctgcaaaatgatgtgatatttacatgcaaagatattgcaagaaattctctcaactatcctgattcttttgaagttgaaaataccaatagcggtgtagataaccaaaatggaaagcaagtctattacttcactcttgattattctggggttaatgctttcaatgtccgaggctcacacactattgagtgctatgggaccataggtgacccatcgcacagtgtaacttatagaacattcaactaa

SEQ ID NO: 195062 - DNA, 342 bp, Klebsiella oxytoca
atgaaaggctgggaattgttgcttggcgtcactttgttttattcctgcggtgcattttccgctacgcagtgtgggccctttctgttgaagggtgaaagcgatgggttgatgcatatcaacggccaggctccagcaactcagaaaatgtcattttttaagcaaaaaaacgatttcgataacgtcatgatgcaatggatgcttcctgacgccaacactggccgctggctcggtctcgattacgttaagcgcaacggcaaagccatccttaatgttgaagtcgttcgtaaaaatatggatgatccccggcaattttggacctatgattgcaagcgtataaaatga

SEQ ID NO: 195063 - DNA, 1023 bp, Klebsiella oxytoca
atgtcacaaaactggatgcggcatttcgagctgcaacttatcgatgataaaggcgacgggatttcgctgtcagatttcaaagtgacgtttaacatccagaagatgcccgccaccatatttaatggttttgtgggtaacttcaaaatttacaatctggcatcagaaacccagaaccgaataatgggaaaggaatttacccgtataaggtgcatcgccggctataacggcattgctgacgagagcggggagtatcccgataaaaacatcggaatgattttcaatggcgatattcggtttactatcaccggcaaggaaaacgtaaccgacagctgggtgctcattcagtgtatcgacggctgggaagggcatctgaacgccagcgtaaaaacgactgtagcggctggctggaagcatgcagacctgtttgacctcggaatgcagaccctgagcccttacggcatatctgaaggcagtaggccggactttggcgcgaccgttttcccccgcgggcgcactatctaccagaataccggacgcctgatgtacagcctggcgggtcagtgcaaagccaactggtggtacgaaaacaaccaggtgcatatcgttcctgaagataaatatattcaggaggcgatcgtgctcaacgccgataccggcctgattggcatgccgcagcagacaatgggcgccggcgtcaacgtccgttgcctgataaacccgaacattaagttgggcggccttatccggctggatcaggcgtcggtgtaccgtgtggctcttggtaacgaccagattggacagtcgccagggaccctgggcgaaagtaccacagacggcaatatctatgtcgacgggatgccaggtgcgcagctagccgcaatcaataccgatggtgattacattgtcggcagcattgactatactggcgatactcgcgggcagccatggtatatggacctgctgtgtctggcgaagggggctgctgagctacaatctgtaagcacgttaaataaggtgggatga

SEQ ID NO: 195064 - DNA, 303 bp, Klebsiella oxytoca
atgtctgtatcagaaatcccgttgtcacccgacaaccagcagttcgcggttgcgctggcgggtcagagctttcaaatggctataacctggcgggcggtgttctggtgtctggatatcatggacagtgccggcgccgacctgattaagggcatacccctgatcaccggcgccgacctgctgacgcagtatcgctttcttggtctggggttttcgctctatgtcgtctgtgatgacccagcgaacgacaatccgacggaaacagacctcggaatcaaaagccatctttacgtggtaacggagtaa

SEQ ID NO: 195065 - DNA, 600 bp, Klebsiella oxytoca
atggatattctctctacgctgttccagcagcggacccggcgaattggcctgatgatccccgacgtggtggttaccgaacggcatagcgatgcactggaaataaccgagcacccggtggaaagggcaaccaccgccgggaccgggtttatctccgatcacgcctatcgccgaccatcagaagtcgtaatggagactggctttgctggtggtggttcactgctggatttctacgatacccgcaacattgggttatcgacgccccttaacagcatggggccaaaggaagtttatgcagagcttctaaaaatgcagcgggaaaggcaactactcgacgtaaccacaggtaagcggctgtataccaatatggtaattcgctccctcgatgtgactaccgatcgcgccagtgagaatgtcctgatggcgaccattacgctaagggaggtcatcaccactcagacgcagacagtcagcgtggccacaaaggaaaacatgaaagagggggctaatacctcggcagtccaaaactcaggcgtgaaaactccaacgcctaaggatgagtcattactaagccggggtgtacgtttcttcaccggaggttaa

SEQ ID NO: 195066 - DNA, 1692 bp, Klebsiella oxytoca
atggtgagaatcaattttatcgatgaggacaggtggataaccgtccaccccaacggcgggacgggtacaccggttttgattggcgaggatggggttgtcaaagccggaatgggagggaaattcaatggacagagcatcacccagaccacaaataaagaaacgcagccggataaatcaacgccagttaacgagttgacgaatccgaaaccggaatttgaaggtaagtacaaagttagcctgaatgaaaagcagagcgttgcctaccgaagctggaaagccgaactggaaaaatcaccaaaaagcgacagcgatgccagattcaattcaaaggttcgacagcttttcaatgaggcctctgaaaataaggatgcaagggatttgttactgcgattcctgaataacaacccaaaggcatttctagatatatcacgtagatatcaacacaaaggcggcaaaaccggcgacgccgatacagggcgacacaccatgaaatatttctttaaaacccgcctggggaatactcgtttccagcttgctgatggctcagtgctgttcaaggatgtgccgataggacgtactggagagcaggagtacaacaaaaccgagcgcccagagcttacccctgatgcgtgggggaaaatcatcgtacggcgaacacctgaagaggttttcagtgagcgctcaatggcgtcctttgaaggaatggcagtcactatcggccatccgcgagattttgacgggcagatcatctttgttacccctgataactggcgccagctggctcacgggcacatccagaacgtacgacgtggcacggacgataaaaccgatctgctgctggctgatgtcatcgtcaaaaccccggaagccatgcaggccattgatgatggtgatgacgaggtcagctgcgggtacgacgccgattacgaacaaatttcacctggtctcgcaaagcaatctgcgattaccgctaaccatctggcccttgtccctaacgggcgggccggtttccgttgtgcaataggggattctatgccaagcactactaaaaactggtttacccggctcctgaaggcccgtaaaaccggggacgctgccgaaatggcaagtctcattgataacccgcctgatgatgtcacgggcgataacgatgtatcgacctctatgacacccggcggagtggtcatcaaccttgcaccgcaaaatccgcttcccggcccggcattgcctggtaccggcgatggtgaggaagaaattcctgcatggggtaaggcgctgattgaggcggtggccaaactcacgcctgcggcagctgctcctggtaccggcgatgccgaggatgaagaggagaaaaaggaagaggagggtaaggttaccggcgatgccgcttatcgtgcagatctgattcagccaggcatccagttgccagaaaaggcgaagccgacagcattcaagcgctcagttctggcaactgccgatcaggagatggtgcgctctatcgtgggtgatgccgatatcagcaaactgaaaaaagccaccgttgatatggcattcaatgctgtctctgaagtggcgaaaaaccgtaataccgcagccaaaaccgctgacggcttccgctctttcaactccaacaccaccaaaaccatcgcggagattaacgccgccgcgaaggaactctgggctaaacactaa

SEQ ID NO: 195067 - DNA, 198 bp, Klebsiella oxytoca
atgaatatgcacgctaatttcggtcaactttccgtggcgctaaaagcaaaaatgccaacggccaacgaacttttttccatcgtaaagcaggttgaagatgaaatggctggcaagccgctcaatgccgaaacagcctacaccttcgtagaagaggtaaaaaagcgagtggctgatctaattgttattgaaattgactga

SEQ ID NO: 195068 - DNA, 810 bp, Klebsiella oxytoca
atgaacctcgaatctatcgctaaatacttcgcgcctaaatcaccaatgctgagcgactccccacgagctacagcatctgatgctcttaccggaacagacattatggccgcccttggcctggttaatgctaagtgcggtttcggcttcgatctctacctggcgaagatcggagtaagcgcacctgaccgagcaatggagctcctctatgaatcagcagagagactatcaaaacgctttaacgttgtttcagacctcagcggcgatcgtcgcaaaagagttatcgaaattttatgcacttttgcataccaggattactcgcgcagtgcagccagtacgcgggtgtgcgaatgctgtagcggcgccgggtttgtggagtctcaggtattcacgaataaaatcacatacccatggggtaaggcaccatactgggcgaagatgtcccgcgctgttcgcccgagcgactgggagagctggaacagcgtacgtgaaacggtcaaggttaaatgcactccctgtaacggaaagggtgttgtcagcaattcgtgccgctgtcatgggaagggtaaggtgctggataaactggaaagcgagcgccagggcgtcccggtgatgaaggcgtgcgatcgctgcggtggtcgcgggtatgcaagactgaaattttctactgtcctggaaggcgtgagaaccgtcgctgatatcaaaaagacctcggcttatgagcaacttcagcctttcttcgaagcactggtagcggaatgccacaaacatgaggcttacgctgatgttgttctatcaaaagtcacaaaatga

SEQ ID NO: 195069 - DNA, 141 bp, Klebsiella oxytoca
atgaaccaggacgtaatcgaccgcatccgcgaacgctggcaaaagctccgcctctgccgacaccgcggaacggtgatgaccgactatcgcattttacggaattacgttcgcatctatcagacccagggagagacagcatga

SEQ ID NO: 195070 - DNA, 171 bp, Klebsiella oxytoca
atgtctactccactttcccgcgttatcagcaacgaaatcttccgcgtgccggcgcgccgccagcgcaaagtcgaagttaagccttccgacatcccgacactgaaaggctacaccgcccgtctggtcgataagaagtggctctgcctgagagcaaggaggcaacatgcttaa

SEQ ID NO: 195071 - DNA, 543 bp, Klebsiella oxytoca
atgattctcgaagatcagagcggtattggtatccgcgttggcttgcgggatatccgagtcgctatccgaatcggcatcgctgtcagaatccgagtcactgtcagaatcggaatcgctgtcagagtcagaatcgctgtcagagtcagaatcgctgtcagagtccgaatcgctgtcagagtccgagtcactgtcagagtcggagtcactgtcggaatccgagtcgctgtcggagtccgagtcactgtcagaatcggaatcgctgtcagcatccgagtcgctgtcagagtcggaatcgctgtcggaatcggagtcgctgtcagaatcggaatcgctgtcagagtccgagtcgctgtcagaatccgaatcactgtcagagtccgaatcgctgtcggagtcggagtccgagtcgctgtcagagtccgagtcgctgtccgaatccgagtcgctgtcagaatcggagtcgctgtcagaatcggaatcgctgtcggagtccgaatcactgtcagaatccgaatcgctgtccgaatccgagtcgctgtctga

SEQ ID NO: 195072 - DNA, 141 bp, Klebsiella oxytoca
atgaaccaggacgtaattgagcgcatccgggatcgctggcaaaagctccgcctctgccggcaccgcggaacggtgatgaccgactatcgcattttacggaattacgttcgcatctatcagaccctgggagagacagcatga

SEQ ID NO: 195073 - DNA, 693 bp, Klebsiella oxytoca
atgattaacacccaatacctccagtatgttcgccagcagctgatagtggccactgcagatcttagtggggcgacgaaagggcaactggtagcctttgcggaaaacgcgatgtttgaggcgacgtcgcgcagccgaggacgcaagaaggtttacgacccccaaaaaaagcgaatggtcaatcctgatagtcccccgatggccggtagccagtcgcgcgccaaaggttcggcaattgccctagtgctgcctgtcgagtattccacggcatcatggcgtcgggcgcttctgtcgctcgacgaccaccagaaggcatggttgctctggaactacagcgacaatatccgctgggagcaccaggagacgatcacccggtgggcgtgggagcaattcagccagcagttggccggcgtgcgcattgcaaagaaaacggtcgagcgtttgcgtcagcttatctggctggcttcccaggatgcgaaagcggtgctggcagggcgcgaccagtatcagtacggtgaccttgcggcgatggtggatgtagaggtgaaaaactggtccaagacgtttaccgcccattgggaggccatgctcgcggtgtttagtcagcttgatcgtgatgcattgctttccttaacaaaaacacgttcggaacaaaaatcgacattttcgcagcagagtattgcaaaagtagattaa

SEQ ID NO: 195074 - DNA, 603 bp, Klebsiella oxytoca
atggcaacaccggactgggaggccatcgaatcggcgtaccgggccgggatgatgtccctccgtgaaattgcagcgcaacacggcattagcgaaggcgccatccgtaagcgcgccaagcgtgacgactggtctcgtgacctcgcagcgaaggtaaaagagcgcgctgacgatttggtacgcaaagcagaggtacgcaaacaggtacgcactgaagcgaccttatcggaacgcgtactgatcgaggctacagctgaggtgatagcgacggtacgcatggagcaccgcggcgatattaagcgagcccgacagataaccaatgccctgtttgatgagctgggtgctgagtgcgccgacattgcttctctggagaagcttggagagctgatgtatgaccctgacgataaagggcaagacaagctgaacgagatttaccacaaggtgatcagcatgccggagagagtgaaatcagtgaaggcgttgagcgacgcactgaagaacctgataggactagagcgccaggcttacgacatcgacgggccggaaggcgacaactccgttaagcaactctctgacctgatggattccttgtctcagggggcgtaa

SEQ ID NO: 195075 - DNA, 204 bp, Klebsiella oxytoca
atgattactcactacatcgcttactacgaaggccttgatgaaaaaggcaacgtaattatgaatggcaacattgcagccgatgctgaaaacctgactgactctggggcattcatgaattacctcacggataagacccttactgatgcgcaggtcaatcagccaacagtcacacgcatagtactgaaaggcgtgttcaaactgtaa

SEQ ID NO: 195076 - DNA, 240 bp, Klebsiella oxytoca
atgaactacatgaccagaccaacgccaaggcgtgacaacggacttaggctgtttgagaaaaatggctgcattggtgtatgcactatggatgggaagccgattaacgggttgatttctgtaaaagctcactccgagcacggacaaataaccaaggcaactatcgaagttgaaatattcaatgctactggtgaactcgcatgtcacaccggtaatagagcatctaataaacccaaagagtaa

SEQ ID NO: 195077 - DNA, 363 bp, Klebsiella oxytoca
atgtcggcaaccgcgaattggtcatacaccgcgacggcgacaatctggcggcgcatacgcgatgctgacggtagtgataccgacggcggaggtcagccgtatggatgggaagcgccgatcgctatcctctgcgactaccagggcggactctctgcaaaaatcggtgaccttggccgggagatcgtggttaaaaacacgatatggagtgaatacgcagaggcaaaggagggtgattacatttttcttggtgtgtctctatctccaaacccacctgatgatgctgatgaaattcgtcaaataattcgttatgcggatacattcgagagactagccgatgattatgcgattatcaccggcgcgtga

SEQ ID NO: 195078 - DNA, 555 bp, Klebsiella oxytoca
atgaatacgtctttaaataaagaaccatctatagattatttccgcgagtgcttcacgtatgagtgcgatacaggagtaattaggtggcgcgagcggcctgagcatcatttcaagaccctgcgagaccaccgcgtatggaataatcgctatcccgggaggattgctggctctataggttcaaatggatatcgtcaaattaccattctcggattcccggttaaagctcatcgcatcgcctggatgctccatactggaaagttattaaatggatctgtcgatcacgttaatggagtcagagatgacaaccgcatatcaaacctacgcatagcaaccccagaggacaacgcgagaaacaagaagcaaggagcgcttaacaagagcgggtcgatgggcgtttattgggtcaaggccgacagaaagtggcgggttagaattggcgtcaatggtaagtacgtcagcgtaggagttttcagcaatttagaggatgcgctagaggccaggaaaactgctgagatcaaatatggctaccatgaaaaccatgggcgagcccaataa

SEQ ID NO: 195079 - DNA, 795 bp, Klebsiella oxytoca
atgaaacccacaaattcgtggttttttaatggcccacccaggtgggctttttcctctcccgcatccctgctaatctgtccaaaacaaaccaatggggatagggatatgaggggttttattgcgcttagtcttttgatggcctcaggcgtggctgtggctaatgaaaatcttgtttgtgagtatgcagtcggggatttttcttcacctccatctcttctcactaaaggcagcgcaaatgtgatattcaacggaaaatcttttacagcatataggccaggaggctcttatgtagtaagcccaccactgactgaaaagaaagatggtgtgattttcattgatgataaaacaaaggtatttgccgccagccaggacaaatctaactttgctgtatctgaccgaataaagaaaaccacggagcagtgggctaaatgcgaaatagataaggcatcggcactacaaaaaaaatctgaagatgaaatgaggatggttgagagtctctctggagcaaaagcaaagtcattttttatgaaagaaaagcacgcctttaccacaaactgcctagtgtgggaggatgttacaatgattactggccgttaccctgcaatgattatcgctggcagtgtaatgatgggtaagaatccacgatgggatggaagggaatattcctttaccttcaatggtggatcgatgatggctagatttgtaccaagtgaacctcgacacaaatttgtcattcaggctggtgataaattttatggctgtggtccatcagagatagatcataactatgaatga

SEQ ID NO: 195080 - DNA, 360 bp, Klebsiella oxytoca
atgtcagaaaaaccagtccgcgaatacgataaattcatgctccgcttccctgatggtatgcgtgatgccatagccgagagagccaagcgtaatggccgctccatgaactctgagatagtgcagatactccaggacacgctagagggtggctttacccttcagatggatacagagtttggtaaggtttacaacgatcttatctctacagaagtaaaaacatctgaagattttgataaaaacaatgaaagaatagactggttgatagatcagcttgtctggaaaatcgatactgacgcggcaaaactacgtgagcttatgaatttacgtaaaatagctaacgaatctaaaaaacccacctga

SEQ ID NO: 195081 - DNA, 171 bp, Klebsiella oxytoca
atggatactttatatacagaaagaaaaagctctagcttccaattgcgtttgccagaaggaatgaaggaagagatccgccgtatggctgaaatggatgggatatcgattaactctgcaattgtgcagcgtttggcaaaaagcctgcgtgaggagcgcatgaatggtcagtaa

SEQ ID NO: 195082 - DNA, 717 bp, Klebsiella oxytoca
atggtcagtaaaaacagcgaagccccattggcggcaacctttggggcttctatcgaaaataaccgcgaaggaaatatcgacatgaacattgtagctaaatcagatttcaacttccacggtgtaacgctcaatccggtagaaaatgtcactggtgtctggctgacatctgcagatattgcgaaagctctaggttacaaaatcaccaagtcaatttctaacctcttcgctcagtacgaagatgagttctctcagggaatgacaatggtcattgaatcagtgaccaatggaataaatggctctacccgcagaatgaaggttcgcgtcttctctttgcgcggcgcccatcttatagcaatgttcgcccgcactccggtcgctaaagagttccgccgctgggtgctggatattctggatcgcgaagtggttcattcgccgattgcgaagcagttcagtgatgatgagctttgctctctggcatggttatggcgagcaagtgacatcatgcttacagcttgtgagagtattactccattgctgaaggtggccgagcatcggcaggccgggcgctttcacacaatcggtcaggaattgccgcggacaatcaacaaggccagggcgctcattagccgcgagacagcgcatatcgagtttcacccatggaaggatgacaactggagcagggtattaccgcacctgcgtcaggagatgttgcaatga

SEQ ID NO: 195083 - DNA, 3441 bp, Klebsiella oxytoca
atggctggaacgtttgatgctggcagcgttatctacgaagtcgacatggatacttcgcgcttactggcagctcgccgggaagttgatgcggcgctggacggtcttaatgggagcatggggcgtctggaggccagtgttaaccgcactgaacgttccattggctctatggagcggacaatgtccagcctctctggcgttgctaaaggcttgctggccgcgctttctgtgcaacaggttgcgagttacgccgatgcctggactgaactgaataacaaagtcgctaactcggttcgtactggagagacgcaggccgaagttatgcagcggatctttgatgtttcacaagcaacccagtcatccctgaacggcacggcgactctttacgcccggcttgagcgcggaaccagaacatacaacaccagcgcagaagatttaacccgccttaccaccattatcaaccagggatttgcggtatccggcgcaactgctcaggaagctgagaacgcaatcattcagctatcacagggtatagcttccggcgttctgcgcggcgaagagtttaactcagtgtcagagcaaggcagccgcctcatggtcgctctggctgattcgatgggtgtttctattggtcagttaagggctatggccgctcaagggcaactgacaacagacgttgtagttaaggggcttctgtcacaaggggatgcaatcggcaaagaatttgccaacaccaccgtctcaatcgccaagggattgcaggtggccggtaacaacgtaacgaagttctttggcgaaaactcgacggttaaatcattcgcagcagggttccgagactctgttattacaataagcgaaaaccttgagacactggggacagctttaattggcgctgctgcaataatgggcggtaggtttgctggcgcgttagcaatggcaacagccgctcaagcctcaagagttaaagcaaccattcagggaatagttgcgacaaggcaatcggcacaacaggaagccgcagcagcatcagtgacagccagaaaagcagcggcagataaagatgctgctctttccgctctaaatgtggcaactgctgagtataacgtagcaaaaggctctgctgctgaagcctttgcgcttgagaacgttatacgactaagagggatttacgttgcaacatccgcagaagcggcattggctaataatgcactagcggcatcacaagcgaaagtggccgctacgggtataacttttgcaaacacaatgaaggtagtgaattcggttactgcccctttgggtgggcccattggcgtaatagccattgttgccgctggctggtatctgtattcacagcgacaggctgaggccagaaaagaggcaatagcttttgctgacaccgtacctgacgttattaagcgcctcaaggacatgaatcttgctcaagctcagggcgttagggctgatacggtcacctcaattgaggcgcaaaaggaagctattagcgatctgaaagataccatttcaggtctgcaatccgattacgagaaatatacaacgcttgcaaggcaatacggagttaccgaagatcaaaataatggtttcgtgattaaggcaaaggatgccgcaaacgagttggccaaaaagcgcagggatctggatggagcgacagccactcttaagcaaactgaagacgcattacacctaattaacattcaagttaatcagggcattgttgatcagatgagggctgccagagataacgctatcgctatcgctgaagcagaaaagcaagcgtcattcctcggtggaacccaggcattcctggctgaaaaactcggccaatcaacgcaggccctgaaagccttcaactcagaaagtctgaaaataaactggggcgggaaagaaggcgagaagttaattaagcaggctgagcgccgacttgccttgtcaaaattggagggggaagcaaaagccaggcagcaggcggcctatgatgctgaggatgcaggcgttacagatgagcgagcaatcaaaaggcttcaggataattatgctgcaacagagagaaacactcaggcaagaaaggatcaaaagaaggaagataatgctgcggcgtctgaggctaagaaacttgctaaccagcaggaatcggtaaaccaaaaacttgaaaatctgcgccagcaatcagaactcgctgctggctcaacgcaggagttaagccgggagcaggcagtattacaggctcagcaatcactaggtaagggagccacccaacagcaaattgctcttgccggtaaataccgtggagaaatatgggatacggctaatgccctcaaagcccaggctgcggcagaaaaactgctccctgaagccagagagaatgcgtcttaccagcaggatgttaaagatctgcaaactgcactggccgccaaaaaaatcactcagcagcagtacaatcagaccagtgagcaactggaggctcagcaccaggttaatctggctaagatacgcgctcagcaaactgtaagccccatgcaggaagctcgggggcagattgaccctgtccaacagctggctaatcagcatgctcaggagttggctctcatccagcagttcgaaacgcagaaggggcagataacccagcgcggtcttgaactgatgaatgccgctaacactcagtacgaacaacagcgcatagcggcgcagtgggagatatggaggcaacaaaacgcaggatatgaggtagctgctgcggcatttgattcatttgcaggaaacgcctctaataccctcactggcatactcactggcagtatgtctgtcagcgaagccatgagctcactcggatcaactgtcctaaacagcgttatcaactcctttgtccagatgggagttgagtggttgaagtctgtaattatggggcaggctggaatgaccgccgcttctggaatggctattgcgcaagggcaactaatagccgcatccatggctccggctgctgcaatgacctcccttgccacggctggcgctaacgctatccccgctcaggcaggaatagcttcaacagttggcatggcgcaggccctttcaatagccggcgctcgctacaacggcggcccggtatcagctggcggcctgtatcaggtcggcgagaaaggtaaaccagagatttaccaggccagcaccggcaagcagtacatgatccccggcgataacgggaaggtcatcagcaataaggatatgaatggtggccaggtccaggtaaacatccagttttatgaccagaccagtggtggccagcattcattccaggcgcaggccagccaggaaggtagcgtcgtgacagtagagggttttcttaccgatgttgatcgcaatggaccaatgtcctctgcaattcaaagcgcttttggtctcggaagaaaagcgcaaggtgcttactga

SEQ ID NO: 195084 - DNA, 558 bp, Klebsiella oxytoca; identical to SEQ ID NO: 120952

SEQ ID NO: 195085 - DNA, 582 bp, Klebsiella oxytoca; identical to SEQ ID NO: 19374

SEQ ID NO: 195086 - DNA, 339 bp, Klebsiella oxytoca
atgctggactggaacaactatcgctcagagttaatgcaacgtttaggcgagttgggcaaactgacccccgagaccatgaaaggcgtggttgccctgggcaacgcaggtaacaaaactgaccttttgggcgcaaaagtgcgtgaactcattgccctggcgtgcgcagtcacaacccgctgcgacggctgtattgcttttcacgccgacgccgctgtgaaagccggtgcaaccgacgctgaaattgctgaagcgctgggcgtggcgattaacctcaacgctggcgcggcggtcatttattcagcccgcactctggatgccgtcggtcaggcacgcggttaa

SEQ ID NO: 195087 - DNA, 330 bp, Klebsiella oxytoca
atgcgtacattaacagcttataacgaagataatttccgccagatagagcagtacaaaggaatatcggtggtacgtttctctgcaccctggtgtccgccctgtcaggccagcgaagaaatgttcagtcagtttgcagaccggctcgatggagatattcaggtggggaaagtcaatgtagatcaggcgccggtgctgacaaccaaatacgagatctgggggctgccgtctgtgctgatatttcatgaagggcaattagttaaacgcataccgggtgtgaaacctgcatcggtatatgctcaggctattgcggacataaaaaaagggcagtaa

SEQ ID NO: 195088 - DNA, 1107 bp, Klebsiella oxytoca
atgagtaagcttttcaccccctacaatctgtctggcctggcgttaaaaaaccgtgtagtcatggcaccgatgacccgcacccgcaccatgaatgacgtgccggatgaggtcgtggctttgtactatgcacagcgtgcttctgctggcctgctcatcaccgaagggatgccggtttcagaagaaggccggggttacctttatacccctggtatctacaacgacgaacacgtccagggctggcgtaaggtgacacaagcggttcacgccaaaggtggctgtattttcgcgcagctctggcacgtcggccgtatgtctcacgtctctcttcagccaggccacatagcgccggtttcagcgggcaccgttcaggcggtcaataccaccgtttttgcgctgaccgaatccggagaaccgggcccggttgtaccaagccagccacgcgcgctggaaacgcatgaagttaaacgcatcactgcagacttcgtgcactccgcacgcctggcgatggaagccggctttgacggcgtggaaatcatggcggcaaacggattcatctttgaccagttcctcagtagcgaactgaacacccgcaccgacgaatacggcggctcggtggaaaatcgtcagcgtttcctgctggagaccattgacgccgtggcggaagctgtgggtaacagccacgttgccgtgcgcctgtcaccgttcggccgcatttatgacctcgcgccgtatgaaggtgaagagcaaacctggtcagccatcaccgacgcgctcggtcagcgggaactggcctacgtacacctttactatcagccggtgtacaccaaagcgccacttccggaaggcttccgccgccgttttcgcaacacgtttaaaggcaccatcatcgctgccggcggttttacccgtgatatcgcagagcaggctctggaagatgatgagctggatctggtggcatttggtgtgccctacatcgctaacccggatctggttgaaagaatgcaaaacggctggccactggcagaaagtgaccgcgccacctactacggcgtcagtggttccccggaaaaaggctataccgattacccggtctggcaggcgcaataa

SEQ ID NO: 195089 - DNA, 702 bp, Klebsiella oxytoca
atgcaaacgctgaaacccacccttaccatcgatatctggtcagatttggtctgcccgtggtgctggattgctaaaaaaagatttgaacagggtctgaatcgctttgaatttcgcgaccaggtggtgatccgccatcacagctaccgtctggccggtggtactcccgcgatgccttttaaggatgccatcgttaaaaagctgggcagtcagcattcagcggagctgatgatgaatcaggtgggcaccgccggtaaatctgaaggtctgatctacaacttcgacggcatgatgtttggtgatacagaagatgcacacaccctgctggttgccgcgcgtaaggccggaattgcggacgcggtggaagaacgtttttatcatggcagtatcaccgaaggtcgctctctctttgaccgtcagcagctcgttgccatggccgtagaagccggtatgccgaaagctgacgctgaagccgccctggaaaatgacgattttcgcgccaccgtttccgacgatgaagcccacgcacagtctattggcctcagcggcgttccggtttttgtgatgaacgaaaaatatgccatcagcggggctcaggcagcagataactttttgaatgccctgcgtcaggtctgggatgaacagcaaaccgaattttcagccactgcgggtcagacctgcggaacggatggctgcagtatttaa

SEQ ID NO: 195090 - DNA, 774 bp, Klebsiella oxytoca
atgaacacttttttcaaaggtaaaaaactgctcgtcgtcggcggtaccagcggcatgggcctggccgtggcacgcatggtactggaagcgggcggcagtgtcgtgctgaccgggaataaaaaagacaaagccgaagcggtgcaaaaagaactgagccctctgggaccggttgcggtcatcgcggcgaacctgatgaccgaagaaggtatggaaactatccgtcaggaaattaatgctcaccatcgcgatatcagcctgatggtgaatgccgccggtatcttcatgcccaaaggatttaccgagcacagctttgccgattatgacatgtatctttcgctgaaccgagccacgttctttattacacaggatgtcgtgaagaacatgctcgccgcgaagctcgaagggtctatcgtcaacgtcggttcgattggtgctcaggctgcactgggtgactcgccggcctcggcctattcaatggcaaaagcgggtctgcatgccctgacgcgtaatctggcgattgagctggccagcgcgggtattcgtgtcaacgcggtgtctcccgggattgttcatacgccgatatacgaaggcttcatggacaaagcggatatcgcagatgctatgaagtcgctgaacgatttccacccgctgggacgcgtcggaactgccgaagatgtggcaaacactattctcttcctgttgtctgacaaaacctcatgggtgacgggcgctatctgggatgtcgatgcgggcatcatggcggtcagacgataa

SEQ ID NO: 195091 - DNA, 360 bp, Klebsiella oxytoca; identical to SEQ ID NO: 128579

SEQ ID NO: 195092 - DNA, 402 bp, Klebsiella oxytoca
  misc_feature (364)..(373): n is a, c, g, or t
atgagcattcaaaaaaaacagcattctaatgatgctgaaactcaggttagcctgcctattgaggggatgacctgtgcaagctgtgttggacgagtcgaagccgccttaacgaaagttgagggtgtggaaagcgtaagtgtaaatcttgcaactgagcgtgcagacattctcttgaatacacctgttgaacgtatggcgctaatcaaagcaattgaaaatgtgggttatgaggttcccctaacttctgttgaattgtcagtccagggcatgacgtgtgcatcgtgcgtagggcgtgtcgaaaaggcgcttagagctgttgaaggtgtaaaggatgcaacagttaatttagcgactgagagggccnnnnnnnnnngccactatacgtggagtagccggaactga

SEQ ID NO: 195093 - DNA, 465 bp, Klebsiella oxytoca; identical to SEQ ID NO: 82787

SEQ ID NO: 195094 - DNA, 453 bp, Klebsiella oxytoca; identical to SEQ ID NO: 82788

SEQ ID NO: 195095 - DNA, 2463 bp, Klebsiella oxytoca
atgagtggttccgtaaaaaacagcaaaactcaagtaagagaggaatctgctggttgttgtgaaaaaattaacttgatagtagggagcaaaatgcagcgttctgaagaaccggctaaggctcatggtcacgcacatgaccataaagattgcagcgctgagctctctcataaggagcatggtcatggaagtgacaaacatttacatcgcgagcaagggcatgtgaaaggtgggcatgcacatgaaggatgcagccatgaacatagtcatactgatgaagaacatgatcatggtgaggaagaacatagtcatggcgatcatcagcataaggggtgtaaccatgaccacgctcaggatgatcaggctgatgaacatcatggacatagcggtgactgctgctcaggtgcgccaacaaatttaagtaatctaggtggttctaaagttgtagctggtgggttacgaactgaaatacgtattatgcagatggattgccctgttgaggaaaatctcatcaaaaagaaactgggggcaatgacctctgttaaagagcttgatttcaacctgatgcagcgtgttctgactgtaacccatacacctgattcgcttgaacctatcttggttgcaattcgctccttgggattcgtacccgaagtttcggataacaatggtgaaaagaaaaacatccaggagaaaaaaaagccttggtggccgttagctctggctggtgtggctgcacttgcggctgaagttatgcactgggctgatatgcctgactggcttgaagcgggattagccttgatagccgttcttttgagtggtttgacaacctataagaaaggttggatttcaattcgcaatggtaacctgaatataaacgcactgatgagtattgccgttaccggggctttggttcttgggcagtggccagaagcagcgatggttatggttctatttaccatcgctgaactgattgaagcaaaatcactcgatagagctcgaaatgccattggttcactgatgagcctgacccctgaaaccgcaatggtccaacaaactgatggatcatggcaggaagttgatgccagcagcgtacaaccaggaagtattgtaagggtaaaaccaggcgaacgaattggtcttgacggtgagattgttaaaggtcaaacaacgattaatcaggctccaattactggtgaaagtttgcctgtcgataaaatggcgggtgactccgtgtttgccgggacaataaaccagtcaggttcttttgaatataaagtcactgcagctgccaataacaccacccttgctcgcatcattcatgctgttgagcaggcgcaaggcgccaaagcagctacacaacgttttgttgaccgcttttcccagatttacacgccagtcgttatggggatttcggttgctgttgctgtattgccaccattgtttggcgcaggtacatggcaagagtggatctataaagctctagtcatgcttgtcatcgcgtgtccatgtgcgctggttatttctacaccagtaacaattgtcagtggacttactgctgctgctcgtaaaggaattctcattaaaggcggtgtttaccttgagcagggacgtaaattaaaagctttggcgcttgataaaactgggacgattactcatgggaagccagtacaaactgatgtcatggttttcaatggggaaagtgagcttgaggttcgtacagttgcagcaagtcttgctagctactctgatcatcctgtctcacaggccgttgtgaatgcttctgttgatttgaaaaaacagagtgttgaaaactttgaggctattgtaggtcgaggtgtgcatggtgtgattgccggcaaagacttttatcttggtaatttgcgattggcagaagacctcctgagttgtccgttagaggttaaagctacagtacaaagtctggaaagcctaggtaaaacagttattttgctcaatgatggaaagcaagtgcttgggttatttgctgttgcagatactgtcaagaacacgagtcgcgaagcgattcaacaactccatcaccttggtgtcaagacagttatgttgactggggataacccgcatacagccaaagcaatagcatctcaggtcggtattgatgaagctcgtggtagtcagttacctgaggacaaacatcaagtagttcaagagtattcacgtattggtgttactggaatggttggtgatggcatcaatgatgcgccggcactggctgcggcagatataggttttgctatgggggcaatgggtactgatacggcaattgaaactgcagatgtggccttaatggatgatgacctgcgtaaaatccctgcctttgtaaaattgtcccgacagacgtatagcttactcgtgcaaaatatcagtctcgcattaggtattaaagctattttccttgtattaacgctcatgggaatggggactatgtga

SEQ ID NO: 195096 - DNA, 900 bp, Klebsiella oxytoca
atgtccagattcagtaaacagctgtgcaaacaactcgtcactcttgctcgtcaggggaggggaagttataaaacggtggctgaccgttcacgaattgcagaacggttttctgaacgtttgtctgaactgaatattcagatcagggacgtaaaacatattaaaacttcccatattgaaaagtatattgagagcaggaaggcagacaatttgtctctaaggacgttacagaatgagatgtctgctatccgttctgttttattatcagcaggaagaaataaactggccgatcccagtcacattaacctgagtaatcaggcgctcggtatttctggtgctaaccgggatggaactaaacttcctattacagacgaaaaacttaatgctgtggtcagttttgctcaaagaaaagatgaaggcgttgctcttgctgtgcaactttcccgatatctcggattgagaacagaagaaaccgtgcagtctgcaaagtctttaaagacatggaggcaggcactgattaataatcatgaacgtgttcgcgttgtatttgggacgaaaggtgggcggccgagagagacaacagttttcaatcgtgaaaaagttttatcaattcttgataaggcaattcattatgtcagtgaacataacggaaaactgattgataaaccttctctgcatactgcaatagatcgttaccgaaatattgtacgagaggcagggatgaatggtaaaaatgccccacatagtttgcgttacgcttattcacgtgatgctgtaaatcatcatattaaaaatggaatgagccgcgacgaagctgaagcattagtctctatggatttggggcatggagatggtcggggtcgttatattaaacaggtttattttcgtggagaggctgaataa

SEQ ID NO: 195097 - DNA, 360 bp, Klebsiella oxytoca; identical to SEQ ID NO: 129770

SEQ ID NO: 195098 - DNA, 366 bp, Klebsiella oxytoca
atgcacgcagacgtttgcacacttaagacacctctggacacgctcagctggctttgcctgcttgagagtgaacttctgagcatcagggcatttcagcgtctcgaccttcatacggagcgggatgaaccgaatgaactgacgtatctggaagatgccatcattaacgccggcacagcctatggctggtttgtctgttttctcagggacggtgatattccaccgttgccagcgactgcccgagaaattctctgcacccttgacagtctcggtaaagaaattaaccgtcctttctgggagaaggctgtggcccgcgggcaggatgaggcctgtggcgacaaagctatcgcagccctagaaatgatgtaa

SEQ ID NO: 195099 - DNA, 933 bp, Klebsiella oxytoca
atgtccgaatggtgtcataaccgcctggaaattaccggtaagcccgtctgtatcgatgtcatgctgcagtggataaacgggactgacgccccgcgtcaccgccacgccgtgcagcagagcatacagctttttctggccggtgcggcggggatacttaagccggtgcgcaccacgtcgtatccgccctttcaggggctggtccgtgcaggcacagggctttccactgcggctaaccaggcgtttgaaaactggctggcattgttgctgacggatgccgttcttgatgcggaaaccatccgggtcattgaccggctgtatcaccagtcaggcctgggggcgctgaaatgggaaaacatccccgtctcatcccgtgacgttatggcagaactgattatccggcaatacaccgactggtttggtctggtcagcgccggcgatgagtctgatgccgcggctgcctgggaacggctcagccagtatcctgagcgctcgcagccctgcgacatgctggccgtgataccctcccggctggctgcagagctgaacggtgccggtgggctgatgtccggtgtgtcgaccacaaccagcctctactgccggcagtacggcatggagtggccggccgggcacaatgtcagctggcagcggcatacgccaaacagtcttacgctgcagatggatacgccctggcttccgccgtcaggtgaggttgtcggggaaatctccgcggtgtttgactgcgaggtgcgtcacagctacagcgagcccgtaagcgggctcagcggttacgactgctatgacggcggtgaacatgtcgacgggcacaaaggcgcgtccggcgcacctcagcccggtcaggtgctttatctggtcagcgatgagcccgattcaccggctcaggacgctacatcatatcgtgaggtccgggggtaa

SEQ ID NO: 195100 - DNA, 318 bp, Klebsiella oxytoca; identical to SEQ ID NO: 156181

SEQ ID NO: 195101 - DNA, 981 bp, Klebsiella oxytoca; identical to SEQ ID NO: 82814

SEQ ID NO: 195102 - DNA, 1017 bp, Klebsiella oxytoca; identical to SEQ ID NO: 82799

SEQ ID NO: 195103 - DNA, 153 bp, Klebsiella oxytoca; identical to SEQ ID NO: 82800

SEQ ID NO: 195104 - DNA, 789 bp, Klebsiella oxytoca; identical to SEQ ID NO: 82808

SEQ ID NO: 195105 - DNA, 1743 bp, Klebsiella oxytoca
atgagaattttctctctaatattttctgtttttataattgagctcgtatcattttactttaacatatcagggggccctacggctgtaatgagtgctatcgttgtatcacaaagttttgtcggcgctcaatatttaaaagctcgtaataggataatcggcactatcctgggaataatggcatcatttatatcagcttacctttatgtcggtaatgaactatatttcatcgttttttccatgctatggatatcattcatgagcgtgatgataagtttggttccaacagataactcgcatttatttcagttaggtgcaaacacatatgcatttgttgcactgccattaattttatcccctgaagaaacatactttaaccttattacaagaagtactggtgtatttatgggagtggtaatcttagttgtaacatcagtgctgatgcttctaaagagaagtgattatgatttcaaaaaaaatatgcgtggcatattcaggaaaacaatcagaataaacaagaaagttgcggaagcaaataatattgaaaggaaagaaattaaaaatttgttcactgatatttccacattaatctcaaataagagaaatattgtatatgaacacggtttgggttttaaatctaaaggcgcccttaaaaccttctccattttatccatgatgcttttcttatattcaaacacactccgtcattatctaaaaaatgaaggagagaagcttgctgatataaaaagtgattttttaaacattatcaaaaaatcacttatgtgcagggctgatataaataaattcgaccacagcaagataaaaatatcgaatatattccttgaacacaaatcagcccttgaagcagtaatacgtggcatccgagcattcactataacaggtattcttttaattacatggtatattaccggttggtctggtggtcatgtgatggtatcactgggagttgtgtatatgatcttacttacaacttatcctgcaccggtagctggcggcaagcatatggtttatggaacaatcttaggcatgattgtaggatggatttatattcaaacaatctacagttctcaatatacgttcatatcaccctcaattttctttatagctcaactcccagtgctaataatcggtagtagatttctatttgttggtaaaacatttcttctcggagtaacatttctgacaacattttactttgggcttcagccgagcaatacctctgttgtgtcctatgaaacatttatggataatagccttggagcaactgtaggtttaatcattactggacttgggatctctataatttttcctgagaaaaaacgcattaaaaatgaaaagttaattaaggccacaatcaaagagttagtctatgctctgaaaaagaaaaacttaaacatgtcaaatgtagtaaggcatacacatgacagattacgtctctcagattccctggaaaagtgtacttctgacgactttttagttttaacaaatctttcatctttatttattatattccattatatttttgaatacaaaaagaacagtgagttcattaccattattgataaacaattaaacaagtggcttgaaactaatatgtttatgatggaaaatgaaacattagatgatcttgaagaacttatcagcaacgaaactggcgaagttcacaaattatcaatgtgtgcttatagcatccttttagagctgaaggatatttatgaaaaataa

SEQ ID NO: 195106 - DNA, 585 bp, Klebsiella oxytoca
atggataaacttgccaaaacatatcaccgaaaaaatggattatctggcacagttttgagcaatgaggaggtcagcaatgctggttttgattattatattgctaagtcagactatcaggaatcaattcataagagtcggcgtgacgaactcaacctgtctaagactaaaatttttgctcccactgatggatatataacaaatttgttagttcatactggcgactacatcgctaacggtaaaagcattgtttctatagttaaagacaacagcttctatgtatacgcatattttcaagaagatcaacttaatcgcataaagaaaggacaaaaaactgtagttactcttttaaatgataaaattagatttaatggaagcgtagaaagcatttctaaagggattcttgattatagtaacaagggctctcaaggcgaactacatgaggtcaacccaacttttgaatgggtacggctacctatgcgtattcccgtaagaatcgcaattccttctaatcaagataattatgatcttcttgtatctggtatgacttgcactgtaactatatctgaaaaccatgaaaaactttga

SEQ ID NO: 195107 - DNA, 3210 bp, Klebsiella oxytoca
atgttaaatattattcccggatattgcacgctttgtcgttcccgctgcgggacgttgaatgaggtgattgaggaccacctcattaaggtaaggcctaaccctgaacatcctaatggtaaggctatgtgtatgaagggtaaagcggcacctgagttagtagacagcgcaaatcgaattctgcacccgatgaagagaactcatcctaaaggcgcagaaaatccgggctggcaacgcataagttgggaagaggctatgtcaaccatagccgggcaactgaaaaaatttaaaaatgagaatggggcggaatctgtcgctttcggttttactagcccaagcggtacaccccttagtgatgcaattgaatggttagaacgttttgttcgtatctatggcagcccaaacaccagctatgggacggagatatgtaattggcacaaagacgttgctcatcgttggacctttggttgtggcatccctgttgctgactattcacatgccgaacttattattctttgggggcataatccagccaatacatggctagcgcaggctaatgcgatagggactggtcggaataatggcgcaaagctgattgttattgatccgcgtccgacacctttagcaaaagaggcaaatgcttggcttaatgtatgtccgggaactgatggtgcattagctttgggattaagccatcttttggttgaaaggcatatgtttaaccaggaattcgttcgtgactggactaatggtcctttactgattagaaatgataatggctattttcttcgtgaaatagatattaacccatttgccaccagcaatcgctacgtggtttgggacgaacacatccagcaagtaatatttatcgattccgaaacccgtacagaagaaactcttacacctacagctgcacttgaaggcgatgttgaagtcacattagctgatggcggtaaaatatcctgccataccgcattttcctcttttaaaaatatactggctaattattcaccagaaaatgtaagccgtattactgggatatctgttgcttcaattgaagctgctgcaagtatgattggcaatgctaagaaaattgcatatcacagttggtctggagtagcacagcatactaacgcaacccaaacagaacgtgctattgcgacactgtatgctttaaccggttgtttcgatcaggaaggatgtaatcgaatctatgccagccacccggtaaatgtggttaattcaccgacattgatgcctaaaacgcaatgggaaaaggcattaggtcttgaagaaaggcctatcggcccgccttcacagggttgggttcattctcaggatatctggcattcagtattagaaggaacgccctacaaaattcgcggcttaattggctttggtgccaacatattactttcacaaagtgatacttccctcggacaacaggcacttgaggcgcttgagttttatgctcatgtagatttgtttgaaacacctacatcaaagtatgctgatatccttttgccagtaaacaccgcttgggagcgtgaaggcctaagagccgggtttgaaagtagcgctgctgctcaggagcacattcagttgagaaaacaaatggtttctccgcgtggtgaaagtcgttcagatcttgagattgttttcgaccttgcatgtcggttaggaatgaatgaagcattttttgatggtaatattgaatctgcttggaattatcaattgaagccactcggtttgactgttgagatgctcaggaataagcctgaaggttacgacataccacttgagcataaagtcaggaagtacgccttaaaagatcaaaagaccgggtatctgacaggttttaatacggaaacaaaacgtgcagagttttactctgaggtacttcatcggcacggttataatcctttacctgaatacgtacaacctcaggaatatcagcgtaatgatcctgatttccccttaatgctgacatcagttaaaagtggttttttctgccatagccaacatcgcagcctaacaagtttaagaaaaaaagcatcttatccaacggtagagatatcggttactcttgctgatgaagaaaaaattaagacaggtgattgggttgaaattgagactcgggtaggtcaggctcgtttcagagctaaggtggaagaaaaattatctcacgaaacagttattgctgaatttggatggtggcagggttgtcctgattttggaaaaccatcatatcctgttataggtgaatttagcagtaattttaatagcctaatcagtggggatagttatgatcctgtaagtggtgcactgccactccgttcgttcagatgccgtattcgtaggctgaatgaatttgaattagtaagacgtccatgggacggacgtagaactttccaagttataagtttgaagaaagaaactgataatgttacaaccgtgacttttcaatctaaagctgagggttttttaccggattatgaaccaggccagcatgtaacaataagctgttacccactgatcgattctgaagatatcgtaactagagcgtattcgttaacaggcccagcatttgtagacgctcgtaaaacttattctatttctgtaaggcaccagacagcgagagatgagaatggggagtttgttgaaggaataatgtcatcctttattaacactcgtttgcaagtaggcagttttgttgaaataactccacctggaggcaacttcatcgtcccacttaacgcaatgcaacctgtcgtgatttttgctggtggtattggtattacaccatttatctgttatctggagtctattgatcctgatgaaactggccctgaaatatggcttttctatgccaatcaaaatagtaagcaacatgcgtttaagaaaagaatacaggagttaagtagcttaattagcaggctaaaagtaataaatgtttataatcagccactagattgtgatgtcctgggagaagattacgatcgagcaggatttgctggagcgggagacgttgatgcccatctaattgaaaataatgctcgttattacatgtgcggcccaatgccaatgatggaggcgatatcgaagggccttcagcaaagaggtgttccagcatttgcaattttttatgagatatttcgttctccagcaaaaatcaatgatgatccttctctacgccataaagggctttgttga

SEQ ID NO: 195108 - DNA, 576 bp, Klebsiella oxytoca; identical to SEQ ID NO: 82810

SEQ ID NO: 195109 - DNA, 264 bp, Klebsiella oxytoca; identical to SEQ ID NO: 82816

SEQ ID NO: 195110 - DNA, 942 bp, Klebsiella oxytoca; identical to SEQ ID NO: 128586

SEQ ID NO: 195111 - DNA, 435 bp, Klebsiella oxytoca
atgaacatcgaaacagtaaacgagctcattcagtcgcttgagagtgcgggcgagctgtcgatcagagagcagaagttcctgaagctggcgaaagcgtaccagcagctggctgcggagaatgtggggctgattcgcagcgctgaatgcctattgcatgaagcaagtgaggtgtatcgggcgtacaacaaaacacagttgccagacggtgatctggttgacggccaatcattgcaggaagtgtgggacgccatcaacgcaacccccgccaccgacgcctacctggccgggattaaggctgatggggttgaggagtttgtcgaaaagtgccgtgagaagtctgcgcaggctatttcttcagatatcagggaaaactggcggcttgctggcgagcacgctgacgactacgccaagcagctgcgcgagggggccaaatga

SEQ ID NO: 195112 - DNA, 1005 bp, Klebsiella oxytoca
atggaaaacattgcgctcattggtatcgatctgggtaaaaactctttccatattcattgccaggatcgtcgcgggaaggctgtttaccgtaaaaaatttacccggccaaagttgatcgaatttttggcgacatgccccgctacaaccatcgcaatggaagcctgtggcggttctcactttatggcacgcaagttggaagagttggggcattccccaaagctgatatcaccacaatttgtccgcccgttcgttaaaagcaataaaaacgactttgtcgacgccgaagctatttgtgaagctgcatcgcgtccgtctatgcgttttgtgcagcccagaacggaatctcagcaggcaatgcgggctctgcatcgtgtccgtgaatccctggttcaggataaggtaaaaacaaccaatcaaatgcatgcttttctgctggaatttggcattagcgttccccgaggagctgccgttattagccgactgagtacccttcttgaggataatagtttgcctctttacctcagccagttattgctgaaattacaacagcattatcactatcttgttgagcagattaaagatttggaatcccagttgaaacgaaagttggacgaagatgaggttggacagcgcttgctgagcattccctgcgtcggaacactgacagcgagtactatttcaactgagattggcgacgggaagcagtacgccagcagccgtgactttgcggcggcaacagggcttgtacctcggcagtacagcacgggaggtaggacgacattgctgggaattagtaagcgaggtaataaaaagatccgaactttgttggttcaatgtgccagggtattcatacaaaaactggaacaccagtctggcaaattggccgattgggtcagggatttactgtgccggaaaagcaactttgtcgtcacttgtgctctggcaaacaagctggccagaatagcctgggccctaacggcacgacagcaaacttatgtagcataa

SEQ ID NO: 195113 - DNA, 981 bp, Klebsiella oxytoca
atgagccatcaactcaccttcgccgatagtgaattcagcactaagcgccgtcagacccgaaaagagattttcctctcccgcatggagcagattctgccatggcagaatatgaccgctgtcatcgagccgttttatcccaaggcgggcaatggccgacggccctatccgctggagaccatgctgcgtattcactgcatgcagcattggtacaacctgagcgacggtgccatggaagatgccctgtacgaaatcgcctccatgcgcctgtttgcccgattatccctggatagcgccctgccggatcgcaccaccatcatgaatttccgccacctgctcgagcagcatcaactggcccgtcaattgttcaagaccatcaatcgctggctggccgaagcaggcgtcattatgacccaaggcactttggtggatgccaccatcattgaggcacccagctctaccaagaacaaagagcagcaacgcgatccggagatgcatcagaccaagaaaggcaatcagtggcactttggcatgaaggcccacattggtgtcgatgccaagagtggcctgacccacagcctagtcaccaccgcggccaacgagcatgacctcaatcagctgggtaatctgcttcatggagaggagcaatttgtctcagccgatgccggctaccaaggagcgccacagcgcgaggagctggccgaggtggatgtggactggctgatcgccgagcgtcccggcaaggtaaaaaccttgaagcagcatccgcgcaagaacaaaacggccatcaacatcgaatacatgaaagccagcatccgtgccagggtggagcacccgtttcgcatcatcaagcggcagttcggcttcgtgaaagccagatacaaggggctgctgaaaaacgataaccaactggcgatgttattcaccctggccaacctgtttcgggtggaccaaatgatacgtcagtgggagagatctcagtaa

SEQ ID NO: 195114 - DNA, 981 bp, Klebsiella oxytoca; identical to SEQ ID NO: 82814

SEQ ID NO: 195115 - DNA, 924 bp, Klebsiella oxytoca
gtggcaaagcaaaagttcaaaatcaccaactggcccacctacaataaagccctcatcaaccgtggctccataactttctggctggatgatgaagctattcaggcctggtatgagtcagcaacaccttcttcacgaggcagacctcagcgctattctgaccttgccatcactactgtgctggtcattaaacgcgtattcaggctgaccctgcgggctgcgcagggctttattgattccattttttctctgatgaacgttccgctacgctgcccggattacagctgtgtcagcaggcgggcaaagtcggttaatgtcagtttcaaaacgcccacccggggtgaaatcgcacacctggtaattgattccaccgggctgaaggtcttcggtgaaggcgagtggaaagtcaaaaagcatggccaggaacgccgccgtatctggcgtaagctgcatctcgccgttgacagtaaaacacatgaaatcatctgcgctgacctgtcgctgaacaacgttacggactcagaggccttccccgggttaatccggcaaacccaccggaaaatcaggtcagccgccgccgatggcgcttacgatacccggctatgtcacgatgaactgcggcgtaagaaaatcagcgcgcttatccctccccgaaaaggtgcgggttactggcccggtgaatatgcagaccgtaaccgtgcagtggctaatcagcgaatgaccgggagtaatgcgcggtggaaatggacaacagattacaaccgtcgctcgatagcggaaacggcgatgtaccgggtaaaacagctgttcgggggttcactgacgctgcgtgactacgatggtcaggttgcggaggctatggccctggtacgagcgctgaacaaaatgacgaaagcaggtatacctgaaagcgtgcgtattgcctga

SEQ ID NO: 195116 - DNA, 156 bp, Klebsiella oxytoca
atggtcagtgaatccgcaggtgatgtgatagcagctgcgacctatattatttccgccaatatgactgtgcatcagttagcaaacatttggtcgcctgagtttaccatgacggagtcactgaagaatgttgcaaaaacttcccctataactaactga

SEQ ID NO: 195117 - DNA, 252 bp, Klebsiella oxytoca
atgaccagcaaattaaccaaaaaagagcaagcctgggttgatgaagtaaacgcggtgctggcccgctgcccgtcaccgcagaaaatcggctttttcactatcggcgatgcgcaaattggcctgtacgacctccgccacgataaagatatttccgacactaacgacgatttaatcgtcgtcgcgcagcacaacggctggctgtttgatgagtgtttagaatttccgtcagcggttaacggggtgtgcggataa

SEQ ID NO: 195118 - DNA, 447 bp, Klebsiella oxytoca; identical to SEQ ID NO: 103901

SEQ ID NO: 195119 - DNA, 588 bp, Klebsiella oxytoca; identical to SEQ ID NO: 143599

SEQ ID NO: 195120 - DNA, 1359 bp, Klebsiella oxytoca; identical to SEQ ID NO: 143598

SEQ ID NO: 195121 - DNA, 699 bp, Klebsiella oxytoca
atggataagactagagactttattcttggagggctttctcgctatggcttggctgatttgcccggcagaccttacgattctgcttttgaattaatagcctccccacctatacgcaaacgcctcattgtgatgggcttcaatggttcgtcggctgattcccatatgaccaacagccagtctattattcaggatcattcaaagcctcttgtctcgaatgtccatttagggacgcaaggggaatggggaattactcacctagctaagcgactacaacagctacctatcagcctcggttacagatgggaagacgtagtatttacgaatgctctaatgatgtgctcaaccaatgcctcagcactcaaacaggaagcgagtcgacacaaactaactgtccaacaactcgtaaaatactcaacaagattttttgagaatgtcacaatccctctgtgtaagcctgaactaattatcgcttatagcaacagtctacaatccctttcagcagcaaatattttgctaaaacacttcggtgatccaagcactctcatctatacgcagcaaaagggttattacacaactttcgctttctcagccgtactaaatgatgtgaaaatccctgtaatatgtgtccgtcatatgtctagatttaaaccttcagaagaattaattgaaacagctctagagatgatgaagggactttag

SEQ ID NO: 195122 - DNA, 327 bp, Klebsiella oxytoca
gtgggttttccatcgccagcagcagactataccgaagggcgactgacagcagataagctttgtggaaccggtcctaatacacgaatcgtacaaaccgcatcaggttatgctgtcgttgatatctctgttaaaccaaagcagcaggacacggttttgattcactatatcggccagaccgactttgcaaaaataatgggtcaagcattcattacgcgggatggtgaggcgatcgaaggcgaggcgttagatgatgttgttgtaatgggggttgtgacgttcgtcatcaataatgcactctcaaatgacgacgaatgtccggttttataa

SEQ ID NO: 195123 - DNA, 612 bp, Klebsiella oxytoca
atggatatagctgtcgtaatgcctattattgtcagtctttctgctgggttactagcgctttactcctctctaagcacaaaagaaatagaattaaagttgaaaaaatttgaagagataagtctaaatattaccttaatgctcgaaggtttcagaatgtatctagactctatccatttcgaccttgaaaacctaaaaaaatctaatatccaagaaattgattccaaactactagcaaatatactgggtgacgaaagcaataaacagcatctaccaagcagacaggaagttcaaaagacaatcgttctattaaagttgatgaacaatagtggtgcggtcaaagccattaattttttagctgcctttgaagacctcagacaaaaaattgtaggtttcgaagacaagcaagggaagcccaaaacaactttacgtgatatagagaaccacttagtaaaaataaatgaactcgttaaatcaaacacgtccataaaaaatgaaattttaaccaagttccagtctgagtaccaaaaacaattatccttttcaaaaaaacctttaattatatcattgtctttaataacaacaatgataatattcatcattttaaaaaattag

SEQ ID NO: 195124 - DNA, 294 bp, Klebsiella oxytoca
atgaaaggaacggcttcacatgatgtcgaatggttattcaggcagatatttgattatttgacagaaaaacagaccacagctgggtatcggctaagtaagattgagaaggtggttttagattcacttatcaaagataatggcataatctgttacgacgagctagacgaggagtttcttgccatacaggcgcaagttaatgcagttgatggcgatcctgatcagttagcgcttaaagagttgcttctacgttacgcaatgcttctatggttcgaatttaaaccttatagattgtag

SEQ ID NO: 195125 - DNA, 528 bp, Klebsiella oxytoca
gtgacccggcctgatgaggtctgcaccgttcgtaccgatcttgattttatggctgctgaccgcggggcggtttttgctgattacaatatgcccgccagcctgcaggcgatgagcggggtttataatgccgggcaagccattgtctgccttgacaatgattctgtggctgagtatgtgaactttatgaaccgtcgcatcagtaacagcatcaccaatcagaacctgactgcagcagctaaaattgtcggtagttcagagataaccctggaagttaaacgtttagggcaagtgagaaacggccatcagtcctttatcagttcattcatcaacggcgatatgcgtgtatttgacggcattaacagatacagcggaacgccattggtctcaactcagctgaaccgcttaatgattgggcgggccagaacgacccctggcgctgtttcaaacacttatctcaagcgcctggtttattacccggtcacgttagctgatgctgatttggtgtctcaatttaatgcgctttcgtaa

SEQ ID NO: 195126 - DNA, 273 bp, Klebsiella oxytoca
atgggttttggtgctcagatatgggatggtgacgggaagagttggattgacgtagtacaacctagttgggtattggatatacgttcgaaaattcatggggatggagtcataaaatatgcaataaatacatcactatttaaattaaatgtggtcgttgtaagtgactgtaatggcgagtatatacaaaagacggagtattctattaatggaggggagataacctattctgcagcaagtgagtcaacgtttattgtgttcatggaggcaagataa

SEQ ID NO: 195127 - DNA, 630 bp, Klebsiella oxytoca
atggcgttcgggctagagataagggatagtagtgggaggatttttgccacgccggaaaccccctgtatgcatttcattaaaaagatgtattttaatgctaataaaggtttgagtacatttgaacttggtgtttcatctgagattcatgttgcatgttatttacgcataaatagaatggtagaaatacattcaagacagattccagagaatggttcatggatcatgagcttgcgtgccaagtcacaagttgatggtttcttttatatatttacaagtgaaatacctcctgattctgaactcgtaggtattgaaatgtataatgaaaacggagctcgagttttttcaactgctgcaaagcccttgcaaaataaaacagtagtgatggataaagattcaatgcgaaaagtgaagctaagtcatcctgcggcaactattgctattcctcaaatttattggtggcgtaaatttggtaatgttggcatcttaaacttagaaacaccatgtgcatatgataatgtcattgaactcggaaatatgggggcagggcttacaggctcatggagacatgatttaccttatttgcccaatggtaatgtggtgaattatataaactcggctctttatgactaa

SEQ ID NO: 195128 - DNA, 261 bp, Klebsiella oxytoca
atgtttggcagcgatgttcatgtcgccagaattagcaaccacctgccctttgttgtttgtcaggttaccagaaaggttaatgttagcatctcccgactgagagataatacgtccagaagtattgttgacattttttgcggtaatatccagattcttaccggcgattacaccgccttcctggttgatgtaaccgaaatattgtcctgcataagctccaaacatgttactagaactaacattaatgtcgccttccgcctttaa

SEQ ID NO: 195129 - DNA, 873 bp, Klebsiella oxytoca
atgcaagttatatcaatcatttcaactaaaggcggtgagggtaaatctactcacgcggctaacctttctggatttctggccgacgctggcctaaagaccttgctgatagatggcgactacgcgcagcctacggcatctagctactattctctgcgctatgaagcgccctgtggtctgtatgaacttctgatgcagactgtcgatctgaactctctagaacaaattatttcccataccagcgtaagcaatctggacttgatcgtctctaacgatccccacgaacagcttaaaacctcaatgatgcatgcgccggatgggcggatccgcctacgtaatttgctccagcacccgctgtttaatgcttatgatgtcgtggtgatcgattcacagggcgctcgctctattatgctggagctggtattactggcgaccaaccatacggcgttagccatgataaagccggtggtgccggacgttcgggagtttctgcgcggcacgatcccgctgctggaggggctactgccatatcgggggttcggtattgtattgccgccggtaaaggtgctggttaactgtatggactacaccaccttggcaaaagacgcgctggaagcgctcagtaacatcattgccgaaggatcttacagcagcgcagatatttccgttagcctgctcgatacccatatttacgatctggacgtctacaaaaccgggcacagtctggggcagcctgctcaccgccttgaataccacaccgatcgcaaaagcctgcctgccgcacgcacgatgcatgatttagcctgcgagcttttccctgaatgggcggaacggtttgactcagtacttcaggttcagccaaaaggggataaatga

SEQ ID NO: 195130 - DNA, 387 bp, Klebsiella oxytoca
atgatgcgccaatcttatctccctctttttcgtgcatgttgtctttgtacctatcccgaccccgcattaaggacagacgagagcatcgtgttctttgaggctgaagatcgcgtgcgggcatctaaaaaaatagttcgtctgttggcggatctatggggatgtagagagtcatttgtcgaagtctggaatcttgaagacgagcatgagctggtactgtcgagctttaacgtcagtgtgccaaggtactggatgatgcttgaaattggttccgggccatccgggccggtctatgttgacgtgaagcgcgatggctatccgcttttgttggtatctccccgcaagttacaacagttgtatcaggcgttgggggaggtaccccatgaataa

SEQ ID NO: 195131 - DNA, 1368 bp, Klebsiella oxytoca
atgaataatgcccagcgccttttaccccctcattctatcgagtctgaacaatctgttctcggcggcctgatgctggataacgatcgttgggatgatatcgcgacgatcgtttccgccgataatttttacgtccgcccgcatcaactcatttttaacgccatgcataacctgctgatgcaggggaagcccgtcgatctgattacgcttagcgaacatctcgaacagcagggcgttttggaacaggtgggtggcttcgcctatctggccgaaatgtcgaagaacacgccttccacagcgaatatcgttgcgtatgcggagtacgttgccagctatggtcgtcagcgccagcttttagcgttggggcacgatattgttggtcaggcaggggatgtgcgcaccgacgtggcaatgctgattgataatatcgaacagcgtctgtttgcgatagccgagcagcatgaacagggaggcgtagccgatctgccggaggcttacggccagtttctcgataagctggaacaacgttgtcagagccagacgtcagtaacgggaacgcctaccggatttcaggatcttgatgaagtaaccagcggtctccagcccggggatctggttttactggcagggcgtccgtcaatggggaaaaccgcgcttgggttagcgctatgcgaagccgcacttaacgtaaacgctgggccggtgcaggttttcagtctggaaatgccggtcgatcagcttctggcgcgctttaccgcaatgctggggcgcgttccgcttcagcatattcgcagtggagatctgtccgaaaatgaatggggacgtataagcagtgcggcaagctgcctgctgtcatggaaagatcgactactgattgatgacagcagttatttaaagccgactatgctccgttcccgggttcgcaagtcggtgcgccagttcggacaccctgcgctgattctggttgattatcttcagcttatgcgcagccccgggcaggaaaatcgcacgcttgagatagccgagatctcccgggcgctgaagtcgctggcgaaagaaatgcgctgcccggtcatggcgctgtcgcagttaaaccgcgacttggaaaaacgcgccaacaagcggcccaacaacggcgacctgcgtgattctggtgcgctggagcaggacgccgacctgattatgtttgtttatcgggacgaagtgtatgacccgcaaacgatggataaaggcgtggcggaaatcatcatcggtaagcagcgtaacgggccggtaggcacggtaaaagtacgctatcaggccgatattacccgttttgaagacttcccttccggttcttacagcttgggttacgggagggccgctgaatga

SEQ ID NO: 195132 - DNA, 1194 bp, Klebsiella oxytoca
atgaaaagcagcaatatgaaggcggcgttgctgaaacggggaagggaaccggctgcggttgggaacatcgccgtattgccggtcgctgaaatgccaatggtgctgatgctggagcagttgcgtccaaacccggataacccacgcacaacccgcaatcctaaatacgaagagattaagtcatctatccatgcccgtggactggactcagttccgaaggtgaccaaaaatcctgacagcgccgaagacgtttatatattcagcgatggcgggaatacccgctacgctattttgtccgagctgtatcaggaaaccggtgacgaacgttttcgccgcattcagtgcatattcaagccatggccgggacgtctgaaatgcgttatcggccatctggcggaaaacgagatgcgcggcgatctctcgtttatcgaaaaggcgctgggcgttgctaaagcgcgctccatttatgaagagcagtttgaacgcaaagtcacccagcaagagcttgcggacctcctgaccggagagggctatcgggttacgcagtctaatatcagccgcatggaatatgcggttacgcaccttttccctcacttatcttcgctgttctatatggggctgagtcggacgcaggtactcccgttaatcaatctctacagcgcggcggaaaagggctggaaggtgctgtgtcaggaaagcgctgtactcccgttagccccatcgtttgaggtggtttttgccaatgcctgtagcaggctggagctgacgactcttaccgattactcgctggagtacctgaaagatgagttaatgggtgaactggtgaaagcgctgcccgatcccacgatcgcctgggaccgttggctgattgagttggatccggcggagcagcagcgtcggcagctttttggcagccctgaacaaacttatgcgcccgagcccgagaggtcgccagagcacgcgccacggattgcgttaccgccagcctcgccagctaaatcacgcgggccgcagccacctcccgcaacggcggaaaataaggatcccgctacaccggaggtactggatgacggagggcaggggcgttctcccgatcttcaccctgctgctggcgtcgagttgcagccggacatgtttggcggtgagcccgttttgtccggtgaagcctttacagaggcgtcaccgggggggggctga

SEQ ID NO: 195133 - DNA, 501 bp, Klebsiella oxytoca
gtgagcccgttttgtccggtgaagcctttacagaggcgtcaccgggggggggctgagccgtcaggcgcatttcaaaccagcgtcagctccattgcttttgccgctgccgggctggaaccggtagcggatatctggcatatcccgtcattgcaggacgatattgaacatctacaggatatggcgtttcggctggcgttcgagcttgccgaagcgctggagatcggcaaactggtaattgaggataaatcgcccttgggttccggctttcgcattatcgacgagcctatgtacagcgcccattcgggcaggcagcttctttccctcttttcttacgacagcgccgcgctggcggcatccgcattctctatgctggtcgtgggaacgcctgaagtgggtggcgaacctctgctgggcgatatcgcggtcgtgaaatatttccgcctgatacggatcctgcgccgcttacgtgaattacagcggctgaccgggggaggtgaataa

SEQ ID NO: 195134 - DNA, 585 bp, Klebsiella oxytoca
atgacgtgggagggaaaaaccatgattgcaggcatagcgaccaacaccctgttgacacagctgataatggaactgaagtccggcagtatccgccgctgcgaggcgctgggtatgaccatggaagagattcaggcgttgaaccggctcagcatcgaggatttgcattacctgatcagcacgccagtatctattctgactgtgtgcatcaaccacgctaatctcaaaatgctgatggaacaggcgcggcgggaacggcagcgcgcgcagcggatcgatcgcgcgctggcgctgggcggttctattgaactgatgcagcgctacttcggcttaacacctgcggaagtcagcacccgacgccgtttaagcggcatcgaaacccggcaggggcgttgccataaccctacggaagaagaagagctggccgtctgggaacagtggaaagccgcacagattagcaatttggcttcgctggaggcgcttgatgagatgatgttgattgcggaacagcatgacatttccctcacggtcatctggacgttggcgaaaagctggatggaactctctccgtcagtggggagggaatag

SEQ ID NO: 195135 - DNA, 1137 bp, Klebsiella oxytoca
gtgaatgagcaaagtggcttaatctttatggggaacgtgcatgacgccgttccccggcggctttttctggatagccgtctttccgcactggataagatggcatgggtcatgatccgtttatatgcgcaaagtaatgaaggagccgtctttcccacctatgacgagctacagcttcagcttgcctctccccatgcgggaaaggcgtcgcgggaaacggtaagccgcgcgttattaatgctgcggcttaccggctggctaagcctgtgtaagcgcgtgcgcgacgcttccggacgcattcgcggcaatatctacgcccagcacgatgagccgctcagtgcgcatgatgctgaggttttcgacccgggctggctggatgccgtagaagaggcctgccgacacggcaaccggacggtccgcctgacggcgctggcggttcttcagtcgctaaaatccgatagcgcaatgcgtcaccgtcattcgcgggtcgccataattgaagcgcgtctttcgggctatcagtcacctcaggcgatggcaaactctcgccgtgagcaggatgaactgacgcatgcacaaaaccgaactcagtcagaatcacccggttcggaaaccgaactcagtacccaaatgggggaaaataaaccgagttcggatcccgaactaagccgaaaaacaaggcgttgcgacccagttcggaaaccgaaccgttacgtaatacgtacttctacacagagtgtagaaaaagatacgtataccacgcctgcgcacgacccggtgcagcggctgcgttggccgaccgatcttttggcgacgatccccaccgcagagcgggatgctctggagccgcagcttctggcgctgcctgagcaactgggccaagagctgctgagcgatgtgggaaaacgcctgcaaagtggcgaagtgcgcaacgcggcggcctacctgattggcacgctgaagcgggcgaagcagggacagtttaatcgtctgctaaaggggaatgagactccgatggttcctgagccaactagagccgagtcggcttcatcctttgccgctgagcgagccggaagggccagccctgacgcagtcgctggcgtgatggcgaagctgagggagatgtatattcagcgataa

SEQ ID NO: 195136 - DNA, 966 bp, Klebsiella oxytoca
atgtcaaaatctaatgataagtccataaaaataatgtcgcttctggagcagggagtaaaacttaaagatgcaaaaaaatcacttatttctgatgaacaagagtggtatcgagtaagtaaaaaaatctatgatcttcatatttccaaagaaaaaaaagaaagaaaatcattagaaaaagaatcaaatgtaatatttacgaaaaacgatgatgcagaggcaattatagagttaaacaatcaactatccgaatatgctcttgccttgccaaataaagcaaccatgacagattttcgtcagcttaaaaaaatagctgaaagtaaccctgtagatgaaaaagcactaattaagataattgaaagtattatcatgacgactaagtcaagagcccatatgcagaaaggacgctttgagcattatagtatatttaaaaatctatcgaatctcaccgaagcagcaacactctgttattacagaaaaaattatcaaagcgcattcctgacactggtccctgttattgaaggtgctctgttgcgatggattaattataatagtaatgagagtaagcctgaattcgacagtctgagaaaatttttcagaagcgggcatttaagacaaccctgccctggcaaccctttattctacgatattttttcaaaagtagccgacaagatcattaacgaacatttatacaaaccatcaaataggggtgatgcctattctaactttaacagacatcttgctgttcacttattaagtgataataccttcgccaccaaggataattgcgttcgcctatttttgttattagatattatgtcagaattatattattacgaaactcactgtcgtgacccactcttttatttagaagcgaaagatgttatgccaacaatagcactctatgaacaaattatattttcaaatctgttgggaaatacaccagaaaaaattttactctctcagtga

SEQ ID NO: 195137 - DNA, 723 bp, Klebsiella oxytoca
atgtcggaaaactcaaagcctcaacaccccacgccgggcgcgctgcgctccgaactgcgtatagaacttcatacccgctacgctatctccctatggcaaggccgtcgctcttcagagggcaagtcggccatcatggggatgccgcgcttcttccagcttgctggccgaatcaatcaggactccctgacggataacccttgggcggatgcgacgatgctgcatctggagaagctgatcggcgcatcgcatcagcaaatgcagacattgctggatgaagtcgatgcgctttttgctgacatgcccggctccgtcaagctaacggactgtatcgcggaaacgccgctcaacgtggcagtacacagccacacgccgattggctatcgctgcgtctatttgctggttggattcgatcagctggccctgcgggtgtttcaggcgcatttttttgggctcatcagcacccagactaagcaacaatatctctccagcgccggttatgcgatcaggagaatttacggggcggctcagcgctatcgctccgtcgccgtcacgcgcgccgacgtactggcgaataacgatacggcgcagcaagccattgctgcgttaggcgaagtgtcggcatccgttgtcagcggtcaggctcgatcgggcttttctccggccctgaattcacccgctttaactgttgcgatcggcggtaaaaaggggaaaaggcatggttaa

SEQ ID NO: 195138 - DNA, 453 bp, Klebsiella oxytoca
atgtctaatgaaactaattacttcaatctgcacgtaacgggtctgggttatttgaacaacgtcagagaagttcaaacccgcaacggcagtatgctgtgctgctcaattaatgcgttaactggcgcaacggataatccgggctacacccgttttgatattacggtcgtcggcaaggagtcctctgaactcattctgcgctgccagaaggctattgcagaggaaaagaaggtgttgcttggctttcggctcagcaatctttctgccgatgttttcacgctgacaaaaggtgaacacgccggtgaagttcgccccagtcttaaagcccggttaattaaggttaactggatcaagattgggtctgagatggtttataaagaagaaaaaccggaaccgagcgtgccctctgcaccggacgttccttccccgaaacagtttggtgataaccagttttaa

SEQ ID NO: 195139 - DNA, 570 bp, Klebsiella oxytoca
atgaaatatcaccggtatttgctctgcgtgataggggttattgcgattggcggctgcgcgccaaagcaaaagttacaacaaccagcgttatccctttccagtacgctaaacagcaacgttcagtctgcggcggatgatgtttaccagcgcgaaaacgcgccgcagatggtgcgctacgatcgctacctgctggttagtaccgatcccagcgccgcccagcgcgcgccgctggaacaaatcattgatatccgcattcccgcatcgctgacgccgaccgtagctgatgccatgcgctacgccttaaaacagtcgggttacagcctctgcgccgtcacttcatccaatgccgttctgtataaccagtctctcccagcggtgcattaccagctcggccctatgcggctgaacacggcgctacaggtcatggcgggtagcgcctggcaactggaagctgatgacgtacagcgtattgtctgccatagcctgagggacgggtaccaactgccgaaggctgaaacatcgccctctcgtttcctcacgaaaccaacgttgaaagggaacgcatcataa

SEQ ID NO: 195140 - DNA, 741 bp, Klebsiella oxytoca
atggaagaaaaaggggcaaaaagggcgggtaagccgtttcctctgcgcaaagcgggatgtctggcgatgttaatcgtattcggtgcgtcgtctgcctttttgtggacgcagcagctgcgcttgatgcagtcctccgctgcgttggagcagcagtggcagacgctaacgcagcaacaggcccagtttgaacaacgcattgccggggtggaaacgcgtcaacagcagacagaaccgccgaagccgttggttagcgcggtgactcaggagcagttaacgcaagcgctcgcggaaaatcggcaggaagtgaaccaacagcacgcccaattacagcagcaaatgacgtcggtaacgcagcgcgttgaggtgctggagcagcgcgacggggtgatgtccggccagtggctggaactgaagcaacagatggcctatcttctcgccgggcgtaagagtgcgcttgttccatcatcatcgtcagcggtagcaaatcccccgaaaaagccggttaagaaggcggctgccaaagtgacttcatccgcatccgcaccgtttgttttgaatggcgttgagtatcgaggcggggcgcgctttgtttccgttactccccgacaggccagcagtctggaacaggttcgcttactaactcccggcgagtcgtttagcggctggacgttgctgaccatcgactcccgtcaggccacctttcgcacggcgaggcgcacgctgacgctcagcgttcattaa

SEQ ID NO: 195141 - DNA, 723 bp, Klebsiella oxytoca
gtgaaacgatatctttttcccctgctgttcatcgcctcctctctccccgccagcgcggcggaaaccgacgcccaggcccgggcgcatagccagtcggtagatactgtggccggaaagcttgaacagatgaatacccgtaaaagcgcccagacatgggggctgaccgacgaggagtggcaacgctatcaggcgttaatgaatggacggcgcggcgtattctctcccgatctggacccgattacggcgctgggcattgaagccagaacggcggaagagcgccgccgctttgccgaactgtccgtccagcaggactttaagcgcgtggaggccgagctggcgtttcagcgggaggtcgacgcggcgtggaaacggctttacccccatattctgccgattggtgcaggtatgggcagcgcgccaactcagccccggagtcatggccgtctggcgctgtttgtcaaagcggactgcccgccctgtgataaaacgctgacgaagctgctcgccagccagaagccgtttgatatttatctggtcggtagcgaaggccaggacgcgaaggtacgtgagtgggcgagcaggcagcatattcccgctgaacgcgtaaaaacgcgggcgattacgctcaaccatgacgctggtcgctggttgaagttaggcaagggccaaatgcctgtggtgctggaacagggggaaaacggatggtcgcccgtcgcgttctga

SEQ ID NO: 195142 - DNA, 570 bp, Klebsiella oxytoca
atggtcgcccgtcgcgttctgatgttcctgctattgcttccgccgttggcttgcgcgcagtcgattccatccggctaccgtcagattgcggaacaggaaaacgtgcctgctgaagcgctgtactctctggcgttgaccgaatcggccaaaaagctggcccatggcgttcgcccgtggccgtggaccatcaatgttgccggaaccgggtatcgctatgccagccgtgatgaggcctatcaggcgttgctggggtttatccggcgctatcccctgaagcgaatagatgtgggtgtcgctcaggttaatctgggctggaacggcagccggttttcatcgtattggcacgcctttgacccctacaccaatctgcgcgtcgcggcgcggatcctacgtgaatgctacgacgcccaaccgggaagctggatgcaggccgccggttgttaccatcatcctgcgggcggcaagcctgcccgcgtctataaagcggttgttcaacgccatctgaatactctgaacccggtaaagcccacggcggtgagctgggtagagccgaagagaaaaacaccatga

SEQ ID NO: 195143 - DNA, 513 bp, Klebsiella oxytoca
atgaagagcatttaccttttgggactctgttgcctgtttggcaatgcgcacgccgggctgaacgttatcgctgatttgggcggtgaacctgccgcaccttattttgacggcattaacaatcagcccaatgaatttgaatcaccaaacccgccggaggcggctgtattgcccgctgcacccgcgtcactggcatcggtattgccaatatccacgcctgaattaacgcccggcagcgtagaggcccgtcgtctcgatttaccggggatgcagccgatatttttgctgggtaacgatccgatgtcccgtcgttggctcgatgaacgaaaggaatcgctgtggcaactgcgggtcgttgggctagtggtcaatatcgaggatgaagcggcgtttggcgagctgcaaacgctggccggtgatatcgagctgctgccggtatccggcagcgatctggcgaagcggctagggctgcaacactacccggtattgatcagcgaaaagggaattgagcaatga

SEQ ID NO: 195144 - DNA, 2100 bp, Klebsiella oxytoca
gtgagcgatcgctatgtgattgaagccctgctgcgaccggcggttgaactgaataccgccgtggtatccgcctgcgccagctatgtttgcgttaccgcgccgtgggcgattgctttagcgcccagcgtcagctacgtgatggccagcgcgctggggatattcgcgattaaacgcacccgcgaagggctgcgggtactgcgctatcgccgcaatatccggcgtttaccccgctacgtgatgaccagccgccaggtgccggtgagccagatgaagctgttcctggggaaaggttttttatgggagcaacggcacacgcagcgcctgctggatacgttacgcccggaagttgccagatatgtgaacccttcctgggtttatcaggcggcgcggtgcattgaacaacgtcaggaatatcgttttccgacactgtgccggttattagcaagcgagagcgcgtttaatccagtgaggcctctgccgccggtaggcggtttaccggcgctgcacggcattgaactgaaagaaaccaatgtgctgatggagctgcgtgagcgggtcggtcatttactggtattgggcaccacccgggtagggaagacgcgcatggcggagctgctgattactcaggatattcgccggggagacgtagtgatcgtgttcgaccccaaaggggatgctgacctgctgaaaaggatgtatgccgagtgtcagcgcgccgggcgcggcgatgagtttcacgtctttcatctgggctggccggatatctctgcgcgctacaatgctgtgggaaggttcggcagagtttcggaagtagcgagtagggtcgccgggcagctcagcgatgcggggaactccgccgcgtttaaagaatttgcatggcgctttgtcaatatcatcgcacgggcgctggtcgcgctgggacaacgtccggacttcgcgctgatccagcgctacgttaacaaccccggcgatctgtttgaacactattgcgaaagctggctgagccagcaccatcccgacctgtggttgacgatagaaaacctgacggcgacgctgacggagcgtgatgttccccgtcatatggaagggcgctccctgcgcgtggtggcgattgaacatgtgctgggtagcgacgccggaaagcgggtatatgacccggttctggacggactacgctcttcggtgcgctatgaccagaagtactacgacaaaattgtggcttcgttgctgccgctgctggaaaagctgacctccgggaagacggctcagcttatctcgccaaactacagcgacctgaacgacccacgcccgatatttgactggcagcaggttatcaggaaaaagggcgtggtgtacgtcggccttgatgcgctctccgatcctgaagtggctgcggcggtcggcaacagcatgtttgccgatttagtgtcggtggcgggctatatctataagttcggtataaatgacggcctgccgcagcagagcggcggcaacacgccgatcagcctccactgtgacgaattcagcgaattgatgggggatgagttcattcctctgattaataaagggggcggcgcggggatccagatcacggcctatacccaaacgttgtcggatatcgaggcaaaaatcggtaactccgccaaagcggcgcaggtggtgggtaacttcaatagcctggttatgctgcgggtccgccatacggaaaccgctgagctgctgacccgacagttgccggaagtggaggtgtataccaaaacgctggtttccggcgtgactgacatttctaatcccgatcagggcagcgacttcaccagtaacgttcaggacagggtcagcagcgtgcgaacgccgctgataacgcccgccaacgttatcaatttgccaaaaggacaggcgtttgcgctgcttgaaggtgggcggctgtggaaattgcgaatgccgcttccagctgttggtgatgatgcctttatgccggagagcatccgccaaatcgccggatatatgcaaaaaaactaccgcaccggggatgcgtggtggtcaggcggcgcgatgccgggcgaccgcatgacagaagaggcagaaagagaggaagaatga

SEQ ID NO: 195145 - DNA, 264 bp, Klebsiella oxytoca
atgaaacgttaccagatttgcgccgtgatggtctccgcgctggggcacccggccctgttacctgacgcggcaaagcagattttaatgcaccatgtctgcaccacgcccagggcagtagaaattattgcggcgttaaatgaagcgggaatagacgcctgtcgggaagaggatatgtgctcatctgatagcgttgggatttggatcaccgttgatacgcatacggtattgcttcagtgccagcttgaagtgctggaggtgcattga

SEQ ID NO: 195146 - DNA, 759 bp, Klebsiella oxytoca
atggcgcagcccggggcttcaactacagccccacgccagcaggaggttccccggcgtcctccggggctgttatcgaacgtgttctggcactggccctggcagttaattggcatgttactcgtgtcgctgatttttagcctgatcgttgagtatgtcggcattgcctttttctggcctgaagaaggtgccctgcacagcaaagcggtcatggagacagaaagccggtatttctccgaagagttcacccgcagcctgctgctgtctgacccggtggtgacggtagagtgctggctgacgcaggcgtatcagtggctgtttgtggacagcggttttctgggctggctgaatgcccaccgcgcagatcaaggcaacggctttacccggacgttaaacggttgcgcggcctggctgctggtgacgttacgggagtacctgttggcgacggtgtacgtgacgctggtttttcttattcgggttacgatcctggtgctgtccgtaccgctgtttgtgatggtggcagcaatcggcatcgtggacggtctggttcggcgcgatttgcgccgctacggtgcggcgtatgagagcagctttatctatcaccacgccaagcgctggattaaaccggcgacctgtttaccctgcgttatttacctgtcgatgccgtttgcggtatatcccaatattctgctgttgcctgcggcgctgttgctggggctggtgatttcggtgacgaccggggcgtttaagaagtatttgtga

SEQ ID NO: 195147 - DNA, 477 bp, Klebsiella oxytoca
atgtctggcaagtatacccctgagacattgctgcctgcattgaggctttttattgaggcaagaaacaaggctaatgccgctggcttccctgataacggcggcgctattcattcagtggaacgcatcattgatgttctttgtatccgcgttaaatatggacttacccatgttaataacttaaaaaagatgccgaccgcagaatgcagtatcggagcatacgaagcccgccaacgtggcgatgtacacctattgcgcattgaacatgtcatgccgcaacgcgcgtttgcaaaaaagataattgatattgttgaagagggggctaccgataaggaaatcattgctttcatcgaacagaactatcgactggtgcttttaaatactgaagaaaccagtatgttgaatcttaagaatagatctcaaatctcgccagaccggctgggtgaggcaggaatcgtcatgtatcagggctcggcctga

SEQ ID NO: 195148 - DNA, 795 bp, Klebsiella oxytoca
gtggggcttaatcttcagggatatcacgttactatcgatcactcgcatcgccattggctcattaccacgcctgaaggaaacccaacccgtgaacgggtgggaaacctcactatttattccatgttcagaaggcaaaaagcgcccgccagccttaaccgtgaccgtaaacaacgcaagctgggcgataattgtcccttgatttatgcattgaagggaaaagaggggctgacaacggatttttccagcataaaggcattaagccagagctttaacgccatactggaagccattgctcaggcagagcctgatggttacgacctgatcgtttctatgccatccgcccacaacattagccacattgtagggaaaagattctcacgctatttcaacgcgccgcattttaaagacctgctgcggaaaattacggttgaagaggcttttattcttctcgatcgggcggatattgatgtggctgacgtaaagtcacttcagtaccagctaagaagacaaaaaaatgaagtgggttatcagggcgctttttcactaaaaggtatcccaacagagcacagggccgttttcccgccactaacgatcaataccgctttagcgatgcatctcaacgcacacagaatattgattacggatgatctgctggcgaccggaacaacgctggaaaccgcagcgaatcttctggggacgctctgcccgggcgcatcggttcaggccgcctgtctgttcagttcaatgggtagactgactcgcggtaccctcaggaaaaggaagttcaagggctga

SEQ ID NO: 195149 - DNA, 279 bp, Klebsiella oxytoca
atgcgcatgacgaaagtccgggcgctttgtctgtcgggggccttattcaccgtgcttccctgtgcgcagggcagtgaaaaggatgaactggcgttagtcatgaaacagctagaccagcttcaggccagtctggagcgggcgaaggtcgtcgcagtacaggaacacacatcacaccgcttttattttgactacccgcaggccactgatgatatcgcgaaaatcaaacgcggcatctcaacctatcttgagccttcccgcgctcagccggtactgccgtag

SEQ ID NO: 195150 - DNA, 237 bp, Klebsiella oxytoca
atgacccacgaacaggagcaggcgtttcgcgcctcgaccaacaacgccgacccgaatctcctcaatctgctgtttatcggcacgctggtcgccgtgctgtttctgtgggccgcgtttgcttttgtcaccgtctatcgcggctgggaagcagggaacgtgtcggaaaagaccgtcctgtcgtttgtcattcgcgtcgtcgtcctgttggtggtcagcctgtttttatttgcaagttaa

SEQ ID NO: 195151 - DNA, 354 bp, Klebsiella oxytoca
atgaaagcactttttttacgcgtcaggacggcggtctataccgcactggttttagttatatcgtctccggcgctggccgatttgccgacggtcgaaggcccgaagtcgaaaaccgacggcacgttttatggaaagatcgccggttatatcaatgacggtctggtgctgggcgggttagtggtcgctggcgtagcctttatcgtggtggcggtaagctgcgtatccacgtttgccgaagtccgggacggcaaggcttcttggggcaagtttggtgccatggtagcggtgggggtagtactgattgtctccgtgatctggcttgccagcgaagccgccaccatcgtggccggataa

SEQ ID NO: 195152 - DNA, 372 bp, Klebsiella oxytoca
atggcgacgattcagtttatgcctgacaggctcaacgctgaaccggtcgtttttcgggggttcaccacccccgaattaggtttgaccgcattgttcagcacgctggcaggcatcgttatctccctgccgttcctgcttttctcctgggtcatgatcccgacgattgccctcattttgccgctgctggtgattgtcttcggcggcaaggtgctggcgcggatcaagcgcggcaaaccggaaaactacctttatcgccgccttgacgcggcgctcgttcagtgggggctgggcaatccccggcttattctggtgtcgcgccgctggtcgctgcggcggagcagggcggtgatacagctggaggtgaacctgtga

SEQ ID NO: 195153 - DNA, 654 bp, Klebsiella oxytoca
gtgagccgtttcaaaaatgcccttaacgcccgcgatgcgcatatctggacgctgcgcggagcctgcgttttgctgattctgatgtgcttggtgctggccctgggctggatgaacgcaccgcgcaatctcaccatccatcagccgccggacctacgcagcggcagcacccgcccctggtgggaagtgccgcccagcacggtatacgcgtttggcttctacgttttccaacagctgaacagttggccgaaggatggtgaacaggattatccggccagaattaagtctctttccccttacctgaccccggaatgccagacgtcactggaggacgacgcgcgcaagcgcaacttctccggcgaactgcgtgagcgggtgcgcggtatctatgaaatccccgggcgaggttaccgcggcgatcgggtggagattgtcgatcgcgaccattgggttatccggctcgacctcaccgccgatgagtattaccacaacgaaccggtcaagcgtgcgttagttcgctatccgctgaaggtggtgcgctgggacgtcaacccggagctgaacccgtttggtctggcactggactgttttgccgcgatgccgcagcgcctggaagccgccccggtcgatgtgcctgagaagaaggggatattttaa

SEQ ID NO: 195154 - DNA, 846 bp, Klebsiella oxytoca
atgaagcgactgttattaagcctcgcgctgctggctccctgcgtcgttcaggccgtggagctcatgaaatgggagcgcattccgctacctgtcccgctgaacgtcgggcaggagcggattgtgttcgttgataagaacgttcgggtgggcttccccgcgaccctgaacggcaagctgcacatccagagcagcggcggcgcggtctaccttcaggcgcaagaggcatttcccgtgacccgcttgcagttgcagaatctggaaaacggcgagctgatcttgctggacgtcagtgcccatgatggaaaaaccgcgctggagccagtcaggctggtttattccggggaagtcgcgacagcgagcgccagccataagggatcggtgtcagggcgtgatgccagcggtgaaagggacaacggcgcggctgggcaaggcgacgttaagctctccgcgcctttaccggtgctgttaacgcgctatgcggcgcagcatctgtacgccccgttgcgcacggtggaggccgtgcccggcatttcccccgtctcccttaagcctgccgtcatcacctctctgctgccctcggaacctgtccaaaccaaaacgctcgccgcatgggcagcaaacggatacagcgtggtcgccgtccggctgaaaaatcagagcgataagccggtggtgctcgaccctcgccgcttacaggggcgtttttacagcgccacgtttcaacaccgttggttaggtgcgcaggggacgccggaggacaccaccctgctgtatctggttttcacagggcggcctgaaaacgccttcttgcccaacgcgacgacggcgaaaaagggaggtcgatga

SEQ ID NO: 195155 - DNA, 1479 bp, Klebsiella oxytoca
atgcaggtgaagtcaaacacgctgttaaaggtggcggtgcccgcctgtctgtttatcgccattgccattggggtgaagtcctgcggttctcgttcacagcctgcggcgacgcagaccgatagcgtggtcgcggatctgacgcaggaagagctgaaggcattgggcgtggaaggagatacgcctcaggacacgctgcgcacgctggttggccggatgcggacgattcagaataagcaggccgaactggagcgagacaataaagcgctggcggaagagaacgccagactggcgcagggggagagtggtctggataaccgcatcagcgcggcggtggcgaaggcgcaaaaagaggcggaacaaaaggccgaaggggtaaaagaagagcagcgccagctgagcaaaaccctcgatgagctgaaggaaaaattgctgaacggcggcgcaagcggttcgtctgccgggacgaacggcgatttacccgttggtcttgggctgggagccggagacgagccgcccgtaccggccagcggcgagggcgtggtatggattgagccacaggatgcgatgcagatgaaccgtgatggcaaaatgacgctggccgacgtttccgcatcgggcaccggcggcgcgcttcagttccccagccgtttctccagtctggatgataacgagatcacccgccagaaggccgaactggcgcgtaacgcgaaaaatgagcgcagcatcgaggaggcggcgacgcctgtgtataccctgccggaaaactcaacgctggtaggcagtcaggccatgacggccttgctggggcgggtaccgattgacggtaaagtcaccgacccctacccgttcaaagtgctgatcggcaaagacaacctgacggcaaacggcatccagttgcctgacgtggaaggggcgattgtctcaggaacggcgaccggcgactggacgctctcctgcgtgcggggcgatgtgcaaagcatcaccttcgttttcagcgacggcacggttcgcaccgtccccagcccggccaaatcgaccgatggcagcgataacaaaaaccgcagcggtggcagcatcggctggctgtcggatgagcatggcgttccgtgtctggccggtgagcgtaaatccaatgcctccacctatttaccgaccctgtttgccctgtccggcgcgacggcagcggcggaagcgatggcggaaggagaaatgacctcctctacggaggggactgacgtaacccggacgttaacgggagacgccggaacctatgcgctgggtaaggcggtgtccggcgggatgcaggaaaccaccaactgggtacgccagcgctacggccagacgtttgacgccatctatgtgccgcccggcctgcgcgtggcggtacatattacccgccagttgccgattgactatgaagagcagggccgcagggtcaaatacaatgcggccgtcggcccgcagcagcatctggattaa

SEQ ID NO: 195156 - DNA, 399 bp, Klebsiella oxytoca
atgatgcccagaatatatttactgctggccgcgctatggctggccggatgcagtacgtcaaaagaggaattacttcctccgggagcctccaccatgctggatctgtggcagcaaaaaagtggttcgccgcagatggccgcagaggcgcgcgctgtactgcgccgcgacctgaatgacgtcgagcggaacgcgcagccggcagtagcggaaagctacagccgggatgccaacagcgagatccagcagcagtttccccgcctgcccaatcccgatctggtgatgtatgtcttcccgcatatgacggtaggcaacgtgccggtaccgggctacagcacggtgtttcctttctacagtcaggtgcagtacgccctgccgggtgaacgagtgggagcgctgtga

SEQ ID NO: 195157 - DNA, 2775 bp, Klebsiella oxytoca
atgtttagcctgtttacgcgtgaaaaggcggcggcacctgcgccgcagggcgaagagaatgcggtactcaaaccgtcgttgaggaaatcgggcaagctgaaagtctcggatgagcaggcgcgctaccatcgtgagccgtcattgattgactacttgccctgggttgaatacctgccgtccagccagagcattttgctggatgacggcgtgtcggtgggggcggtgttcgacgtgctgccggtcggttcggaagggcgcacggcggagcgcctggaagagatccgcgacgtcattgaagacgccattcaggacagctttgacgagcgggatacctgcccgtgggtgatccagtttttctgtcaggatgaaacggacgtcagcgcctatctggacaggctgcgcggttacatcaagccctgggcgcaggggagcgccttcaccgaggactacctgtgggagattgaacgccacatgcgcgggatcgccgtaccacaggggctgtttatcgataaaaccgtcaccggcgcgccgtggcgcggccagcagcggcgtacccgcatggtggtctatcgctatgtagaccccgcccagcgcgacccgtattcacccgaaacggcgctggatcaggtgtgcgagcggctggtttccgccctgaacggcgcgggcgtggtggcggaacgccagaatggggagcagctccacgcctggctgctgcgctggtttaaccccaacccgcagtgggtggaaaaggacgtgctctaccgcgccgctcgccatcatgacaacccacataacgcactgccgctgctgaccgacttcagcgaatccttatggtttaccccgccgcgctcggatgcggaaaacggcgtgtggtggtttgacgaacagcctcaccgggcggtaacaatcgatcgcctgcgtcgtcctcctgcggtggggcatctgaccggggagacccgcaagggtgacaacatcaatgccctgatggacctcatgcctgaaggcaccgtgatgtgtatgaccatcgtggtgcaggctcaggacgtgctggaagagcgtttcacccatctggcaaaaaacgcgattggcgaaaacgtggaatcagcccgggtgcgggaagatgcggccattgccaagtcgtttctgggggagcggcacaagctctatcacggcagcatgacgtttttgctgacggctccggacctgccgcagctccagtcgcgccagcgcgaactgaatgcggtgttgctgaacgccggtttacagcccacccggggcgaatatgaggttgcgccgctgaacgggtacctgcgcgccatgccgatgtgctttaacccggcccgggataagcaccactggtatacccgtttgacctttgtccagcatctggcgaacctgtcgccgctgttcgggcgggataccggcaccggcaacccgggattcaccttctttaatcgcggcggcgcaccgctcacgttcgatccgctgaacagcaatgaccgcaccaagaacgcccatatggcgattttcgggccgacgggttctggcaagtcggccacgctcaacagcctgttttcccagttgatggcgatccaccggccccggttgtttattgctgaagccgggaacagcttcggcctgtttgccgattactgcggcgagctggggctgacggtgaacaaaatcagcatcaagccgggctgcgggatttctctggccccgtttgctgatgcgcataagctgattgagcagccggtggccgccgtcagtgaaagcgagcttagcgacggcattgatattgacgacgttgacgacgaagaggacggtgacgaggagcgcgacattctgggggagctggagatcgccgcccgcctgatgatcaccggcggggaggagaaggaagaggccagactggaacgcgccgatcgcggcatgatgcgtgaggccattctggtagcggcgcaacaggcctgggacgaaggcaggcagatgatcaccggcgaccttcaggcggcgttttatcaatttgcccgtgaccccgtccgacccgccgaacgtcaggtacgcgcccagaacatgggggagtcgctcggcgtgtttatgcagggctttctgggtgagctgtttaatcgcccgggcgagaactggccggaagcggacgtgacgctgattgacctcggcacgctggcgcgcgaaggctatgaagcgccgctggcggtggcctatatttcgctggtgaacaccatcaataatctggcggaacgcgatcagttcgacgaccgcgaaatcgtgttcgccaccgatgaagcccatatgatcaccactaaccccttgctggctccctatgtggtgaaggtggtcaagatgtggcgaaagctgggggcatggctgtggctggcgacgcagaacctcgatgacttccccaatgcggcgaaaaagatgctcaacatgatcgagtggtggctgtgcctggtgatgccgccggaagaggtggagcagatagcgcgctttaaaaagctgacggaggagcagaaggccatgctgctgtcggccaacaaagcgaagcactgctataccgagggcgtggtgctcgccagccggattgaggcgctgtttcgcgccgtgccgcccagcctgtatctggcgctgggcatgacggagaaagaggagaaggcgcagcgcagggcgttgatgaatgaatacggtatcagcgagttgggggccgcgaagcgggttgcccggctgttggatgaattgcgggggatagtttgttag

SEQ ID NO: 195158 - DNA, 1389 bp, Klebsiella oxytoca
atgcaactatcactggatggggaaaaacagtttgcaaaactgtttatggagctggctcgagcatacaagctatgggtagacgatcataaagcttatttccaggagatggaaaaggacaacctgatagcgataaccattaatgcaccacataacatgcaggaggaaatgtctggaaaatataaaaggcaagaacattgtatttatcagttgcatcatacatcttgttcgttgagtataatgagagagttggcaatacttattcgtagaagcagtaatctgaactgtttgccctgcgagttgcatcctgtaatagaagctatagtctatgaatacgtcaatgttgaactggatagttttattgattgcgttgtgaaaaatggagagcattgcgatatcaagtttgatgttctaaagaaaatagctactgatagggttcgggtttttaaaaaggaattttcatcttcagtatatcaattcccagtgactatgtttaatttaagcggtgagctaaaactgagcgatagtattcgcttgttgcctgtagatacaatggacttggctgaagaagaattggctctatataaaaataccagaacatttgactacaattattatcttgaagtccatgtgaaaacacgatgtagcaaacagttagctttacaacaagccgaaaaagcaagggacgctacttataatatcttaaaactcttagctacgcgtttatcacctagggcaattcctctactcacgtctaaagatagaattacccatccatttgatttttaccgacatggaaaagatgaagataatataagcaatacaataaattataattttccagtttttcaatttgactccaaggaattttggctcgtctttcaccaaagcaaaaatgttgactcaagtattattggcatagtattcaagatagtggagttacttttacttccaaacttctccagtcagcgagttgtagagcgtctggaacgttctctattatggtatggggacgccgttactgagtctagcttctatcagcaggtacaaaaattagtaagttcgatggaggcattagttaattttcatgatgatgatactacggaaacatttaaaagaagagtaactcatttgaatattacccatgttggtcttgatgatgagattagaaataaagctaaccagctttatgatgctcgttcaaaaattgttcatggatcatctgttgatgaaaggtttgatttttgcattatcagtttttgctctgagactctactgagagcaatttattatttttctctttttggttttgaaaaaactggatttaataaaacgttacctaagtttttggacgaattaccaaaaagaactgtacttcggtgtgatgaatag

SEQ ID NO: 195159 - DNA, 126 bp, Klebsiella oxytoca
atgagacaggagtcagatatcgttcacctgaccatcatcagaacactcagcaaaacggcggcggccggagaaactgttttttctttcatagatgagcagatcctcgacatgaaaggccgcacgtaa

SEQ ID NO: 195160 - DNA, 1110 bp, Klebsiella oxytoca
gtgacgataatagcgagttataatatttatggctgtaaagtcctgcttgcagatacattgataacatctcaacaaagaaatgagagcaaaccaaccctgcccactctaggtaaaatagattccactagagttgatagtgatttttatattgctggcaatctgcaaaaaatacaaatcctgtctgattattgtgcagtcgcatatgcaggtaaagtttctttagcccatcagtttattacaaccttaagtgatatattaaaagaaaggactctgttaattagtgacatagaaaacacttataaagatattgatgggaatacagagctggccattatttatttatataataccgataatgaagaaataatctcaggtgggcttaactgcgtcaatgctctttcagatgttttgggtgaggttacatacagaggaagtggagagcaagctatcactgactatatagaatggttagacggccaagcttatatctctcctccttcagatgacgaagtggtcgcacaagcagttagtattaccatacaacaaatcgcacaactgcaaatggcagaaataaaaagcgaaaatatgccagaaagcataaaagattgtttcggttcaggttacgagatcgtgacgttttacgatggaaaatttaatagaattgatctcacatatgcatttattgaattgagttataataaagagactaaaaatgttgagataaaccatccatatttaatattatcacagtatattacgaacgattttttaattcatgaccgttatcagcaaaataattatgactgcgatgtggatagcaatcttgttgagtatcaatatgaccaaattataactcaatcactgttgaatttaaatgaagatattccggccattatcccgccagataaaattaataacttaaatttctgctgttttatatttcacgacaacttcaagcacggtactacaatgtggcaatcagcgataataagatcggacaccccgcccattaatattataaaataccatgagggtaatctttattatgtagattattccgaacaggcagaaaaacaattaattggatttgttagcaaaaattacttatga

SEQ ID NO: 195161 - DNA, 612 bp, Klebsiella oxytoca
atgttacgtagatatacgaatctcccatcgttactatgcatgctaacgaagaaacaacttacattgctagatcctgcgacttgggatgacaggaacgattcatactatctaagtctttatacaaaaaagagaagcgtaaaacgtacgttagctttatgcctatctgagaaaaatgaaacttatcaccactggagtatttttacatccagggaaagtggtgtctgtattatctttgatagagaaaaactagaaacacatttagatacacaaaaagatattatgcatggcccggtaaaatatatgatgctatctaaaatgcggaaaggtgatataaatattactgatttaccatttttaaaaagatatgcatttacggatgaatctgagtatcgaattatttatccatcacaccaagacattggcttcaagaatataagcattccgcttgacactattaaaaagatatcaattaatccatgggcaccagatgcattctttgaggttataaaagaaacaatcagaaaaattgatggctgtgaaaagattaaaattggaaaatcctcactgattgataataaagaatggcggcgaattggagataatatattatga

SEQ ID NO: 195162 - DNA, 1077 bp, Klebsiella oxytoca
atgattaataaaatagattcacacagaaaacatcctgatgtcactttggaacaacatgtaaaaaacaaacgaatacagcttgggagtgagatttcaggaaaatataaaatatatctcgaccttcgattctggatttttttcagagatgttgaacttggtataaatcatgatgaaaatttcatacaacttcttaatcagattaaaagtctagttgataacggcacggctatttgccccatatccgagactgtttttattgagcttatgaaacaaagtgatgagaaaacgagactggctactgcaaagttaattgatcgcctaagttttggtattacacttattgtgagtccagaaaggataatgcaagaattagctaacgctgtttattcaatgacaggtgttaaaaacgttatatcaatagataacttggtatggacaaaacttagctatgtattcggtgaaacacacccatatcaaaccgcctttgaaccagctgaggagttggttattcaaaaatcttttttcgattacatgggggatattactctcactaaaataatgggttatttaaatttcgatagttgggagcaattcaactggcagacgctggcaactcaacttaatttagataataaaaaacatgcagatgaaatccgaagctatcaacaagcatatcgtatcgagtttgaaggtggattaaacctgttcaatgaacaattgctacaattgtttaaagaagttagcaatgcaggacatgacccatttaacgttaataaagaaaagctatctgaccaacaacgatttaaaaaattttcaaagctagtgcgaacattgcatataagagcttgctgttattcagcagtaaggtgggaccaaaaacgccaacttacaggtaatgatcttctggatttccatcatgctgaagcagcgctaggatattgcaatttatttttgactgaaaaaccgttaaaaactttagttagtcagaatcatttaggattaatggatgattttccatgtgctgttgaatcatcagccattggagggctcagggttctaacctctagaaaagactaa

SEQ ID NO: 195163 - DNA, 840 bp, Klebsiella oxytoca
atggtcaaagaaatagaacaaaatacgcctgaagaaaaatgcgagttatgtggtaaatatgcagttctgagaaatagccatctaatgccaaaaagcttatataaggtaattactcgtacatttcatccttatgattcagcccccatatgggccagtaaaagtcaaaaatcgtcttactattcaaattctcaaattacaaaaaagctgctgtgtggtgtttgcgaggaccgttttaataaatacggtgaaaaatatgtagtagaaaaatgcatgaagaatcctcaaacattcgaattaaaaagggtactggatagctccacaccaagcattcatgtaaatgggttctcttatttcaaccccaaagacatattaaaatttaactccgaaaaattcatgtattttgctgccagtattgcctggagggtaaccgctacaaattggggcaacgatgacatcgccaatctaaataacgctctcccaaaagagttcaaggaatccttgcagaattatcttcttaaaaatgtagaattcccctcaaatatctatattacggtatgcgtagataacgatgtagaaccggtaccaataatgtctctgccttcaggtgatattgaaaagaatatgtgtatgtcattcttcatcccaggaattaaattcaatatatttttcggagcagaagccgatcaagagctctcatccagcctaaataaattggggattaatttaatctatatgtatcgttcattccgtagatccaatgaatatcaacagatgaagaaccttctgggttctgaactatcaccgaagggaaaactggcaaaacaaccaaataggtcataa

SEQ ID NO: 195164 - DNA, 1749 bp, Klebsiella oxytoca
atgacccaaccatccgacgaacaattacaaattatcaacgcgccactttcgccattatccgtgattgcatgtgctggcagcggtaaaacattcacagcggtacgtcgactggcacatatgcgccaacagttaggtgagcatcgtggtcgcattgctctactgtcgttttctaacgttgctgtagatacctttcgacaagaatacaaaaaattagtccaaaacgcgccctcaaatgccgcccataatcgagttgaaattgatacaattgactccttcattactggtaacgtactgcgtccccatgcatatcgaacaatgggtgctcagcagactgcattccttgtaatgggtggcgaagcgttcttgaatggtttcaaattccagacgaatacatacccacgcgaaataacaaaaatgcaggtaggtatagacagaaatggcatctatttcttctattccgaacacgaaaaaacacaaaaattggatacagcacaagcgacacgccttgtacatcgtcttggacagatcggcgcttacacgcataacctcgggcgttactggtgctatcgtactttggtagaacaaccaattattctaagcgccttagttcgtcgatatccacatatcttgattgatgaggcgcaggacataggtacagtccatcaggccatcattgagttactaattcgggcaggctgccagatctcattaatcggagacccaaatcagggcatctacgagttcgcgggcgctaatggagtatttctgactcaatacggtcagtggaagggggtcagcagtcttcaactcaccaaaaactttcgttctgttccaccgattctcgatttggctaatagtctttccaatcgaggagacactgctgatagaagtacacccgatacaatacatggagccttctttattccgtaccgcaatgcggagcgagaaagcctgattactgcattccagactgcggtattagctgctgatcttaaactcaaacgttcagcggtactctgccgtgcccgtagtatggctgacacactcgctggcaatgaaggagcaccaggccagggtacagttaaaaatcttgcacaggccgcaatattacgcgatcaaaatcaagactaccttaccgcattcaaactagtggccgccagtattgttggtctgcttgccaacccaccacaagggcttgtctcaaggatcactcaaccagctcgttatcctgatgaccgtgcgctacgacgaatcatatgggcatttactcgtaacccatcctctgggcttcctgcggcaacgttagctggggatacacagtggcatccactattactggaaaggactaaggttctactggcacgtatcgcacaagaccatggattggtaagtgccgacaacttgggcaacaaacttgctaaaagggggttgtctaatataccgctaatcactacagctgatcttgcgatgaaagacgaatcaccccgtattcgcatagatacagtccaccaagcgaagggggaaagccttgatgcagtcttgtatttgacgaatcgggaacatgtcggcgcactattggctggagtcgataccgaagttggacgtattggttatgtagctgtaacccgagctcgtaatcttctgtggcttggcgtgcccgccaatgcattgaaagaattgcgtcctgctttgattgctcgaggttttcaggaaatcgataggctgtcggtaccagtacaaagcagttaa

SEQ ID NO: 195165 - DNA, 1749 bp, Klebsiella oxytoca
atgtatttggcacaactgagaatttcgaatttcaggaaattggagaaagccgaacttaactttcaacctggactgaatgttctggtcggtcctaacaacgttggcaagaccgctgtaattgatgcattgcgtgcacttcttgcagggcatgatgagccgtatcctcgcctcgacaacgaggacatacaccgacctaaaggaggtgttcccaaaggcgatattgaattccaatacgtctttcgcgatttagatccagacaatgaagcagactttctggccgcgttaaaacctgacgcagttggaaaacttgaagctcacatcacaattcgttactcagaagccgataaaactggaaggctacgagctaagcgctggtgcggcgaccacgaagaaatagggttaaccacagacatgatggaaaaccttcgaggtgtctacctccccccgatgcgggatgcctcccaaggtctccgcccaagtcgcacaagccaactatctcgactatttcagcttctggccgacgatgctggacgggatggtatcaacgatgcactgaagaaacttgacgacgaattgaagaagcacaaacctatcattaacacttataccgcaatccagaaccgacacgggactatgcttggcccccaacttgctcaagccttggatctcggcttaagtggcagtgactttcaacggctagcagctcgtctgtcattaatagtggatgcttttgagattgagcaaaacggactcggtttcaacaacttgatcttcatggcagtagtactcagcgagctcgctaagaacccggaggcgagctatcgcagcctgatagtcgaagaaccagaggcgcatctgcatccacagcttcaggctgtactattagattatttaggaacgattaaagctgtcgaaggagaaaaacccgtccaattatttgtcaccagccattcacctaattttgccagtattgccgatctcgacagcatcgcctgcttggttgatacggggacgtctgtgaaaacattctttccacgcacaatttcctttgacaaaggaaagcgggaaaaactggaacgttacctcgatgtgacccgtgccgaactgttctttgctcgcagagcaatcttcgtcgagggcgcagctgagttaatgctggtcagcgtactggcagaaaaatgtggatatagattacgtgaacatggcgttagtctgatcagtgtcgaaggattgaattttgattcctttttaccacttttcggcgaaaacgcgctaaatatcccagtagcaattatcactgatgcagaccctgtcgatgagagcgatggtgtcgaagaaccacaggcggcctatccagcgctcggtgatgtagtgaaagtctcagacaataccgccaaaatgaagaaaagcgaggatgcctttctcaaagtctttcatggggttaaaactctcgaatacgatctagccctgcatgcagacaatcgtgcagcaatgttaattgcgctaaaggaattacatccgaaaataggtcaaaacgtctcggaagcagtaaatgcagcagaaggcgatacagccaaggctagagcccttttcagcggaatgtttgagcgttcacaaaacaacgtgcaaaaaggacgctttggtcaaacactcgcgcaagtgatttccagcggtgttgcttgtagcgtacctgattacatcaaaaatgccatagcccatgcctgccaaatcaaggagatagagctatga

SEQ ID NO: 195166 - DNA, 396 bp, Klebsiella oxytoca
atgcaacgactacccctcttcatggcatcactggtgctggccgggcaggcctgcgccgacgtggttttgtacaccgaccgccatcactctccgctagataacgacccgcaggtcacggtggtctggctggatgcgccggatacggtacagcagcagattttcggcaatctggcgcttgagcccgacaaagcggagcggcaggcaaaggcgttacctcagtcgccgaactgggcacgtcagcaggcgcggatcgtcgatgcctggcagggcgtactgaaggcctggcaactggacattcgcaaggtgcccgccgtggtgtttgacgatcgcgatgtggtgtacggcaccacggatattcagcgtgcggcacagttgcgcgcagggagcaggcgatga

SEQ ID NO: 195167 - DNA, 942 bp, Klebsiella oxytoca
atgaagcgccggtttgcttatccactggccgcgctgctgatggccggaagcaccataccagcattcgcctcgctgaccacgccccagctcgtcgccagcgccgcgtgcccggactgcattgactatcgggtggtgggcgtttgctactggctgttgtgtaccccgtttggttgcagcgtcaagacgtcggtaaaagtgcgtcactttatcccgcaggcggtggtgtcggcctatcaccagccgggcgataacccgtggcgcgaggtcgcgatgctgagcagcagcgcgttaggcgggcgggctgacggcggcggtgagaatcagcaaaagcgcggccagcgtaaagacaacctgcgctaccgcagcgtggacgcgatcggccatcccgccgccagccttatcggtcagcagacctccggctattcctgcaagggagccgccaccgcctggcagccgtatttcctgagcaatctggatgcgctgatatggcgcaccggtttgccggaaagtgtttacccggaggcgctcaccccggggcggcgggaaatcggcgcaaccactgccgggaacatgtggggcaacgtctatccccgttccggctttgtcacacagacggacgactataaggccgctgccgtgacggctcaacgtgcggcagacatcattacccgccccgggcagatccacgtttatcggacgctgaaggccaacgcttccgctggctactggccgcccgatccggtgacggaaaacaccggcacccgcaaccataagtggcagcgcctcgctccgaaggtgtccatgtcctgcgccgcgtttcccgaccgcgcgttttcctatgccgaagacggcaactatgcctgggcgctgtggcagccctttgcctgctgcaaaaagcgcggccagacgtttcttttcagcaccgatattggtggctattaa

SEQ ID NO: 195168 - DNA, 1422 bp, Klebsiella oxytoca
atgttcagaatgacgatgtttcaacgcatgtttctcgccagcctggtgctgtgcagcgcttcagccagcgcggtggatttaccggcgttttccatgaacagctcaggcaatgacaccagtcgtcaggtgcagggcggtattaacgacgatctctattacgccatcggcggcgggacggtggtgtccaacccgcccagcggcaaccggctgaataaaattggcatgggcgttggctggaatgccgacctgatgtgtggaaattttgacgtcaaaaccacggtaaaaaatcagctcaacggcctgaccagcggctttaaagacatgatgggggacgtgatcagcagtgcgaccggcgcggtcgccagcctgcccgcgatggttatccagcgcgccaatcccggcctgtacgagctgttaaccaacggcacgcttcaggccaacgcttactttgataaggcgcagttgaactgtcaggccatgtcgaagatgctggtggatcacaccctgtccgggccgtgggtgcaggccgccgttggggaggagtatcagaacgccctgagtgggacgagcgacgcggtgaaggccgatcagcaactgagcaaatcaacgggagccgagggcgtctcctgggtcggcggcaaaaagcgtggcggtaaagggcaggccgcgatccggccaacgcacgatattgccagggccgggtacaacatcctcaataagcaggcggcggacagcagcgcatccattagtgaaagcgcctgtaacggcgcgctgtgccgcaaatataaaaacggcgatgaagcggctcaggtggtcgccagcgtgttaggcgatcgctctattcgcacctgtaaatccggcaatgagtgcgccagcggcgggctggagaacgaacccggcaccacgacgccgggaaccggcttcacgccgatgctcgatgagacaacccagaagaattacgaggttctggtcgagctggtgaacggttcattgccggtcaatgcggctaatctggcgaagctgaaaaccggcgacctgacggtgacgcgcggcgttgttcaggcgctaaaggatgacccggacaacaccgctctggtgcaacgtctggcaagcgagctggcgatggcggacacggtggcgaccgcgttcggtatgcgccggatgttaaccgccgggcagtcggaacctcacgttgcggagcagcaggaagcgctgacggaagccgatcgccggctggagtttctggaccgggaaattgtggcactgaagaacgagatggagttacgcaagcagatcagcaacaacaccattgttacagcgctgtcgcgacagacgcagcgcggcctggagaacagcgcccgccagaaaaatcccgatgccgatgaagctgtgcagcagctgggtacggaggtgacgccatga

SEQ ID NO: 195169 - DNA, 342 bp, Klebsiella oxytoca
atgatggtttcccgaagaaagatgctctggtgcagcattcgcctaagcgggaaagtgttactggccatcgtcggttcgctcgctctggcgctagggatcggctggctgggcgttcgctatgccggaagcctgacggcgtttcgcgtctggctggatgatgccgccccctggctgctggtctggcgactggcgctgtatgcgctgatcgccgggctgtggtttcagcgggtacgccgccggttgcttcagcaaaccggcaaccttgccgccgttcgccgcatcgagtggttgatggcggggatgacgctcatggttgaactgaatatttacgcggggagctga

SEQ ID NO: 195170 - DNA, 1530 bp, Klebsiella oxytoca
atgagtgccgacagctatctggagtattttctcatcttactgggctggatcctgaataacgccatctggaaaacgctgctttcaaccggcctgtttgcgctgcccattgccggtaaagtggtggcgacctggttacgaacccgcgaagagggggacgatgagggcaataagggcacgctggcgctggtgcgcatcgagcacgttatttacgtggccttcgttgtgctgatgttttgcgtgacgccggtcgttaacgtggatgtcaacaccatcaagttcaacaaggagcgcagcgcccggtgtggcgtaaacatcccgctcccccagaagtcaggctatgccacgctgattaatgactttgacggcaaaacggccatggtgccggtgtggtggtacatgatccacagcctgtcaaaaggcgtaacgcacgcgacgatcgccagtattccctgcggtgataatctgcgtcagctacgtttcgacgtgcagcacacgcagataaaggatccgatcctgctggaagaggtgcaggacttcgctaatcagtgctatgcaaaagcctacttccggctgaagtcgaccaatgcccagctttcggatgcgaccattaattccgtcggctggattggttctgactactttctttcgacgtcagggtattacgactattacacctccaccaaaccgcgttcgcagtggccctacgatgcgaatcgggatgatggttatcccgacgtagggcgcggcggctaccctacctgtaagcagtggtggaacactctgaccgtcggtctgaagacgcgggtgatgagcagctacaatgacatcacgactcgcgcgctgaagaaaaagttcggcaacgaatgggaagagatcgcgctgcgctgggtggttagtccgaaaaatgcctcgctttccggcgatggtgaaacctatatgatggggaataacgcgtcggcgggtaccttcagctttgtatccagcgcgctggggagcctgggcgtcgctgccgggcaggtggtggcgttgcccggattcgatattctcaaatataccctgccgatggtgcaggcgctgctggaaatggcgctggtgattgtcattcctctggtactgatgttcagcgtctattcacccaaggctgtggtgacggtctcgttcgccatgtttgccctgatgttcctcacgttctggtgggagcttgcgggctggctggatgaccgactgatcgacattgtctacagcgggctggataacgtcgacggcgggaacccggtgccttttgctgactttgccggttcaacgacggacggctgggtgatgaacctggtgatggggacgatgtatctggtgtttccggcgttctggattggggcgctgagttgggcgggaattaaggtcggtggtgaagtagcggggtcgctgcaaaaaggcgcaggtaaggcgcaatcagcgggagaaaaagggggagaggttgcgtcagacgtcgccggagctgcgatgacaaagggaaaatcgatgatgaaataa

SEQ ID NO: 195171 - DNA, 300 bp, Klebsiella oxytoca
atgagcgaagaaaagtttaacccgcaggatattgaagagattctgtctcgcccgccgtcttccgacagccacaaagtcaagaaaagcgatattcccgaaatagccaaaagcataggcattggagccatagaaatcgccaaagcgcttccgattcttgcgttcggcgcgctatctatttccactacgcgcaccccgataacaaaagcaggctatcgggatggcccggaaggatatggctattatgatgaaacaggtctgaggaatcgtacttttgcccccagccaatcagacgataaataa

SEQ ID NO: 195172 - DNA, 252 bp, Klebsiella oxytoca
atggacttacaagactggcatccggcggacatcatcgccgggctcaaaaagaaaggaacatcacttgccgccgtttcacgcagcgcaggcctgtcgagctccacactggcaaacgcgctgctccgcccgtggccgaaaggcgagaagctgattgccgatgcgctgggcatctcaccggaaataatctggcccagccgttattttgatgaagccggaaatcccgttcatcgccacacgcgttcaaaactctga

SEQ ID NO: 195173 - DNA, 246 bp, Klebsiella oxytoca
atgtcatcaatatattcatctgaatatcaacttgttataaagagtcttcgcgagataagaataaagaaaggcattactcaggaaagactggctaaggcgttgaaacgcccacaatcttttgttgccaaggtggaaagtggcgaaagaaggttggatgtaattgagtttgcctatatcgcggggctgctggggatcgaacctgctccactgctacaaaagattctggtaaaggtcacgccgctttga

SEQ ID NO: 195174 - DNA, 456 bp, Klebsiella oxytoca
atgaaaggaacggtgaagtggtttagtcaggaaaagggatacggctttattaccgcagaaggtaatcaggattatttctttggcgtcagagatgttatcggtgctgttctgcccgccaccggctctcaggttacattcaccccttccaccggccccaaagggccaaaagcgattgaaatcaccatcctgtcgcgacctgagcacgccactcaggataacaaaatcaagtgtccccactgcgcccgccaaattattccccgcttaatcacctacaaaggcgaaccggagaagtccttatgccctttctgtggcggcactgtaaaagattttacaggcacatcaatactggatgatctcggcgatatattctggggaatgataagaaacattgccgttgccattatcgacaccgccacggccattgttatcgagatcaaaaaaagtaagaaaaaatag

SEQ ID NO: 195175 - DNA, 261 bp, Klebsiella oxytoca
atggaaaaaaacgactggcatccagcagatatcatcgccgggctaagaaagaagggaacatcgcttgccgcagtttcacgcagcgcaggcctgtcgagctccacactggcaaacgcgctgctccgcccctggccgaaaggcgaaaagcttattgccgatgcgctgggtatctcaccggaaataatttggcccagccgctattttgacagtgaaggcaagctactcacacgccagataagaggcaaacgaaccagcaaatag

SEQ ID NO: 195176 - DNA, 261 bp, Klebsiella oxytoca
atgattcctaaacgtttgaaggatgccagattacgcgctgggctaactcaggaaaagttaggtgtgatggctgggattgaagaggcaacggcatattcacgtttatcccattatgaaagcggaacgcacaagccttcgtttgaactggtttgcagctttgcaaaagtgctggatgtgccggaatgctatttttataccgttgatgataagtttgctgaagcggtgttggctctttatcagagctttaaaactgaatcgtag

SEQ ID NO: 195177 - DNA, 1188 bp, Klebsiella oxytoca
atgacagataacacaaccgaagaattaaaagaaatcttccagaaaattagtaagaaagtcgtcaagctaattccttacctgacaattttgtcaagcttaatggtatggagctatttaaataacatcggcagactagatttactgatagattccttttcaatcaatataggactagtatctttattgatatctgctgtagtattatctctcgcaatagccataacactcattctacccagctcgatactcatttttcactcctcgatgtttccgaatataattaacaaaccaatatctataccttggttaggttggggattttccactttattcttggcattgacatttcttccacacattccgtctatagaaaagataatatcaccaccttcagcattattaatctttattataatagcagtaatatcattcatcattttcataactatttcatgtcgcaatggtgattttaaaaacaaaggtatttttaaaatagctcaaaacatcggcaaagcgctaatagaaacattcactacagtattcgccacattatcaatcgctatccccattacatttttattaaaaaacagcacaggggagaaacccgaatcactgctaatagcgctggctttcatgattgcatttgctttatcatcttttcttcccgcaataatttattatcgcgatatgaaaaacacatcaaacaatgaaagaaaaagactcattccattagcaaaaaatttatcccttgcagtcattataacgataactatcacatcccttctattccctaatgtaacaactacattaatgaatagttctctttactctattggagtcattgacaataaaaatcattattttctaatagatggagaaaaatataaaccagatatgtttccgaaaaaaacatggagaacatcgaccacagaaaaaatcggaacaaacttctttatctatgggataagaatgttttctgccggaagtaaaaacttaatttgtcccgatagcgttggctcctttaaaacggacattaatggaacaaactatgatttaatcacttcttctgatagtaaagataatacaaaaaaactaaaagatatgaccaagagctgtgtcgtccttgacagtgataatgcacaacaatgggatacttttttcgaaaataacgatcaagacaaaggataa

SEQ ID NO: 195178 - DNA, 894 bp, Klebsiella oxytoca
atgtctaaattgagtaaaagtctgtcgacgttggcccggcaggccgggggcagttttaaaaccgtggctgacagaatgaaaatcgccgatcgcatggcggaaagaatgctgaatctgaatattcagatccgggacgtcaggcatattaaaacccatcacgttgagctgtatattcgcagccgtctggcggaaagcatttcaaagcgcacgttacagaatgaaatggcggcgctgcgggcgatatttaacgtagccggaaggtcgaaactggccgatcctacccatgagcgtttaagcaatagcgcgcttgggttatccggggccagtcgtgacggaacgaaggtggctatttccgacgaacgctatcaggccgtattttctgtaattaagagcaaagatgaaggcgtcgcagctgcggtacagcttgcccgctgcctgggattaagaacggaagaggccgtgcagtcagccaagtcattgcgtacctggcagcaggcgttattacgtggcgatgagcgcgtacgagttgtttttggcaccaaaggcggcagacccagagatacgacggttgtcgaccgtgagaaaacgcttctggccgtgaatcatgcgctgaaaatagcgatgaataataacggcaagctggtcgataagcccgatctccattccgccatcgagcgttatcggaatatcgttaaagatgcagggctaacgggaaaaacttctccgcatagcttgcgctatgcctattcccgtgaggcaacggaatatcatatgcggagaggttttagccaaaaagaagcagaagcgttggtttctatggatttgggccacggggacgggcgcgggcattatgtggcgcgggtttataataaaaccttagaagattatggctga

SEQ ID NO: 195179 - DNA, 360 bp, Klebsiella oxytoca
atggctaacgctgatactaacatgaacacgtattttgacccattaccccatgcagatattcattattctgacatggctggcgcgctggtaaacctgagcttttcagatatggaagcggatgagcgtctgctgctggctcactgctgcgatgagagccgcgccggactatgccactgtctggattttctgggcgatatgctggtgacattctcacagcaaggggtgaatgaatttactccggaaagcctttgccagcttgggcacaccctaacaacgttcggtcgacttattcctgcattaacggatatgtcgcagtttattcatgcggatcggcgccagcaggaagagttggctgcgtaa

SEQ ID NO: 195180 - DNA, 510 bp, Klebsiella oxytoca
atgaatatccataactttaaaaaaaagaatgcacgaaaaaaatggagaggaatgtattttaaagacatcatccttccgcttgccttagcgcttcttgggatattagggacattaggaggagtacttattacaaactaccagaattctgttaacgaaaaagaatctcgactttatgaataccaaactaaaataattgaacaaagaattattcttgttgacagagctgctaaaatttttggtaagtctccgggtttgcaagatatttgggagggacaccttgacatgataaaaaagggtaaggttgatcagttagttgttgataaattaactgatgctcaaggtgagtttcagagtattatatatctctccagtgtttattttggcccaaaaactcagcaggcacttaaggattttgatgaagctccaggaccatggtggacaaaacccaaagataaacaagataattttgtatcatccatggccttagaaattaactacgggataaagtaa

SEQ ID NO: 195181 - DNA, 954 bp, Klebsiella oxytoca
atggaaaagtctattagctttatggcaagagatggcgttatttctttagatacgtttcttaaaacacctaaatttaagaatggaatgggtatcatatttctcgacagaaacgtcgtgagccctgtaaccagtaatagtttaaaagacaaattctcatcattaaagtattacagtttctctgtcattctttcggcaatggaaggaaagaacaaacgattaccgacctatgaagaatatattgaagaatatcaaaaatcatcagagaagataggactagcattcggggaggagcgggtagacagggaaaagatagaatctttttatgatgcagtaaaaggcgaatatgagtcacacattaatgccgaatatgaatttctcacacaatccattgagactctaaaggataaagatttaaccgaaaaagcagaaagaatcatagagctaacgcactgtatttcaaatgagcacacatcaaagatgaacccgcttcttatattgcttgtattttgtcatttatacaaaggacgcggaaggcatttcatagacaaattgttaaaagttaacaaacaagaacctttagaacaaaagcttcataatgtcattagcgacctgatgatcattacattagttttaatgaccattagcagcgagaataagtatattgcggaagctgatgccaataatggtcatgtaaaacatccagacggtagttctgtaacgctaaatcctcaccaccgttttgtattctgtagtgctgactctgcattactggatttttataaattgtatgtagagctgcatgaacacttacatgtcatatacagatatcaaaaaagaaaactaaatggcgctatagagccaagattacatagcgtttgtgccaaattattcccgggagcaaccggggaagaggctgcaaaattactcaatgaaatacactcgtatattttataa

SEQ ID NO: 195182 - DNA, 279 bp, Klebsiella oxytoca
atgaacacctatgaaatgttatccatctcgattacgtctcccgcttgggaagctgcggtcgacttttccagctctgttgaaagcgctatcgccagccaaaaccggttggttaaggaagcgctgaacgtctgggagcatcggcagaacagtgaaacggggcaggtgacgttccagctgatcgtttttactcgtactgggggaagcgtcactgcacacatcgagaaatttacggttaagcgcgttggctgctgccttaaggtgtcattagccaccgcctga

SEQ ID NO: 195183 - DNA, 399 bp, Klebsiella oxytoca
atgacagatttcactatcacacaggtcgattttgatcgcctgctcgatcagaacgatgaagaacaggcggtacgtctgttttgttttgaacaattactttaccgctgggcagaccggctgagctgtgagtaccagggtgggctttggctggggatgacgttatccaacggcggcttttatgcttacccggccacgtctcagaactggagcgtatcggcggaaaactactatcagggcacgatggactccgacacgtttggcattacggcttcgctttacgctctctgcgagctggcgaaccgcactgaagccgatgaggacatcgaagcctattatgcgttgcgcaattacgccttaatgcattcatgtactaacgccattatggcggccattgactaa

SEQ ID NO: 195184 - DNA, 348 bp, Klebsiella oxytoca
atgatcgcgttatcgtttgagccacagtctgttgttcaggatctttatgacttagccaatgcagaaggggagctgttattcgttgccgccaaaatgcgtttaggaattgatgaggaacgcgatgaggacggttttaccgataacgaatatgtccttaccgacattgcttatcagctggcgcaggctttagtttttggccgttttactcattcagccagtgaaccgttattacatgacgttctggcgcttggagaaaaggtgaacagggaagcctgggctcattatttctataccgggaacgcagatgcaaagtgctctctggcactggaagcgatgggatatttatag

SEQ ID NO: 195185 - DNA, 606 bp, Klebsiella oxytoca
atgctgcgtttttatggttctgacctgaaggccgtcgtaacggaatcaataactaccgataagcctgtcgttctggctaaggatcacggcgtttatttgatggttgacggcggtgaacaacgtgatgatggtcgggtaagacatttagcctatgctgacggctgtcaccctgatctcgactcggaatgggtctcgatggcccgcatactggtcggcggcgatagctttgaagaaagaataccgctgacggaaggcggtatcgtggacatcatcaccaaaccctaccagctgtctattatgcttaaggcgcagaggctggcgatgtttattaccggctggcaaaattgtgtgcccgtcgcggagtaccgtcatctgacggacagaataaacgttatggcccaggtgcacttcactgcctgccgaagccagaaagagctgaaaagctggcgcatgatggcgcagcggctgcttgttgacgttgccgttgttggctgcaaacgggcaaaagctgatgaccatcactgttttcttatcgcatgcaggcaactgcaaaagcagttcgagcgggtaacgaccgaaggcgttattcaggccgtcgccatttga

SEQ ID NO: 195186 - DNA, 981 bp, Klebsiella oxytoca
atgaagaaatcaaattctcgttctcaacgtgctggacatacagacctgtatcagcaggtgaccgatcgcattgttgccgcgctggaaaaaggcgtaccgccctggcgtaagccgtggcgttcggtggagaaatatgcctccagcccgtttccggttaatgccgcgaccgggtgtcactacaacggcgttaacatcatgctgttgtggctggcggcggaagagaagggctaccgttccaatcgctggctcacctataagcaggcgcaggcagtcggtgggcaggttcgtaaaggtgaaagcagcagtctcggcgttatattcaaaccgtttgaaaagcaggcggaagataaaagcggcagtaagctgtttgacgccgatggcaaaccggttatggaatcccgggttatagctaaatcgctgtacctgttcaacgttgaacagtgcgatggtttaccagaatccgtcgttggggtgactgccgttcctttgtcgcaggaggatgtggataccgtcagtacgccggtgtttaaccgcattcttgatatgctgaatgcctccggcgtaaaggctacatcgtttagccagaaccgagcattttaccgtccatccaccgatgagattgtattaccggcagtcggtcagtttttttctgatgctgattattgggcaacattgttgcatgagctggttcacgccagcggtcatgccaaacggctaaaccgtgagggcatcacgtcttcattgagccggtttggcgatccgatttatgcgtttgaagagcttatcgcagagctgggtagcgcttttctctgtgccgaactgggcgtttatggtgaggtgcaacatgaaagctaccttgcctcatggctgaagacgctgaaagaggacaaacacgctattttccgggccagccgccaggcgcgcgaggcctgtgaatttttacttaaccttgctcaggatgttcgccgttcggtggcctga

SEQ ID NO: 195187 - DNA, 1290 bp, Klebsiella oxytoca
atgctcaatactctatttttctggcgtgacaaggcgcatccgccggaacccttatccgataaccgttcacctgtgcctgcgggttattttgctccggccagtgtagaggagttgttgggcacacctctacgtcagcaatatctgcaaacgctgtgggattactcttctctgcccagaaacctgtatcagcagtattacctgactcctctggggcagtgtgtactactaatgcagcagtttccggtggcggagcagggggcgtatgcgtaccccggtgggatgattgattgtttgcttaagacgctggcaaacgcggtgaaacggtcaaaaagctacatgttgccgccgggggctgaccctgaagatcaggcaacgcagggggctgcgtggtctgcggttattgtctgggcgaccatgtttagcgtgttggacaatctggcgcatctccacattgaacaggagaacgggcaggtctggtcgccggttgcaggcgttctggataaaccctaccgcttccgctttgtgccagaaactcagccggaaaaggtatacggctacagtgccatgctggccttcaggctgttaccggaagaagggctgcgttggctaagtcgatggcccgacgcgttaaaggcgctttcgatgtttcttgccgggtatcgggcgcagtcaggcgttgtaggggcaatagttttacaagccggggagggcagtgataaaacgccgccagtcaccccatcagcgttgccagacatttctcctgattatgcttttgatgattacgccgctttcttgcaatcggccccgccgcccggcgaatatgttgaaaatattcccgatgatttaccgtctgctatggggaatgtggaaggagccgatctctcctctgaaccggcattgtgccgctctcatcctgctggcgagttgtttatcgactggctcagacagtctttacaactgaagaaaacgatagccaatgaaccggatggtcacgtatatgtgatcgcggggtctgtattcctgaaaactccgtcaatttttcataggtttatggcggagcagagggaggcactgcgaccattaaaaatagacaactggcgtgatgttcagcggcagtttgaaaaaataaatctgcacaggcggcagcgcgggggagcaaatgtataccagtgccgtaatagggagagccagaaggtttatcacggctatcttttacctgcgaaagaaatttatggcgcagcaacagtgccagcagataccccgttattagaagttagctctttgaactaa

SEQ ID NO: 195188 - DNA, 948 bp, Klebsiella oxytoca
atggatgaattgttaacatttgaagtacttctggagaagtatttttacgccaaaacattacggcctgacacgcagtggagttattgcaaagtagtaagaacgtttacgaagtttgcgaaagtaccgccaggggaggtcaatgccgatttggtgctgaggtggaaagaagaagtattaaaagtgcaggggctgaaggttcgtacctggaataacaaggttgcccatatgcgtgcgttgttcaactttgctatcaagaaaaaactgttccaggaagagaatccgtttaatggcgttgtggcttgcccgggcgttaaacgtaaaaaaacgctttctgacagtcagcttgaaactgtttatcgggttatgcagcagcagaggggaagggagcaatccggcgatcattatcgtaacgcgctggctccagcatggttctggactgccgtgctggatatcttgcgctatacggcgatacgccagaatcagttcttacatatcagaattagcgatgtcgattttgattcgcactgcattcacttacggctggagggggctaaaaatcatcgtgaacatcaggtgccgattatctccgccctgcgtccatcgcttgaggagttggtcagtcaggtgacaaaggcgggggcaatgccacatgagcagctatttaacatcgcctggtttgatttcaggagaaaggcaaattatcaggatggtatgacgaaagttcctctacggtcctttttccgtcggttgtcccgggagtgtggttttctggttagccctcatcgtttccgtcataccatcgcgacaaagctgatgcgcacgccggaacgtaatctgcaaacggtgaaaaccttgctggggcacgtcagtctggcgtcaacgctggaatatgtggaggtgaatatcgaaagcctgaaggcgacgctggagcaggagttaagatggtga

SEQ ID NO: 195189 - DNA, 1269 bp, Klebsiella oxytoca
atgagcagtgatgtcctttttaccccgataaccgaaaccaccgcctgccgggtcaatggcgcgcgcctgtgggattcgctgatgacgctggcggaaattggcgccacgccgaagggcggctgctgccgtctgacgctgaccgatcttgaccgccagggacgggatttggtgattagctgggcgcaggcggccgggatgagcgtcaccgtcgataaaatcggcaacgtatttatgcgccgggaagggcgtaatccggcgctgccgccgattgtctccggcagccatattgacacccagccgaccggcggcaaatttgacggtaactacggcgtgctggcggcgctggaggtggtacgtaccctgaacgatcgggagattgaaaccgaagcgccgattgaggtggtgttctggaccaatgaagaggggtcgcgctttgtaccggtgatgatgggctccggcgtgtttgccggggtattcccgctggagaccatctacgccgcgcaggatgcggacggtaaaaccgtcggcgcggaactggcgcgtatcggctatatcggcagccagacgccgggcgaccatccggttggcgcctactttgaagcgcatattgaacaggggccgattcttgaagatgaagagaaaattatcggcattgtgcagggcgtgctggggatccgctggtatgactgcgtggtgactggccaggagtcccacgccgggccgacgccgatgcgcctgcgtcaggatgcgttacagatagcgacccgcattatgcaggaagtggtggcgattgccgggcgcagtgaggaagggcgcggtacggttggaagagtgcaggtctatccgaacagccgtaacgtagtgccgggagaggtcactttttcgattgatatgcgcaatatcagcgatgcgctggtggatgagatggaccgccagctgcgggcgtttatcgccggggtcgagcgggagagcggcctgaaggtggcgttgaaagaggtgagccactatccggcggcgccgttccacccggagtgccaggcggcgatcgccgacgccgcgcagcggctggggtatcccgcgcgggagattgtctccggcgccggacacgacgcggtgtatatgagctatctggcgccgaccgggatgatttttatcccctgtaaggacgggatcagccacaacgaaattgaatatgcgtcgccggagcacgtggaagccggcgcgaacgtgctgctgcaggtgatgctgcagtacgcgcgggtagtgtaa

SEQ ID NO: 195190 - DNA, 1533 bp, Klebsiella oxytoca
atgtctgtacaagaacatgacgcaccggtagcgcaggcgcaggctgtgaccagagaaaatgtttatcagtctctgtttaaaaaaattcacctgacgccggtttcttctctgaaacaactcggagagtggcaagatagtgaagcaatggcggaagcatcaacggaggagagggtctctgcagccattcaggtactgctttcctgcgtggcgaaatccggaaaaaatgttgaaaagttagataaatcactgctggatttccatatcagcgagctggatcgaaaaatcagccagcagctggatgccgtgatgcaccacccggactttcaggcgctcgaatcgctctggcgcggcctgtggtttctcgtccagcgaaccgaccctcgaaagaataccaaaattgagcttctggatgtcagcaaggaagacttacgtcaggactttgatgatgcgccggaaattgtccagagcgggctttatcaccacacttatgtgcaggaatatgacactcccggcggcgagccaatagcctcagtgatttccagctatgagtttgataacagcccgcaggacatcgcgttgctgcgtaatatctctcgtgtggccgcggcttcgcatatgccgtttattggttccgtcggacctgaattcttccttaaaaactcaatggaagaggtggctgccataaaagatatcggtagttatttcgatcgtgccgaatatatcaaatggaaaagttttcgcgacactgatgattcccgctatatcggtcttgtaatgccccgtgtacttggccgtctgccgtatggcccggatacgattcccgtccgcagtttcaactatgtggaagaggtgaaagggcccgatcacgaaaaatatctctggaccaacgcgtcattcgcctttgcggcgaatatggtgaaaagctttgttaacaacggctggtgcgtacaaatacgcggaccgcaggcggggggagcagtcaccgatttaccgatccatctttacgacctcggtaccggcaatcagatcaagatcccctcggaggtgatgatcccggagacccgtgaattcgaatttgccaaccttggatttattccactctcttattacaaaaatcgtgattacgcatgcttcttttcggctaactcggcacagaaaccggcgctgtatgagacggcggatgccactgctaacagccgcattaatgcccgcctgccgtatgtctttctgctgtcgcgaattgcgcactatctgaagattattcagcgcgagaatatcggtaccaccaaagaccgacgtttgctggaactggagcttaatacctggctgcgtaacctggtgacggaaatgaccgatcctggtgatgcgcttcaggcatcgcacccgctacgcgatggaaaagtggttgtggaagatattgaggacaatccgggcttcttccgtatcaggctttatgccgtgccgcattttcagattgaaggaatggatatcagcctgtcgctggtatcgcaaatgccgaaggctaaatcgtaa

SEQ ID NO: 195191 - DNA, 1764 bp, Klebsiella oxytoca
atgaagacaattataaagtttgatagattgtttgttgtctctgaaagtcataatttatatttcgaccaaaagttttcaaataaaataaacataataagtgggtgtaatacctcgggtaaaagtactttaatacagagcattttatttacctttggaattaatgatgttaaagatggtttgagcgaaattattcgatacaaacctacgttcagattggatttcagcatcactaaaagcggtgtagataaaaaatatataatagtaagagagcttggtagcatatatttaaaagaggatggggggaatgtttttagttttcatggtattgactctgatggtcgagttgaacatgtgaaacttaaggagatgttatctcaattatttgattttaacatgcttttagaacagaagggggagttaaaaaaagcatcgatagaatgtatgttcctgccttactatatttctcaatctgtagggtgggtttatttaagagagtcattctctaaccttggtttttataaggactttaaagacacgtatcttgattattatcttggcatagaaaattcttttgataaagaatatttttataagttaacaaaagagcgggcgcaacttcagtcgaagatctcctcattgagtaaatatagcactgagcctcactttgttgtttctaaattactggatgaagaattcggcgatgaggcacagaagtatattgatggttatataaatttagttgcatcattagacgaagaacgtgatgtatatacgagtttgtgtaataaattatccttaactaaaaatcatgtcaagatcctaagaagaactaaaagaaatatcaaaaaccaaaactataacaatattgaccgttgtcctgcatgtacgcaaatacttccttattccctagaggggttatatggttattatcaaaacatcaatgatactgataaactatcagagcaaataaataataaaatacaaaacatacagtctgatattaatggttcacttgcgaagattaaaaagttagaaattgatatatcttcaaactattcatattttcttgagaaaaaatcacaaaatgtatctgttaatacatggatcgataataaagcaaacatacgtcttttaagcaatattcatgaagagatagaagaacatacaaaaaggtctgatgaaattaaagggttgattgatgggatgggagaggagcagtctctttttgtcgagcggtttaacaaagaaaaagatttcaaggggatatttaaaaaataccttaatgacatgcagttattcaatgtaacagaacctagatatacagatctttataaaataaactcgttcccttttcaaggcgttgagcttcacaaaactgtaatgtcatatcattttgcattaaattctttaataagagaaacagacaatatacatcgacttccatttatgcttgatgcgattctaaaagaagatatcgatgacagaaattttgatctcatactttcgtttgttggaagaaatcttccgacagatactcaatcatttatatcgatgtctgagtattctgaagataacctcttgaaagatggtaaagatataaatgcattccgaagagccaaggtgaaagatattaagaatcgatactttcctgatgatacgaatttattctttattggtgatgggaagcatgagagatcatttttatcaaaacctttggatttaaacctcgatatttttgtcgatacttgtcggcttactgaatga

SEQ ID NO: 195192 - DNA, 1110 bp, Klebsiella oxytoca
gtggctaaaaataaagcggtaaatgctggggtagatgccttaactggtttcgagtttcaaagaaactgtgcattatatcttttgttagataattttaattctttcattgacaaaaacttctttatttgtattgaacatcatgatgattttcttttttgctataaaactgactgtttagtttatattaacgagatatatgcctaccaagcaaaaaaacttagcggaaaaatatggactatcgatgctagattttctgaggtggtatctaaaattctattagttggggataatcttaaaaatgactctttcgaaaaaagtgaggattataggcatcagttaacatttatatcaaatacagaaatagagttaaaatactcgcctctaaagaagttaaaagctgaaggtgctactgagcagatagtaaagataaatgagcaaaactccacctgtgtttataataatttacatgaaagtattaaagctaaaatcgaaaatagaataacagaagtttgcaatgaagaatcttcggtttttcatcgacaagagttagataacttacatattcagtgggtcgatttcccaagaactgctgcgaaacaaaaagaatctcttattggactcatggttagaaaattccctcatatagctgatccgaaagcagctattgatgtaatacttactctatttagggatgtagagactgtatataaccaagggcaggaaatatgcctacttgatccaacaaaaagggttgaaggcgaagatataaaaaaagtcatgaatattattgattcacagcaaaaggcattcgactattggcgtgccgaagcaaagcaattctcaatgaaatttagcataccacttagcatacagaaaaaacatgaaaactatatacttaactcttttgaactactcaaggatatgagtaattacgattatcaaattatcaaagactttattagaaataatgattacacaactcaatatacttctctgcaagatgcattaactgcatatgttgataatattagaaaatctcattctataaacctggataatattgatacattttttgcagttctgtgttcttacgttgagtgctacgattaa

SEQ ID NO: 195193 - DNA, 819 bp, Klebsiella oxytoca
atgatgcgaacctttgagaaagatgtatttccttatatcggtcacaggccaatcaaagatatcaagccgatggagttgcttgctgttctttcaaagatagaagcacgaggggcaacagagaaagtacgtaaggttcgccagcgttgtggagaggtctggaagtatgctgttgtgactggtagggctgagtacaatccagcacctgatctagccagcgccgtaactcctcatgagaaagagcactatgcttttttaacccaggatgaattgccagagtttcttcggactctgaacacctatgccggtagtgtgcttgttaagattgcgatgcaattacttattctgacaggagtaaggcctggggagttgaggcaagcggagtggctggaatttgattttgagaaaaaggtttggaatgtaccagcggaacgcatgaaaatgcgccgcccacatctggtcccattatcaagccaggcaattgacctgcttaatcagcttaaacccatgacgggagcaggaacgttgttgttccctggacgtaatgatcctaagaagccgatgagtgacatggcattgactgtgttggtcaggcgtatcggctatgccgggcgcgttacagggcacggattccgccacacgatgagtaccattttgcatgagcagggattcaactctgcctggattgagctacagctggctcacgtcgataagaactcaattcgtggaacgtataaccatgctcaatatctggaggggaggaaggagatgatgcagtggtatggggattatgtcgaagcgtgtttaattaagtttgtataa

SEQ ID NO: 195194 - DNA, 501 bp, Klebsiella oxytoca
atggcaaaaggtaagttcatcgcttactatcgcgtatccacagctacgcagggaaagagcggcttagggttggcggctcaacgggaggcagtctccgcttacatcagaatcactaattcggaagttgtcggagagtttgaagaaattgagacaggtaagggctcaaatgctctcgaaagacgtccacaactacgtgcagcactggcctgtaagaaacaagatgctactctgctaatcgctaagcttgaccgcttagcccgtaacgtgcacttttttaccgggctaattgaaaccgggattaactttgtggccgctaatatgccgcaagctgacaaggttattatccagatgcacgcggttatatctgagcatgagcgcgaccagattagcgcccggacaaaagcagctctcgcagctgctaaagcacgtggtaagattctaggtgtggcgggtagcgctaacctcaaaagtaacattgaagcccgccaacaagcggcatag

SEQ ID NO: 195195 - DNA, 261 bp, Klebsiella oxytoca
atgcgcttctatcagatcgaaccgacgctggagaactactggcgcggcattattctttttggcaaaaacgtcgcctcctataagtttgcgctggcgcatgcgctgtacgatatccgccgcgacggtagcgatctgatacgcctcgaggagctggcggtgccgttcagccagcatctgtgtcgccatcttgagcacgcccccaaacagatcacgtcgccaaaaagccagtttctcagcgcctgtagccgcttcaatcgctag

SEQ ID NO: 195196 - DNA, 288 bp, Klebsiella oxytoca
atgaaacgagctgtgaacgccctacaaaactttggaaaatccctctgtgggccggtacttatcttgccgatagtgggtctgtttatcgcttttggcaacgtgttgggcgacggcaaccttgcggaatatctgcccttgctcggccatcctttaattcagaatatcggccagctcattgctaaatcagcggtatcggtactggtgaacctggcgctgatcttcgccattgggatccccgtaggcctggccgcccgcgataaaggctacgcggcgctcattgcctggtga

SEQ ID NO: 195197 - DNA, 336 bp, Klebsiella oxytoca
atgaccagcaaattaaccagagagcagttaattaaaaaggcgcaagagcaaattgcgttttgcggtcacacggagataacgggtgaaggccgcgcccatgtaaaccaatgtgcggcgttgtttgaaatcgcactggcggcgctaaccgcaaagcccgcagtgtactgcatgaaaaaaggtgaggcgctggatattgatgccatctcaacatgcaagtcggtggttgatgcgtgggtagatgagtggaacgagatgcagtgcgaacacggtgatgattttagtgctgtgtcgctttatcttctgccaatggttgagggcttaagtaatgaccaataa

SEQ ID NO: 195198 - DNA, 399 bp, Klebsiella oxytoca
atggagattagcgttttagttcgtcgtttagataacgtcgctaagaatgccacacgtggcccatgggtagcgtttaccgatactgcgtcaggtactttttcagtccacacaccagatgatgtccgctgcgagaatatcattaagtgggctgggtttgactgtcagaaaaacgcaaaagcgaacgctgaatatatcgctgctgctaaccctgaaaacattcgtcgtctggtcaaatacacaacagagctggcggctagtcacgctgagttacgtagcacaatggcagcaatccataatgctatcaaagaagaaggtggcctgcgtgctgtcgcggttatgaatgcagctaagaaagcgtatgacgattcgacagctattgccgcaggagccaaccaatga

SEQ ID NO: 195199 - DNA, 591 bp, Klebsiella oxytoca
atgggatgcgatatccacatgatggttgagctgaaacgctcagtaaataacaaggaaatttgggtcaactacgaccactttagaaaaaatccgcacttcggggtattcgatgacgaggatgagtacgttcgtatcgagcttaattccgtccgaagctatgttgctttttctcagctttgcggtgttcgcgcttactcaaaagacacgccgatgatttctgagcctcgcggcatccccgatgacgctagtgaatataccaaacgggtatcgtcagaatatggcctggacggtcattcacacagttacgtgaccctggctgaaatcagagatttcagggccaatttaaagccaatgccattcaaaggcatgatttctacagaacaagctgctgatcttgataagggtataaccccagattcatggtgcggatggactagcgctgctggatatgtacatcgcgagtggacagaagtggttgacgggcttaaagaaattggcgaagcgctggaatcccgggctttagagttctggccaaataaaaaatacgtaaacccagagaacatcaggatcgtcttcttttttgataactaa

SEQ ID NO: 195200 - DNA, 327 bp, Klebsiella oxytoca
atgacagagcgtttagagcgacttgaaagaaaagtagactcaattgagttaactttgtcacgtctcaacgaaaccatgctcaagattgatgcaaggtttgacaatgtacatattcgacttgatggcattgaaaaaagtttagctgatgttgatcggcgatttgattcatcatctaaaagcgttaccgataagattgatagtgccacgaaactaaccgaagccaatacaaagacagcaatagcggaggcaaagctagcaataattctagccataccagctatcattggtgctgtttataccgcctatagattgcttagtaagcagtaa

SEQ ID NO: 195201 - DNA, 435 bp, Klebsiella oxytoca
atgaagcatgagaaagtcctattcgtctacgccactcttatccgtgaaggtatggctgccagtggctactaccccccagattctgttctctttgatattaaccacaataaaacctattcattggctgtaactgttggttttgtatacaaatcagatgtaatttattggaatgaaattgatatcacatttgaaaacacatcagttatagatcagaagcatgacggtgaaagtacatttaacgtgctaggttccagtaggccaaactcaagcgaaatagttaacgttgcctctttttatcttaaaggtgtaaatctacctaaatcaggcatgtacactgctgtcgtctctcttttcgatagcgatgagtcggggaaaaagcagaattttatagataaaaaagagtgttgttttatcgtggcggagagcaaaaaataa

SEQ ID NO: 195202 - DNA, 735 bp, Klebsiella oxytoca
atggttaagagagacgattcaaaaatagcctttaccgaaagattgcttcagatctgccaaacaattggactgactgagcggggaaggaataaaacaattgctgacttgctgaacaaagcgggagtcgaaatatctacgcccggggtatggaagtggttcaatgcacaggcaattcctgataatcagaagatagttgccctaagtaaaatcttaggggtacgtgcagaatggcttgaatatggggtgggtgagccaacaggatctggggaagtaaaacgcatggttaacaaatctaagcgtgacgtttatcgagttgaggtattggatctatcagttagcgcaggacccggtagctacatgctttccgactacgttgaagtgctttacgctatagagttcacaaccgaacatgcgcgggtgctcttcggaaaccgtgatccagcagatgttaaagttatgaccgttaacggcgatagcatggcccctaccctcgtgtcaggcgatcggttgttcgttgatatctcagttcggcatttccaaactgatggcgtctactcatttgtgtatgggaagactttccatgttaagcgcctgcaaatgcagggtgataagctggcggttctgtctgataatccagcttatgagaagtggtacatcagcgaagatacccaagattctctttatgttatgggtaaagcactgattcatgagtcaataaaatataaccgcctataa

SEQ ID NO: 195203 - DNA, 240 bp, Klebsiella oxytoca
atgaacgcagtagagattgcagttgaagctgttggcggacaaaccgcagccgcaaaaatttgcgaaatttccccggtggcggtgcatcggtgggtgaaaaatgcttgtctcccacggactgagtacacccaaaaaacgcactacgcagagaagttagcaattaattctgacggtaagttcactgctgaatggttactgaaaaatgctaatcctgatcgccctcatacaataagcgattaa

SEQ ID NO: 195204 - DNA, 417 bp, Klebsiella oxytoca
atggcggcgttacctgataaagacaaactgctgcgcaactttagccgttgcgcgaactgggaagagaaatatctctatatcatcgaactggggcagcgccttgcgccgctgagcccggaagagcatagcgcgcagaacatcattcagggctgccagagccaggtatggatcgtgatgacgcaggagcagagcggcgcaattgcgcttcgcggcgatagcgatgccgccattgtgaaagggcttatcgcggtggtgtttattctttacgatcggatgacggcgaaggatatcctcgcttttgatgtgcgcccgtggtttgaaaaaatggccctcacgcagcacctgacgccttcacggtcgcaaggactggaagcgatgatccgcgcaatccgcgcgaaggcggcaaatcttagctag

SEQ ID NO: 195205 - DNA, 360 bp, Klebsiella oxytoca
atgtcagcatgtatggctgtagttcttaacggtaacaccgaaatcaaatatttccctttccacgactcacgtagcgctgacgacgctgaagctatggcggacgaatggcgctatcaggcgattgacgctatcggagctgaagagtcttcccgcttccacctgcgcgtagtccgcccgaaggtcgttttccagcttccatccggagctgtattggagtgtgaccttgatgacgtagacatcaacccgcgagcctgcgccgatctggattatcacctctgcgcattcgggttcaatcgtggtcttggctattgcggtaattgggacttagacggcgctgaaattatcgaatacatcgcataa

SEQ ID NO: 195206 - DNA, 276 bp, Klebsiella oxytoca
atggaaaagtgggaaatgacagccttctgcccactctgcaagcaggtttttgttgctaaaaaatttcggtcccacctaaacaagcatcacgctgaagcatcagatgccgacaaatccaaagtagagaaaatggcgctaatagctcttaactctgtgaagagaaacattaacaaggagagtaaggagctaaaaagcgccacggacttgataacctctcaccgaaacggatacacaggaacggtaagtggtggtgcttttggtcaagggaaaaaatga

SEQ ID NO: 195207 - DNA, 711 bp, Klebsiella oxytoca
atggaacctaaaaagaatctgacgacagaacagcttgcagatgcagcacgtcttaaagctctgtatgagtcaaagaagaaagcgctaggcgtcacacaatactcaatcgctgatgagctgggcattacgcaaggagctgtagggcactatctaaacgggagaaatgctcttaacctcaccgttgccgctgcatttgcaaagattctgcaagtatctattgctgatttcagcccttccattgatgaggaagcgcagaaaatattggcaaatgagacatccaacgtgaagctggtaggtccatataagcaaggaaaggagtatccattgatcagctgggtgcaagctggagcctgggcagaggcaattgagccttactcagtcgatgagatcgatgaatggttcgagtccgatacaaaggtatttggtaaagccttttggttgcgtgtcgagggcgactcgatgacagcgccaactggccttagcattcctgaagggaccttagtcttaatagatacaggccgggatgccataaatggcagtctcgttatcgcaaaaatggtagatgcgaacgaagcaacattcaaaaagctcataatcgatggtggccaaaagtaccttaaaggactcaatccggcgtggccactgaaagaaatcaacggtaactgcaaaatcattggtgtagctgtgcaaaccatgatgcgcttggtttaa

SEQ ID NO: 195208 - DNA, 192 bp, Klebsiella oxytoca
atgagtcgtatgacattagctgattacgccaagattcacggtcaggaaaaaactgccagcgactttggcgttatccaatgcgcaataagtaaggctattcgtagcggacgaaatatttatgtgaccattcaacaggatggaagcgttaagggagaggaaattagggaaggtgcgaacaagttcctgatatga

SEQ ID NO: 195209 - DNA, 834 bp, Klebsiella oxytoca
atgtcatcatccatcaaacaaataattaatgatcgtcaagaaaccatagtcgccattgaaaaatgcttttccaatgctttgcaatgctacgtgatccattattcatgtgaatccttctacaatcttcagggcgggcaatccacccgaataacttcaatcgctatacgaaatttaggaagcgcacaaactcatcattgggctctgaaccgctctgctgagttgttaaaactgaacgtttcagatcctgctaacttagatactttggaacatcatctacttaaaaattacttcgatttcctatcaagatacgcaacctgtacgtttatgcattggaatatgcgtgacaacaactatggtttccaggccttgcaacaccgctttgaagtgttagctggaatcccattcatccttagcgatgatagaaagttagatttagcaagggctgccgtttcgatttatgggcgtaactatatagctcacgccgcaaaaaatggacgaagcggcagattactagcgcttgtagaaaagaaccacatcgcagacaaagatgttatgaccggacaagaagaagcagaagcttatatcaatggaaaatatagagaacttgaaatgtctacccttaggaaagtagacattctttgtaacattgctgaacgcatgcatgaccgcacattgaaaactaactcggtatggtataaacccagaagctttcatccttactggctgtttaatcgattaaaagagcacccagttatgtccggcttggtagcaattggcatcttaattggggttattagcaaaagcttggatctctattcaaagttccaacactag

SEQ ID NO: 195210 - DNA, 1962 bp, Klebsiella oxytoca
atgccaactttagattttaaaggtaagcagtttgtatattcgcatcacctgagcgtgccgtttcgcgagttaaaagtagaagctgataaatctttgccactagaaggcagcgcgccctcacttgatgacaacctgatcatccacggtgataatctagaagcccttaaagccttgctgccaacccatgcgagtaaggttgactgtatctttatcgatccgccctacaacacgggtaatgaaggctggtgctataacgataatgtgcgctcaccgctcatgcaagaatggctgaaaaaatcagcaaatcccgtagataaggatgacttggaacgtcatgacaagtggctttgtatgatgtggcctcgccttactttactaaaagagttgttggctgaaacagggactatttttgtctgtattaatgatattgagcaacatacattgagaatggtcctagatgaaatatttggggatgaaaacttcctagcaactcttgtatgggagaaagggaaaaaaggagattcaacatttttctcgaatacacacgaatacattcatgtgtatagcaaaagtaaagaaaccttgaaatctatggatattaaatggagatcatcaaaagaaggtgttgaagaagtattaagtcaataccaaaaattgaagaaacagcataaggatgatcataatttaattcgagagggtatgcaggaatggtttagaaatcttccgaatgatgcgccagagaaaaaaatgaagcattattgtcattctgatgatcgtggaatttattttcctgataatttcgctggaccagatgatggaagaaagaatcgtccaagatacgatatcttacacccagaaacaggtgaaccttgttccaaaccttccactggttggcgctgggatgaagcaacaacaagaagagcaatggaggctaatcccccattaattcattttggtaaagaccacactacaattccaaatcgcaaaacatatctcaagaaaacagggggagaagcttttaatactgttttttataaagatgggcggtctgcaacactgcaagtcgaacaactcgtaggagaaggtgtttttccttttccaaaagacgtagatatagccgcagcccttatagacctatgctgccatgaatctgctacgatattagactcttttgttggaagcggaactacattacatgcagttttgaagctgaacaactctgatgcgggcagaagaagatttattggaatccaattgccagaagaaattcaaccagagactaaagctgctcaagctggttataaggaagtaatagatgttacgagagctagaatacgtaaagtaatttctggttatgtctctaataaaaacattaaagaagagctatatgtaaaaaatattaattggtctgattttaagaacgctgaaaaaactattcgtattcttgatgcaattgaagaaaatacacgaggtcagtaccactcttatcaaagagttatgaaagatggagtgctcagactgtatggtataagaaatgcaagtgaaaatgtagcgggattggatggctcttttacattctgtcagctaggggaacctattaggattgagagtcttcttaccggagagggaatgccatcatttgatgcattggcacgttatgtattttataccgcgacaggacaatcactagaaactgttgcgaagacttctgcggatggttttatcggtgaaacagagctcttccgtatccacttgttctatcgcccagatagtgagtggctacgttctaacgaagcggcccttaacgctgacaaggtggagatcattagtaaaaacaatgcaacgaaaaagcgctctatcgtttttgctgtcgctaagtttatgagccaaaaagacttaactcaaaaaaatattgagttttgtcagttaccatacgccatccatcgcattatgggggcgtga

SEQ ID NO: 195211 - DNA, 2652 bp, Klebsiella oxytoca
atggagttaaaagactatcaaaatggtgtgctggataagcttgattactacctgaaaactctggcagaaagtaaagaagaagcggaagattttgttgcctttcaaaaaatgaaaggtaaggacgcacgcataaacgactatgccaaagacgcctgggaacagctggtacaggaacgccgaattgatttacttaaagataaaagtggccattttgtgcctgcgccatatgtatcaaggttcgatggcttagaacagcctatccctaatgtgtgtcttaaagtcccgactggtggtggtaaaactttattaggtgtggcggcgattgaaagactgcaaactgacttatttacacagcaaacgggcatggtactttgggtggtgccgtcggacgccatatataagcaaacatggaagcaattagccaatcgtgagcatccatatcggcaaatgctagaacgagcttctggtggacgagtcaaaatgctcgaaaagaacgatgcgtttacaaagctagacattgacgaaaatctttgcgtaatgctgttgatgctgcaatccagtgcacgccaaaccaaagaaacgctccgtatgtttcgtgatagcggtcaattcacctcctttttccctattgaggatgatacgacggctaatgaagcattactgactcaaattcgcaatctagactgtaacgacctctctgattatggttggcaggaaggcatcgcgccaggatctgtatcggtgaagcaaagtttaggcaacgtattacggttagtccgtccagtgattatcgttgacgaaggtcataaggcttatagcgacacggctagagatacactttgtggctttaatccgaagtttattcttgaactatctgctacccctaacgcaaacggcaaacatcattcgaatgtgttggtcaacgtatcgggacaagccctgaaagatgagcaaatgattaagttgccaatcaacttaattaacgaagataaaagtgagtggaagcgcactttgttgctcgcacactctaagctgagtgaacttgatcgcgatgctcagcaggttcagaacgaaacaggccgttatattcgccctatcatgctgatccgtgtagagcgcacaggtaaagatcagcgtgattctgcttttgttcatgctgaagatgcgcgtgagtatctgatggataagttgggcgtaaatgaaaatgaaatccgcctgaaaacgtcagacaaagatgaactaggtgatgatgatttgctcagtgatatgtgcccagtgaagtacatcattactaaagatgctttgcgtgaaggctgggactgcccctttgcttatgtgttgacagtattatctaagatgacagcaagaactgcgattacccaaatgattggtcgggtgctgcgccagccacatgcgcgtttaacgcaaaaaccaagcttagatgaatgttacgtctacacctttgatcaggacgtaatgaatgccgtttccggtgttaaggaaggtttagaagaagaagggatgggagatgtggcaaatcaggtcaaggcctctgaagctaacctacctgccacagttgtgaacaaagaaaagttatttcttagagaacgttttcgctctttacctaaagtatttttgccaagaattttgcatcgggataaccgttgtgaagacggttaccgattattcgattacgagcaagacgttttaggtgacatagattgggagtctttgttatacattaatgccgataattttcagttactcaatgacaagttgcaacgtactattgctcgcatcgactataaaatgtcaaaagataaccaaggtgaattggatttagctgacccagttcatgaaaatatagagtttgatgccagtttgagattggatatttcctatatggttcgccagcttactgatgttatccccaatccatggcaagcaatgcgggtgctaaagcatactttagatatattgcgtgataatggtgtcagtgaagagtcgttgttcaccaatcgccttgaactgctcaaggaaatgaagcgtgatattaagcagcaggttgttcaattatcagaacaaatcttcatgagcaagttgaacaagggagatatttctcttcgattactcgcatcagacaatgacaaactgaattgggaactggcgcaaacgttagaagtaaatgtcacggagcatgagcaagtgcttcgtcgcaaagacggctcagagctagaaagaagcttgtttgagaaagtgtaccaaaatgggcttaatagcctagagcgagaaactgcttggtatttggataaacaagaatcagtgtattggtggcatcgtatcgcggtaaatcaacgcgaatatagtcttcagggctggcagaagcagaaagtttaccctgacttattggtgtgtgtcgaagagtctagttcaggcagttaccgtttctcagtgttggagaccaagggcgagcatttgaaagggaatgatgacactgaatacaaacgtcgcttatttgaattgttaaccgaacacgtcaaaacggcggtcaatgcgggagaacttactttggaagcagcatctggtggtatttcattccgcatgctcatggaaaacagctggtcgcaggaaattgtgcatgaactgaactag

SEQ ID NO: 195212 - DNA, 174 bp, Klebsiella oxytoca
atgctgatgatggtgatcacaaaggaggtctttagattcgaaatgtctcaattggagcgtggccttacagaggtcaaacttgcacgcctgcatgaatcactgaacaatatgacactggaggaatatcgacagcaccattatttggtcgggatcttaaaaaatacttggaactaa

SEQ ID NO: 195213 - DNA, 171 bp, Klebsiella oxytoca
atgaaaaaacacattctggccatcggcctgttgctcagcacaatgacgcctgccctggcgctggatgtgggcgatatctcttcgtttatgaacagcgacagcagcacgctgagcaaagagatcaaaaatacgaccgacagcggtcgcttaatcaacatccggctttgttga

SEQ ID NO: 195214 - DNA, 3264 bp, Klebsiella oxytoca
  misc_feature (2368)..(2377): n is a, c, g, or t
atgaatgtacaggaaaccaaattttcatctaaagaatttctaaggcgccgtcgccctgaaaaattttctgattcaacaatcagagagactggtactttagatagagttgtactggaacacttcctctctacgctaaatacaagaaatcaagaactacaattcgaagattttgcaaaaaaaatatgtgaaaaaataatttgccctaatctccttgaacaaactggtcctgtagcagggggggatggtaaaactgacacacaaacattccctgtttcggaacagaataagcttctttggttcgaaggtgttaatgaagcatcaaataaagaacgttgggcctttgcggtaagtacacgtaaagactggaagaaaaaatgccatgaagatgtacttaagataaaaaaaacagatcgtgggtatactaaagtattttgcgtaacgaatcaatctgcaaagtccaatattcgttcagaggttgaggatacactaaaaacaaaaactggaatagatgttcgtatattagatattaattggctattagatcaaatttacaaaaataattttgagcaattggccattgattcattgtcagttccaacgcaatataaaagagaagttatttttggagaaaatgattataaaaagcataaaaaatatgaagaattaaccgagtatattagagagaaaataaaccctgctgaaatttcatatgaacaggtggatatgtttttagaaattgcagagttaagtgctgaacttgagaaaccactaattgaaacacaaggtctatttgaaagagctataaaaatctcaaagaaattcgggactaatcaacaattgctggatgcgtattatcaatatgcctggaagtctcatttttggatggaagattttaatctcttcgaagaaaatcttcaatttgcatatgaaagtattgcatcatcaactaattcctcaaaatgggagaaagttttaaatttagtaaccgttcataaaagttatattagacttaacaacgcaacatctacaatcgacattgagaatattgaacgtaacatgctcgctaaactagatgagatagctcacgatgaatcacgtcccagtaatgcactcacagcgagaactcacaaagctatttataaattgacaacgttttcagatgtagaagatgcttcggttgtatttgaagagttacatgaaatttttaaaaatagtgggaatttaataggctatccctttgagaaaaacttccaacttttgaacgaactagatgacatttttttcgaggtggatgcatatgaaaatttattagactatatgactgagcaatctgctgttagaggtggtgaagttaaaggggcattattaaatctacgaagaggtataaagaggattcaaaatggtcacccttatcaggcaatcaagtatttaggaaaatcttttattccactctataaagaggaatcacgagataaatttatattagcattaaaagctattgcttatgcttacgaatccattgggttgctatggagttcacgttcatgcttgcttctatccgcttctttgattacagataactactggaagtatgatgagatatcattaaagcaggctgatatttattatagtttatgcctagcagaaataaaactaggggaattagcacatgctcttttatggtatgaactgtttttaataattaaccagaatatcagtgatagctcgttcggcgataaagaaaatcagcaagttgatttttacataagtcaactcattttgaacactgacctaaatggaataaatcgacagagtaatattcccgatgaactcgatagattaggtctttttgtatcatcgggatgtcttaaatatgctttaggttatattgaagattttgaacgtgagtacgaagttactgccgataaagatcataatgatttcttgcaaaaaatacgtgactttgatgctggattcaatagtaaaggcataaaagataactatgataaacgaggaatatatacatcttttatttttggatgcaccatagaaattaactttccgaatcggtcaccatttatagagttttcaactagtatcttagcacttttagagagtgcttttgcaacttgtacgattgataacatccatctgaaagaagcatttttaattattgaagtaatagcagatgatgaagatgacttatccttatcgcatgaaataaatagcaataatggaaaactaaaccttactataaattgcaatggttttgagacaagtgcatttagaatcgatgctcaacaaaaaatcactaatgaattcaagaaaatagtatttgatcttctccctgagttattttttataaaannnnnnnnnnaaaatacagaatacattgaaagaatgatattcgaagatgctgcatttgacagagcaattagtttcggtgcctgtatcaaagctattgaaaatgttcttgggaatgatattgatcaacaaattaagaaaatttattccaccagtgctgaaaagaaaacttaccctcttttaagagataaatcctgggatagtggctttccgaaagtgttggagatcgaggatataaatgttccaacacctggtaaaggaagaatacctgaagaggaacttaattcagaaaatataacgcataaagattattcaatacaaagcctaatcaaacctcgtctatgggatagaacacgctggcaaggagtaggcttcgctcaattaaaatcgtgttatccagggttatatctattatttaaacaccccgatataggtgaggatatttttaaagatcttatatcatcagtaggcttggtagatagtaaagccagattacgggtttgtattgtcaagggtatttcagttaaaaacccaactcattatagagtactgatatctgaaaatatgatgacaacgccattaactaaaagaatgacaatgatcagtagaattaatacgatgactcctgatagcaatgtcaatttagaaagatttcttgctgtgtatcaggcctgtggaaaattctatcttggatgtgatgcgatgttaaaaaatattgttcctgagcatccacaaagagacagtttagggatagaaatgagtacgttagatgttaggtgggcttgggaaattgggttaaatgatgttgattgtattggggttaatttaaaagaagatgacccctatattcctagtgatgtagctgagatcccattattgcaattgataaacagtaaataa

SEQ ID NO: 195215 - DNA, 642 bp, Klebsiella oxytoca
atgaagcagcgtcaggtgatggtctacacccacgactccatcggtctgggcgaagacggcccgacgcaccagccggttgagcaggtggcttccctgcgcgtcaccccgaacatgtccacatggcgtccgtgcgaccaggtggaatccgccatcgcgtggaaatacggcgtagagcgtcaggacggtccgaccgcgctgatcctctcccgtcagaacctggcgcagcaggagcgtactgaagagcagctggcgaacgtcgcccgcggcggctacgtgctgaaagactgcgcgggccagccggagctgatcttcatcgccaccggctctgaagtggagctggcggttgccgcttacgaaaaactgactgccgaaggcgtgaaggcgcgcgtggtttccatgccgtccaccgacgcgttcgacaagcaggatgcggcttaccgtgaagcggtgctgccgaaagcggtctctgcgcgcgtggccatcgaagcgggtatcgccgactactggttcaaatacgtgggcctgaacggcgcgatcgttggcatgaccaccttcggtgagtcagcgccggcggagcagctgtttgaagagtttggcttcaccgtggacaacgttgtcgcgaaagcgaaagcgctgctgtag

SEQ ID NO: 195216 - DNA, 582 bp, Klebsiella oxytoca
atgtatcgccactatcaggccctgatttttgatatggatggcacgcttttcgatacagaaccgctgcatcgacaggcatggctcactgtattcgctagatattcactatcgttaaaagaagaggagctcatccccttcaatggatcggctccctggcaggtcgccagcaatattatccaattaaaaggactacgggcagatccgcatattctggccgccgataaaaaagccgtcgttgagcagctcttccactgtgccgctattcctccgctacccgcattaaaaatcgttcgcgaatggtacgggaaaaaaagcttagctctgggtaccggcagcgagcttagcactgttaatacactgctgacgcgctttaatttaaagcatcactttgatgtgatcgtatcggcagatcgggtagaaaatcataaacccgcgccggatacctttttactatgcgccagcaggatgaatatcactcctgcaacctgtctggtcttcgaagattcagcatttgggatcatggcggcgaaaaacgctggcatggacgttgttgacgtaaatacgctattaactggacgctaa

SEQ ID NO: 195217 - DNA, 2277 bp, Klebsiella oxytoca
atgaataacaggatcaaatccctggccttgctggtcaatctgggaatctacggggctgcttttccgctaagcgcggcggaaacggtctccgatagcaaaaccgcaaccgctgatgaaaccatggttgtcaccgccgccgagcagaaccttcaggcgcctggcgtatcaaccatcaccgcagatgaaattcgtaaacgtccgcctgcgcgcgacgtatctgaaattatccgtaccatgccgggcgtaaacctgaccggcaactccaccagcggccagcgcggcaacaatcgccagattgatattcgcggcatgggcccggaaaacaccctgatcctgattgacggcaagcccgtgaccagccgcaactccgtacgtcagggctggcgcggcgagcgtgatacccgcggcgataccggctgggttccacccgaaatgatcgaacgcattgaagtcctgcgcggcccggctgctgcacgctacggtaacggcgcggcgggcggcgtggtcaatatcatcaccaaaaaaggcggcgatgagtggcacggttcctggaacacctatttaaacgccccggagcataaagacgaaggctccaccaaacgcaccaactttagcctcaacggcccgctgggcggcgatttcagcttccgactgtacggcaacctcgataaaacccaggccgacgcctgggatatcaaccaggggcatcagtctacacgtacgggggcttactctgacaccctacctgctgggcgcgaaggcgtcgaaaacaaagatatcaacggctcagtgcgctgggacttcgcgccaatgcagtctcttgagctcgaagcaggctatagccgccagggcaacctctatgctggtgacacgcagaataccaacaccaaccaactggtaaaggataactacggtaaagagactaaccgcctctatcgccagaattactccctgacatggaacggcggctgggataacggcgtcaccaccagcaactgggtacagtacgagcatacccgcaactcccgtacgcctgaaggtttagcgggcggaacggaagggatcttcgatccgaaagcctcacaaaagtatgtcgattccgatctcaatgacgttatgctgcacagcgaagtcagcattccgtttgacctatgggttaaccagaacctgacgctgggtacagaatggaaccagcagcgtatgaaggatctgctttccaactcacagacctttatgggcggcgatatccctggttatagcggtaccgatcgcagtccctattcgaaagctgaaattttctcgttgtttgccgaaaacaacatggagttgaccgataccaccatgctgacgccaggtttgcgtttcgatcaccatagcatcgtcggtaataactggagcccgtcactgaacctgtctcagggactttgggatgacttcacgttgaaaatgggcattgcacgcgcctataaagcaccgagcctgtatcaaaccaaccctaactatattctctatagcaaaggacaaggctgctacgctaccggtgccgccaccggtatcggctgctacatgatgggtaatgacgatctgaaggccgaaaccagcgttaacaaagagattggtcttgagttcaaacgcgacggttggctggccggggtgacctggttccgtaacgattataaaaataagattgaggcgggcaccgttccgcttagccgtacttccattaccaatggtaataaaaccacctacaccgatatctatcagtgggaaaacgtccccaaagccgtggttgaaggtctggaaggtacgttgaacataccggttagcgagaccgttaactggactaacaacattacctggatgctgcagagtaaaaataaagagactggtgaacgcctgtcgatcattcctgaatatacgctgaactcgaccctgagctggcaggtacatcaggatgtttctgtgcaatcctcgctgacctggtatggtaagcaagagccgaagaaatacgattaccagggcaagccggttacaggttcagataagaaggcgattagtccttacagcatcgttggcctgagcgcaacctgggacgtgacgaagaacgtcagcctgactggcggcgtggataacgtctttgacaaacgtttgtggcgtgaaggtaatgcacaaaccgtcagcgacaccaaaacaggtgattacatggctggtgcaggtgcttacacctacaatgaaccgggccgtacctggtatatgagcgtcaatactcacttctga

SEQ ID NO: 195218 - DNA, 1518 bp, Klebsiella oxytoca
atgtcagcttgcaaagaagtcattattgcccttgatgaaggtactactaacgccaaagctgtagcactggatagccttggaaatgttatcgccaaattctcccaggccctgtccatccagacgccacgtgaaggctgggttgagcaatccggtgaactactcattaacgcctcgctgcacgttattgctcaggcaatcgaacatgtcggcgcggaaaatgtgcaggcattagcaatcagtaatcagcgtgaaacggcaattgggtggtaccggggaaatggtaaacccttgaatgcagcgataacctggcaatgttcgcgtacggcgaatttttgcgaagggctgcgcaaagataacatggagccggtcattaaaagaaagacgggtctgccggttgcgccgctattctccgcctcgaaaatgcgttggcttcttgattccatacctaatggccattcgctggcggaaagcggcgaaatctgcctcggcacgattgacagttggctactatggaatctgacccagggagattcttttagctgcgactattcgaacgcttcacgtacccagcttttcaacctgcaaagcggagactgggacgacgagatgctggaaacttttcaaatcccacgtagcgcgctgccgcaaataagaccttccgcaggcttatttggtcatactaaaggcctgaaaaatattcctgacggcattcccattatgtctatggttggcgattctcacgccgctctctttggtcatgcattaggtaagatgggctgcgttaaggccacttatggtaccggctcttcagtgatggcacccgtaaaatccgcccagtgcgatattcagtcgctggcgacgactgtcgcctggcatgatggcgaaaaaatcgtttacgggctggaaggcaatattccgcacaccggtgacgcagtagcctggatggctgatagcacagggttaagcgaactgccggatcatgagcttgctcatgaactcaatacgctaccggcgtcagttgaatcgactcttggtgtctattttgttcctgccctcaccggactgggagcaccatggtgggatgaaaacgcacgcggggtaatttgtggcttaagcagaggcgtaaaacgtgcgcatctgatccgcgcggcgttagaatctattacctatcaaattgctgacgtggtgatagccatgcgtcaacataaagattttacgctcgcagcgcttatggttgatggcggtcccacaaaaaacgactggctcatgcagtatcaggccgatctgcttggctgcccggtgatgcgcagcgatattcccgaactgtcagctatcggtgccgcgctactggctcgtaaagcgctttcgcatatgagcgatgaagatatgaagaattacctttccgttcatagtgaatttcgtcctaatatggaacgccacggtcgtttacaaaagcgctggcgtgaatggcagcatgcagtagaacgaactttatttaaagctggctcagccaaatga

SEQ ID NO: 195219 - DNA, 1284 bp, Klebsiella oxytoca
atgcatttaccacatcagcagccgaaaacaattctcggtcttcgtattgatttagtttggggcctattgggggttttactttttattgtcggcgacggcgttgagcaggcgtggatttcaccttttcttatcgaacgcggattgacgatgccgcaaagcgccacactgatcgctatatacggtattgccgttgcgatcggagcctggttatcgggcgtaatggctgaagccatcggcccacgcaagaccatgttaattggtgcttcctgctggctggtaggacaggttctgtttctgctggtcgcactgccaacgatgaatttcgccattatcatcccgacttactgtatccgtggtctgggttatcctctgttttgttattccttcctggtatgggtaacctaccgtaatccaccaaaaacgctggcaaccgcagtaggctggttctatctggcctttacaggtggcttatatattgtggcaaatttctatgcctcgttaatgatacctgtgattggccatattggcgtactatggagcgcgatcggctgggctctggccggtaccgcgatcgtcctgttctttgtaaaaggcgccgtccgggaaaataccaccataggcgaacagctatctattttgcttagcggcatttcgattatgaaggagaacccaaaagttggcgtcggcggattggtcaggttgatcaacaccacttcgcaatttgccttacccgtgttctttcctatttatctggcgcagcatggtttcaccaccgagcaatggttaaaagtctgggcgctaacatttaccgtcaatattgcatttaatttgatctggggaatggttggcgatcgtattggatggggacgcgcggtacaaatatttggtggctttggctgcgcctgtaccatgattatgatggcttatgctccagtattgtttgcgggtaactttatggccatgctgctgatgggctgtatctatggcgcgttaatcgctggtttctgcccgctcacagcattggttccttcacttgaaccggaaagaaaaggcgctgcaatgtcagttctcaatctgggggctgggttgtccagttttgttggccccatgctagtcgcattgctgttcgccagcttcggtgccaaaggcgtgctgtttgtcttcgccggtctctatgtggtaagtatttttctcacgggttacgttgcatccgatgaaagggcaaatcgtcgcctgaaaacgcaatctatacccgcacaagtgtcagccaagaaaacggtatga

SEQ ID NO: 195220 - DNA, 786 bp, Klebsiella oxytoca; identical to SEQ ID NO: 182623

SEQ ID NO: 195221 - DNA, 267 bp, Klebsiella oxytoca
atggtaggactggagcctaaacatacggcggtacgtagcccggaaagcaacgggatggcagagagcttcgtgaaaacgatgaagcgcgattacatcagcatcatgccgaaacccgacgggttaacagcggtaaagaaccttgcggaggccttcgaacattacaacgaatggcatccgcatagtgcgctggggtatcgttcgccacgggaatatctgcggcggcgaaccagtaatgggttaagtgataaaaagtgtatggaaatatag

SEQ ID NO: 195222 - DNA, 315 bp, Klebsiella oxytoca
atgcaggaaacggaacatcccctctgcggcgcggttcaggggttttgccggggtgttcagccaatgatcgcagccgttacccacgacaaacgccggtacgctcagcccgttgtcgatcaagactttacgaacgtgttcggatgtacacaggacgccatccagttcacgattgaattcatgtatccagggctgcgggaagccggtttcttcccaggcatagcagtgaagcaatttaacccgggcattcatatccgccacgcgcggagggtagatattacggctgaggatatcaacctttttgcccgcctcaattga

SEQ ID NO: 195223 - DNA, 261 bp, Klebsiella oxytoca
atgggggaacaaggcaacattgtcggtgagacccagccctttcagacgattcatatcggcaatggaatgtaccagcaatcgatcgcaaagcgccagcgcatccaccatttcggcaaggcggaagttccattccggctctttttgcggatccaccgtcgaatgcatcgccattacaaccacgcgtccggcatcatgctgatggcgaatgaacgccgccagttcacgatgattgaagaaaccgtagttaaactgaatcactaa

SEQ ID NO: 195224 - DNA, 285 bp, Klebsiella oxytoca
atggccataacagagttaagaaaccaaacttttgaaaatgagctaattgtattggacctccactcctatactaattgtaagttcgttaaatgcaaaatggtctattccggttttagcgatgtaatgttggttgaaaatgatttttataactgtgaatggcattttactggtccagcatctaatacgcttaattttttaaggctattttataataaaatgggagagcccggaaaaaaaatagtcgaagatacctttgataatattagaagcccaatgagtaaatag

SEQ ID NO: 195225 - DNA, 366 bp, Klebsiella oxytoca
atgttaaaatcatcatttgtagttggagcatggctaaagactggattggagaaaatgatgaatgcagttagtcatattaaaaatccgctgactataatagggatttttgctggtattgtagaaatttcagcaaatttggttctcccttttttggagcccgagcagcaaggggtttatttatggtttttgatgttgtttcctgctgggttggtttttttctttttcattactttgaattttaatcatactaaattatatgctcctagtgactttaataatgatgatgccttcatgcaagccaatggtaagatgctaggaaataaacttggtgcagacaattctgttggggggattaaatggccataa

SEQ ID NO: 195226 - DNA, 261 bp, Klebsiella oxytoca
atgtccgttgataatcagaaacttttacagaaaatcgtcgaggagctggaatcactcaaaggtgagaccgaagtcttatctattgctgtatcctgcctcttcagcgagatgccaacagatagggccagtaaggtgagggctaaattcacaaagactgtgaatgaactaaatacccttaaaccagcggcagcagctagtcggaggaggtcgcgtcgcgacgtatattcaaaagctctgtcaatgatgagtaagcctgaataa

SEQ ID NO: 195227 - DNA, 639 bp, Klebsiella oxytoca
atgtctataataaagtctgatttaggctggtatccaccgcagggacgatggctgacacgctttgtttttatcgctgcggcgatattgctggctggttgtgacaggcctgccagagaagagagtgtcagcggcggcagcggcaccatagaagcggttaaccatacccactgggcgataaaccatttcagcgtagacgggcagtcagggctggatattatcggcccctggcaggggggcggtggcggctgctgttacggcgtgccaacgaaatggaaaccgggaatgacggtgaaagttgagtgggaaacgggtgtggcttttgccgatgatgtacctgaaattcctgagccgaaacgacctgatacctccgggatgaacgagaaaaattattatcaagtatggcaagtgtattttgatgaaaaacaagaatggtataggaaaattaaggcactgaataaagcgcatacaaaaatagtccctgttcccgattataccgggcaaaaaacctgcggaataaaggttcactttttaccctgcgatcaaataaaagtcaccaccagctgctacgactacggcaatccaaattatccgattaaagatccgatcaaaatggaggaacccaaagtatgtccacaatga

SEQ ID NO: 195228 - DNA, 405 bp, Klebsiella oxytoca
atgcagcgtgatattcaactggtactcgaacgatggggaacctgggctattaatgaaggttctcaggttgactggtcgccaattggtgccgggtttaaaggtctcttattaaatacgtccaaatctcgtgaatcatgctctgacaatgacgggctgattgtcgatgcggctgttggaatgctcagacgtgccggaagagaagacgaattaaatctggtgatgttgcattacatgcacaacgtttctaaatcgactattgctcgctgggaaaaatgttctgaagggaaaatacgtaacaggctaatgattgccgaaacgtttattgatgcctgcatcattatgaccggggcaaaattagaaatggatgactggacccataaaagggaaatagagaaagttgcataa

SEQ ID NO: 195229 - DNA, 279 bp, Klebsiella oxytoca
atgtatcaggatgaatattttcacgtgactatgcccacgttttttgctcgtgaggacgccccgtggattaaagagcagttggcaacactcccggcaggtatgcgggaaaaaatcgcgatggcgtatgcgcaggcgtaccaggaagcgttcgacgcagaaccggtgtcattccggcagcagaacgcggcgcggcacgaggcaaaccgccgattgcgagagttttgcacgagatatacccccgcagttcggggatatacctcgctcccacccaggatatga

SEQ ID NO: 195230 - DNA, 303 bp, Klebsiella oxytoca
atgttcctgccacttggccataacctgatagctattagcttcgatttgtgcacgttcgctacggtcgataactccatcagctgtagctttccgaaggtattgagagtgtttccctatccactcaaccgactccatgagtctttggttgatgtcgccgttatcaacttcttcaacatcagcaaggggaacgaaaacaccaccggaggctttagcaatggcattagcgatgtgatgagagccaccagcgcgctgaaggaccatcgcccaaccaaatgggaagacctgatcaccatcagcacgtag

SEQ ID NO: 195231 - DNA, 366 bp, Klebsiella oxytoca
atgatgccaacgatgccggagctatctgcgaggctgtcagccgacccggcaacgctggaaaatcgccagttgatggcgattcctccgtgttcgcatctgatgagcaatcacgatggcagcctggtggtcggcgacggcgcaccgcacagcaccggcgatatccagcttaacgatccgtttatttgggtgtttgatattgccgccgataggcagaccgccgtgtgccgccacgactctacgtggaaagtgattgagggcgagcgccaggcgacgcatccgcatccgtcgttttcaccggataaccgctgggtgctgtttacctccgataaagagggtatgcccgcgctgtatctggcggaggtgtag

SEQ ID NO: 195232 - DNA, 192 bp, Klebsiella oxytoca
atgaatattaaacgcattggtctcgaccaggtaaaaattttcttccagatgcatgccgtggatcacggtaaacatgttgtccttcgtaaaaccctgcgccgtgaccgcatggcggcctttttcactcggctctcagcttgccttatagtattgaagcatgcggctctgcccgctactgggcctgtgagctga

SEQ ID NO: 195233 - DNA, 642 bp, Klebsiella oxytoca
atgattagaatcaccatggatatcaaagacaatttctacaaacttggtttagagtcgatactggatgacattctcaccacagaattcaataaacagatgagttactcgcatgggctttttttctcaaatataaactctgccgacataactatattatccctttgcaacggcgaggttcaattatgccagccgtttttagccaatctgaaccatggattattaatcgttttaaccgacactaacaccccaaaaacaaacaacttgcctttatgttgccgaaatattacatatattaataccagccatacaatcgaagaagtaaaaaacattctaacaagcaaaataaaatattatttagaaaatggtaaagaggaaagattctgcatttcaaaatcctgtaatttttggtatgttaactatcgtcaaaagagttttctgtacaacctcattgctcatgaaaaacctttaaaaatagcgaaagagctaactgtttcacctcgagaaatatattcaaaaaaaagatctttaatgaacagatttggaataaaaacggactgcgagctggtcagcttaatgaacagattcatattctggatgaatatttatcaggaaaagtcttactattgttgttggcatagataa

SEQ ID NO: 195234 - DNA, 531 bp, Klebsiella oxytoca
atgtctaaattccctggcactctattatttataacaggcatattttgttctgcaggtaatgttaaatctgcaacaacaaacattaatcttgacggaaagatcaccgcagcggcctgcactgttgaaacaaagctggcaaatggtttgaatataaatttggggaaaacgctctataccagtatgcagaatagtggggacgggggagcgtggagtgatttttctcttaacttaacctcctgccccagagggacaaacaggagcacaatgacattgtctggtattgttgataatgatgacagttctctttttatcaatactgccacaggtgaatctgcggccactaatgtggccgttcaactggcaaatcaaaccaatcgcagtcagatattatctaataatagtcaagttactgttgccataaataacaatcaggcttcattccccctttctgccagaatgtatacaccttcaggaggtgtgacgccgggcttagtaaaaaccacagttttggtaaacttcacttatcagtag

SEQ ID NO: 195235 - DNA, 1005 bp, Klebsiella oxytoca
atgaaaactccaatcataaaccatattaaagagacacctgtaaaatatgcttatgtcttgatcagcatacttctagcgttctcaagtaatgtctatgcagcaggctgtaaaacaagcatgaattataccaaggtcgtatcgaatataccttcccaaatcaaaatcaatccttccgttcccgtcggtgcggtcatggcctctggcatattcaacacaggtgaaggtaacttaccagatggttgtacaatgtatggaccaacaaaaggagatttgactggcgtaggaactccaaatggtaatgtatatcctacaaatttaccgtatgtcggctacaaattaatggcagtagatggcgactatgtctctggtgatttctataatagatattggccaattactgtgaatacatctcagccgtacttagtaattaatacagccgtagggtttagatttaagattgaatttataaaacttgggaccgttactgcagacacccccttaattcttcctgtgttggggcattaccgggtcacgaatagatacggtacctttaactatatggagtttacaaataaaacttcgttccagcttattccagaaagtactacctgtaccgtgttacaatcagcaatttcagtaacacttaatgatgttaatcaaaaagatttaaacgtaataggaaaaacggccaaagatacaaactttcagatccctgtcaactgtaaagcggccaccaatatttcactgtcgttttccggtgatgtagttgatccagtcaatggtgtcttcagaaatactaacgctgaaaatactgcaaacgttggtgtgcaaatactggataatgttggcaacccggttccaaccgccctgggctcttacaaagtcatcggcactgtgaatggcacactaaattatcctatgacggctcgctactacgcgctaacaaataatgtttcagcaggaaatgttaatgcgatagcaaatgttactattttatataattaa

SEQ ID NO: 195236 - DNA, 1134 bp, Klebsiella oxytoca
atgactgaagtcatggatagctattctgatggatttgaacgctcatggaatttagaaaaacgtaaaaaccgtggtgaaattaccattaatcagagcttatgggatagttttggtaaccttgcgataaatgcggtaagagaagattattggggaactaaccgcagaatagagtcatatggagttagttataataactcctgcaatggcattacttatggtctaaattataattttaacaaaaacacaacgattgatagtaatgctgaaaaccgttcgaaaatatatgataccgatcatatcttttcactaagtttaaatgttccattatcatcattatttggagaacatccgacttatgcgacttatatggttaatacaagtaaaaatggaaatacaaccaatcagattacattaagcggttctgcattagaatccaataatctgaactggagtgccatggagggatacggtagccagggggaaggaaacacggcgggtattacggccgactggcgaacggggtcaggcgaagttaatggcggttataattttgatcgttatggcaagcgtataaattacggcgtgcgaggcggtatagttgctcatgaggaaggaataaccttcggtcaatccatgggagaaacaagcgtaattgtctcagctcctggcgcgggtaatgttgccattcagggacaaagcggcgttaccacagattttcggggatatacaatcgtaccttatgccagcccatatcgtaaaaataacattacccttgacactgaaacctttgatgagggtgttgatattgcgatcacaaccgcaaccgttgtaccaacacgcggcgccattgtcaaagcaagctataaaacaagcgttggctatcgcgtgctgttaagtctgactcggcgcaacggcaaacccgttcctttcggagcaacagtttcagttgccgatgcaaaagacacggaacaatctattgtcggagataacggacaggtttacctcaccggtcttccggagaaaagtaagttattagtacagtggagtaaggaagcgtcagataaatgccaggtaaatttaaatatcccttcagataataaaggggttttagttatggaaagtctgtgtcactaa

SEQ ID NO: 195237 - DNA, 309 bp, Klebsiella oxytoca; identical to SEQ ID NO: 182592

SEQ ID NO: 195238 - DNA, 141 bp, Klebsiella oxytoca
atgctgaccattcattattatcaaagactgataggcagcattctgttcagcggcttgctgccgaatcagagcgacacgacgatgctcaagaccctcaagcacctgctgaatctcctgggctttagcctgcagttgcgttaa

SEQ ID NO: 195239 - DNA, 792 bp, Klebsiella oxytoca
atgaaaaaaaatggagtaaaaccgataacctataatgtcgataagattgtcttttgtctttttctatcaaccattagtttgagttcaaatgcggagtcagtgttatctaaaaaggatattgcgtggctgggaagcaaacctcaaataaaagaattaagttgctccgcttactataattcttatgcgagcaaaggcgaggtatctatttcaaaaaacgctacctttgagattaaggaggatttttttagagaaaagcatgtttttaaagatagtaaattgatttgttatttcgaagttgacgtattcgataaaaataaaattaccgtttacgttaaggaaatggccgcagttgataatgcaaatgttttattttatcactggggcggttcaggtactataggagaccttagcaaggataaccatcaatcaaactgggacttgatgtgtagcgttgattcaatgaatgatgaactaacctgtgcaataagtcagaaaaagtttgttctctataagaaaaatgatgggtattctattgtggtcggtggtgggggctatatagggagcaagtcatacattcgagtcaataaagacaagccctttgtttctgatgctggtgggtacttttcgccagaggatacgacaaaaataataagctcaattaataaagattcgaaactgacgatcagatacactgaagacccatcaaatcgaaccattgataccataatggacatgaaatactttaatgctgctgtgaaagtcttgggtgaaatatacaacaagcaacaatga

SEQ ID NO: 195240 - DNA, 846 bp, Klebsiella oxytoca
atgactaaccaaatcatcatctccgatatcaccattcacaaagattctaagggtcgttattccctgaatgaccttcatcaggcttctggcggtgagcgtaagcatgagcctgcgggatggcttagacttgaccaaactaatgaattaattcatgaaattttaaatacgcagatctgcgtatttaaacctgtcgattcccgcaaaggccgttacggtggcacctacgtatgcaaagaactggtttactcctacgccatgtggatcagtgccgcattcgcactcaaggtgatccgagcgtatgacgcgctggtatctggcactatggaagtgaagccaaaagttcgccagtgcacggcgactcagcttatccctctgcgccagaccgcagaacggttgatcactactggcctaggcaaaatctatcccgacatctggaagctggtccatcaacgcttcgacgtagaacatatccatcagttgcagcctgagcaggtcggcgaagccatcgagtaccttaacgtgctggaaggtgaataccttggcaagcaatctgatccaccagcattatcgctcaataatgattacagtatgggcttctataagccgtatctttggctcattaaagaaaaatcaattcgcgcaccctggacttaccctgctgacttactcatccctaatggtgattatcctaacccatgcggtaggttattagccgatcttgaacagcgtgggttcattgttgaagctgctcgtttccagttactggccttacagcatcaccttgaggtgtataaaacgagaattgacacaatccaacacgcgcttgggcaattaacgtatcgctaa

SEQ ID NO: 195241 - DNA, 270 bp, Klebsiella oxytoca
atgggccgcacgctgggcgaactgcgacaaaccatgacggttggcgaattcaggatgtgggctgaatacgaccgtatcagcccgatcggtgatatccgtgacgatatactcaatgctcagctggtttcagcaatgtacggtgcgcagggcggtaaagttaccattgaagacgcacagattcagtggagcgcagaagaggacgaggcaagcgacagcggcgatccatttgccggattagaggccgctttgcttgccgcctcagctacgtaa

SEQ ID NO: 195242 - DNA, 1434 bp, Klebsiella oxytoca
atggcgactatagtacaaagtaatatgaagtttaaaggtgatgtgaaattaccttcagttaatgcccctctaccggatggcgctaatttattcgctgatttctccaccggtcggtacgtcataaagcatgccagcggtaacgtcatccgttctgcagccctgacagatattctgtcattctcatgtgccagcgtaagaagctatgttggctcgtccggcctgatcgaatacctccaggcaaatgaacctgccatagaatatcatccgttatctctggagtgccttggattaagaactgaatattcgagcacaaaccgcctggcgtggtcacaggatttttcagagtctgccacctggtcatccggagggctgacgttaacaccgggtgacagtacggcgcctgacgggaataccacggcaacccgacttgccgagaccgcaaacgggacatcgacagtaagaacgttactggctgcgacgaccagcgatgcggtggcgggatcgccttataccttcagtattttcgcgaaggcaaatacggcgggggttattcagcttgcggcacagggggccctggcagcaaccgcattcgctaactttgatcttaaaaacggcaagattggcaaagtttctccgggttccgcaaccgtcggcatgctccaggtcacaatggagccttatcgtaatggctggtaccgcctgtcaataaccattacaccggcttcggcggcatcgcctttattcactgtcgccctggtaaatgatgattccagcgcgacagcggttccgtcataccttccttccacacctaaatcactctgggtgtggggggcgcaggctgagcgtcgggatggttattcatcttatattccgactgcaggaacagaagtgatgcgtgcgagtgaggtgtgcacgacgccgtcaaccacggcctttatcacgtctgccgctgcaacggtgttggtttcagtggttcatccccatagcctgcagtcgttaagcgggaaatataactctctggcctgtgctgtcgttctggacaacagtgcctcaggtgcacatatccgtttcgcataccggccgccagcgtcgggaaccgccgtggggacgcctcagggggctgcagtgggtgtaattccggattcctcaggcacagcgcaaaaccttgagattccgggtatggcggcggttcgcgatagtgagcagtcctgcatctttaattttgatggtactgcgttaacgacccggctttttgatggctataactggtattcccgttcggtgactgcttttccgccggagctttcacgtttgtgcattggtcgctcaaacatggatgcgaacaactatttcaacggacatatcaggaaagtaatttactggcctgctgcgctgggtgatgaagaaatggaggagattatttcttatgagtaa

SEQ ID NO: 195243 - DNA, 267 bp, Klebsiella oxytoca
atgggccgcacgctgggcgaactgcgacaaaccatgactgtcggcgaattcaggatgtgggctgaatacgaccgcatcagcccgatcggtgatatccgtagcgatattctcaatgctcagttggtttcagcgatgtacggggcacagggcggtaaagtcaccattgaagatgcacagattcagtggagcgcagaagagggcgaggcaagcgacagcgccgatccctttgcaggcttagaagccgctttgttcgcggcttctcagtga

SEQ ID NO: 195244 - DNA, 2136 bp, Klebsiella oxytoca
atggccgaacttaacccgcctttgggaacaacgacgcctgaaatctttttagataacgttaagcgggccgatcggttagtgaacggtccggctggaacggttgacgaccgcggcggggatcctctggactcctggcgtttgataatggaacaaaaccagacacgcgtagagcaactggacgatatcattacctctcttgatactgcgagcttcactttcccggacgaacccgcaggcatcgctggcacgactgatggtcagtatttccgcgttcctcagggggaagggaacgttgtcggatttaattattataaaaacagcgcaggtgtggcagtcattgttgcatcagttgcatctgcagaaattactaaattgctgggcatgaccgatgattctggtctcgtacggacagtttcatctgatggaaagattacggaagtaaaaacagagaccggtgataattatctggcggggatggacgaaagcattcaggagatggcgtcgcgaagtggaaaagacagttcagttaatctccactcagctacagatagagacggggtgcagcttatcatcactgatgcggaaggtaagatccgcatccctcttactgattttacgctgcaggatctgctggcgcaggttcatcctgtcccgggaccatttctcaatacgctgagctccgctgataaggctgcatatggctatattgatgagttgggcggtcttaatctcccgggtcttccgacatccgttaacaatatgcttaatggcctgtcccgccgcgtgcagcagcaggcagatggccggtttctcaccagtatcaaggactatggctgggacccgaacagccaggaagatgcacgacaggtgattcagcgcgcaatccgggatatggcccgcaatccgtatggtggtgtgatttacttgccgccaggagtataccggctgagttccttcctcacgcccgcgccgaacgtatcgattatcggggccggtaccgggaaaacgatactgatgccgtatggatcgtattcagccctgcagttcactacgtctccgacgaaccccatcccggaactgacggactttgtctattccgattttgaggtggattgccaggaccaggtcctgcctgatgaaggctatctcccgcggacgaaggggctctattttaacttctatcgccgcggccacctgcaccgcctgcgggtgagaaactctggcgcgactgggattggcatcgactttgcgcgcgattccgccattactgaatgtgttgtggagaatttcgggcgtctggcaccgtcgggtaacgataaccctgccggtgcatccggtctcgggttaggcgccgggggaacacagagtgagccgctgtatgttgctggcaacttctgccgcaacgggaagaatttcggcatcttccttgagaaacagcatggcaccaacgcgccatacagttctgagcacaccatcatcatggggaatacctgcaccggtaataacggaggtatgggcgattgtggcgtggatggcatgattatgcagggaaacaacttctctgaaaataattatggtgtcgttattagtccggggacggtgctggcttaccccggttcgcgcggcctgttgttgggtaatattatcgccaaaaatgctaaacatggcgtctattacaacagcacaacagagcaacgtgatggtgaatatgcaatcactaataacaccattcgtgataacggggaggatggtgtttgcttcaaagcgccgggccaggaagtccgcagtatggaaatatccggaaaccgtatttataacaacgggcgtcatggattccacctggaagacggtacagccattaatatggacgtgattaataaccgaatctggaataacggcctgaccgcttacgggaacggaattaacctggcatcagaggtaaaactcagctcgttcagtggcaataaaattcgagacatccaggctacacccactcagcaatatccttttaatgccactggcgcactgaccgacgtcgatatttcgtttaaccactgcgttggcaatgcacagaacacgcttaatctgaccggcacacaaacccgcgtcaccactctgaacaatccaggaatctga

SEQ ID NO: 195245 - DNA, 1662 bp, Klebsiella oxytoca
atggacgaaagcattcaggagatggcgtcgcgaagtggaaaagacacaactggcaacctgcattctgcaacagataaagacggtctacagcttatcatcacagatgctgaagggaaaattcgcatccccctgtctgacttcactttgcaggaccttctggctcaggttcagcctgttcccgggccgtttctcaatacgctgagctccgccgataaggcggcatatggctatattgatgagctgggcggactcaaccttccggggattccgacatccgtcaacaatatgctgaacagtctttcccggcgcgtgcagcagcaggcagatggccggtttctcaccagtatcaaggactatggatgggacccgaacagccaggaagatgcgcgacaggttatccagcgcgcaatcagggatatggcccgcaacacttacggtggggtcatttatctcccaccgggtatttaccggttgagctccttcctcacgcccgcgccgaacgtatcgattattggcgccggtaccggcaaaacaatcctgatgccgtatggctcatattcggcgctccagttcaccacctcgccgacgaatcccgtcccggaattgaccgattttgtgtattccgattttgaggtggattgtcaggaccaggtattgccggatgagggctatttgcctcgcactaaaggcttgtacttcaacttttaccggcgcggtcacctgcaccgcctgcgcgtgcgaaactctggcgctacggggatcggcatcgactttgcgcgcgattccgcgattactgaatgcgtggtggagaactttggtcggctggcaccgtcgggtaacgataaccctgcgggggcatctggtctcggattaggggctggcggtacgcagagcgagccgctgtatgtcgcaggaaacttctgccgcaacgggaagaacttcggcatcttccttgagaaacagcatggaacaaatgcgccttacagctctgaacacacgatagtcaccggcaacacatgtacagggaataacgctggcctgggtgattgtggtgttgatggcatgatcgctaccaataacaacttctcagaaaataattatggcgtgattatcagtccgggaactgtgctggcatatcccggttcgcgcgggcgtctgcagtgcaatattatcgccaaaaatgctaaacatggcgtctattacaacagcacgactgagcagcgagacggcgaataccagattgacagcaataccatccgtgataatggcgaagatggaattaacctcaaagcgccaggccaggaagtccgcagcatgtttatccaggggaatgacgtttatcgaaacggacggcatggtctgaacctggaagacgggacggcgatcaatatggatgtggtaaacaaccgcttctggaataacggcctgaccgcttccgggaacggaattaatctggcctcagaagttaagatcagctcgttcagcgcaaataaaattcgcgacatccagtctacgcctactcagcaatatcctgtttatgccagcggtacgcttaccgatgtcgatatttcatttaaccactgcgtgggtaacgcgcagaacacactaaatctgaccggcacgcaaacccgcgtcaccactctgaacaatccaggaatctga

SEQ ID NO: 195246 - DNA, 471 bp, Klebsiella oxytoca
atgccccaggttcagctggctcttgccgccgtactccgtgctgaccttgatgtgctcttttccccgcgcgtcgtcgaggcggattttgttgttcgccggcgtgcgcagcacgttacgtttatagttccggatggtgacagggtccgggtgcgccgagtcgtgcaggacaccggctatatacggccggtccgggtcaccctgttcaaaggcgatggccacctcggtgcccgccagcaggggcagatgcaggccgtacgtgtcaccggcatacgggcgcgcctggcgtacccacagactctcttctcccggctgccagtggtcgcggtcgaacagcaggttgaccctgtaacgcccgtcgcggtcgatatggccgtagatatcactgcttttcgtgctggtgacccgcgccggcagcgtcccggccatcaccggcctggcgatagtagccgggcggaagccgtaatcttctaa

SEQ ID NO: 195247 - DNA, 474 bp, Klebsiella oxytoca
atggcagatattttctacccggatgaatacctgcccatgccgcttatggacgggtacgggtttaagcccatatcacctttactgcgaacggagatgacgtccggtcgcgctcagcaacgaaggcgatatacctcaacacccacccaggcatcggttaaatggatttttaaaactgatgctctggcgcaggtgtttgaggcgtttttcagggatgcgcttaaagatggccagtcctggttctatctgaaactccagactccaatcggggtaaagccctataaagccaggttcgtggatatttacgaagggccgacgctggtcgcgccaaaatactggcagtacagcgcaacgctggaattatgggagcgcccattaccgccttcaggctggggaaattacccggaatggctggcgggccagtcgttactggatattgcgctaaacagagagtggccgaagcatgacaattcttga

SEQ ID NO: 195248 - DNA, 366 bp, Klebsiella oxytoca; identical to SEQ ID NO: 195231

SEQ ID NO: 195249 - DNA, 366 bp, Klebsiella oxytoca; identical to SEQ ID NO: 195231

SEQ ID NO: 195250 - DNA, 597 bp, Klebsiella oxytoca
gtgattgattccaccgggctgaaggtctttggtgaaggcgaatggaaagtcagaaagcacggcaaagagcgccgtcgtatctggcgaaagttgcatcttgctgttgacagcaacacacatgaagttgtctgtgcagacctgtcgctgaataacgtcacggactcagaagccttcccgggccttatccggcagactcacagaaaaatcagggcagccgcggcagacggggcttacgatacccggctctgtcacgatgaactgcgccgcaaaaaaataagcgcgcttattcctccccgaaaaggagcaggttactggcccggtgagtacgcagaccgcaaccgtgcagtggctaatcagcggctgagcggaagcaatgcacggtggaaatggacaacggaatataaccgtcgctcgatagcggaaacggcaatgtacagaatgaagcagttgttgggagattcactgacgctgcgtgactacgatggtcaggtagcggaagctatggccatggtgcgtgcgttgaacaggatgacaaaggccgggatgccagaaagcgtgcgtattgcggctttgttgaataaatcgaacttttgctga

SEQ ID NO: 195251 - DNA, 429 bp, Klebsiella oxytoca; identical to SEQ ID NO: 191187

SEQ ID NO: 195252 - DNA, 450 bp, Klebsiella oxytoca
atgattgatgtgaatctggatttttccggtttgcaggatatcgcccgagacctgcaaaccctcagcaaagctgaaaacaacaaagtcctccgggactctactcgggccggggctgaagtcctccggcaggaagtgattgatcgggctcctgagcaaagtggaaaactgaagaaaaacgttgttgtcgtcacccagaaaagccgtcgccgtggggaaatcgcgtcgggggtgcatattcgtggcgttaatccgcgaacggggaacagcgacaacaccatgaaggccagcaacaagcggaatgctttctactggcgcttcgtggagctgggaacatctacggccccggcacatccttttgttcgccccgcttttgatacccgacaggaagaggttgcaaaggtagcgatggagagaatgaacaaggcgatcgatgaggtgctggcgaaatga

SEQ ID NO: 195253 - DNA, 447 bp, Klebsiella oxytoca
gtgctggtcattaaacgcgtattcaggctgaccctgcgcgctgcgcagggttttattgattccatttttacactgatgaatgttccgttgcgctgcccggattacaccagtgtcagcaagtgcgcaaagtcggttaatgtcagtttcaaaacgttcacccgaggtgaaatcgcgcatctggtgattgattccaccgggctgaaggtctttggtgaaggcgaatggaaagtcaaaaaacacggcaaagaacgccgtcgtatatggcgaaagttgcatctggcagttgacagcaacacacatgaaatcatctgtgcagacctgtcgctgaacaatgtgacgaactgcggcgtaagaaaatcagcgcgcttatccctccccgaaaaggtgcgggttactggcccggtgaatatgcagaccgtaaccgtgcagtggctaatcagcgaatga

SEQ ID NO: 195254 - DNA, 582 bp, Klebsiella oxytoca
gtggtgttgccagcgggaatagcgcaactgcgtaaggcgctaccggagatagtgtcgcagcaggtgcagtgggatgagtgttttattcgtctgctgtgcgaactgtcagaagagttgcagggactggatgagcgtgtcgcccgccacgacaggcggcttcagcagtcagcacgggatgatatccggataaaaaggctgctggcgatagaggggatgggtccggtggtggccagtgccctggtggctgcagtgggtgatggcagacagttcaggagcggccgggaaatggcggcttatctggggctggttccgcggcagcactcaagcggaggaaaggcgcgactgggccatatcagcaagcggggggaccgctacgtgcggacgctgataatccatggagcgcgggcagtgctgaatgcgtgtcagaataaaactgacaggcgcagccagtggttgcagggggtgtcggagagacgaaaccggaacatcgcgacggtggcgctggcgaacaagaatgcccgtatagcatgggcgctgctgagtcgtgaagaggattaccatgggatacaggtcaccggttaa

SEQ ID NO: 195255 - DNA, 513 bp, Klebsiella oxytoca
atgaccaaatcaaccataaccagagagcgagttgtcgctctcatcgcagagcactcttacgatagcgcgttagttgatgctcttgaacatctgctggccgcaatggacagcgagccagtggctgaggtgtatcagccacagaatgcaggaatatgcgcacctcttggcccttccatcaggatgctatgcccgctggagccagggacgaatctctatcgccacgcgcagcagccggtagtgcagaagataatggcgcgtctggcgtatctactggatgaagaccagttccacaatattgaaagtatggtgttggcggccgccacgcagccagcaccggtagtgcctgatgatgtgctggacgcattgcagaaggttgctcgtatacacctcgacctgaatgactttgacggcgatcgccgcggtatcgcttattgcctgggtgatgccgaagagtcgttaatcgaggtggtaaaccgccgcgccgccatgctcaacggaggtaacgatgagtaa

SEQ ID NO: 195256 - DNA, 426 bp, Klebsiella oxytoca
atgacaactaatatcaccgcactggcgcagcgtttgaaagtggcagcaaagaatggatgttgccacaccctttttccggatgattgtctggcgctggtagaggcgctggagaaggcacaacacgaagcgatagttgactgggaggcggcagcgtcgctgaacgttgaaaaccaggaattgaagcgccgcatcgccgagctggaagacgcagagcaaaaactctgtgctgctaacgtgactcttgatgctcgcgcggaattggctgagcgccggttggcagagatggagtcccgtaccgtcaccgtgagtaagtccgacatatttaacgttcctggcggagaaacttacgtgggcggcgagatgatatccgtcgacaccctccgcctttacctcgcagagcatggcatcaagttggaggctgagtga

SEQ ID NO: 195257 - DNA, 309 bp, Klebsiella oxytoca
atgagcaacgtaactaaaccaaccagcaagggtaaatttgatggggcggttgattacctttgctctgatgaggctcgctttctggttatgcggggcgactatagcgaagcagatattatccaggcgtctgttaatcaggatgtggttgatgctgagggagcggaagattttgcttccagcgctcgctattaccagtgctggtacaaagtcagtccaattggtgggcaggagggttattcaggctggcatcatccacgtgatacgccttgtcgcggtgcgtatttcgcatctgttctgcagtgggattaa

SEQ ID NO: 195258 - DNA, 762 bp, Klebsiella oxytoca
atgagcaaaggaaccattatctgcctgtgcgatttcactggcgtcatggctgagccatgggtcgaagcaggttatcgtgccgttctggtggacccgcagcaccttgagacttcgatcgacggtcccattgagcgcatatcggcaaccatccttgaggctatgccgcggctttctcaaattattcgcaccgagaacatcgttatggtcattggttttccgccgtgcactcacgttgcggtatcgggctcccggtggttcgaggctaaacgagccaaagacccacatttccaggccaaggccgcactggtcgctgagcaatgccgcatgattggaatggtgacaggttgcccgtgggcattcgaaaacccggtgagtgtgttcagcagcatctttggctcggccgattacacattccacccgtaccagttcactggactcgcggttgaggacaactacaccaagcaaacctgtctgtggactggatgcggtttcgtagctccggaagaaaacactcacccgatggtcgcggacgccattgaacgcgtgaggcagcacttcgggcggatggttccgaagaagaaggcactggaggttttcgccagtagcagcattgttgctgaatggtatccggacaaccgaattcacgaatgcccgcccagcgacgagcgcgccaacattcgtagtgcaactcctcttggatttgcaaaggcggttttcctttcgaatgcaccccacctaaacgggaaacgggaggcagcatga

SEQ ID NO: 195259 - DNA, 483 bp, Klebsiella oxytoca
atgaaacgattttcatggggaatattagcgggcctgacggcgctggcgatctcgccgcaggcgatggcggcaaccgggtggtgtcagaataccggtaatggcggggcgccttttcaggacagcttttcatttattgaaagctttactaatccctcacaaaatcaggccggaatggagttttcccgtttgtaccactggagtaccgggggaacctacaaggcaaagtgtgactgtgataacgccagcggggtgacgtattttaaagccacggtgccaggccttaccgcgacgcaaagccgcaatggattaaattattaccagctaaataaatacctggaaattgccaccgagttatttattgcagggggcgtgaataagtatattcctacgccgattgaggataagagtaatcagaataatcaaggttttgcctgtaatcccggcggctccatttttgacacagggtcactgggatatatttag

SEQ ID NO: 195260 - DNA, 1197 bp, Klebsiella oxytoca
atgcgggatcggttggtcggtacatatggcatgcctgacgacccatcatctttctttgtccgcgctggccgtgctatgcgtaacgtaaactttgtaactaaactgggcggcatgactgtttcagctattcccgaccttgctcgcggcgtcatggtcaatggatttggcaaaactatgaagggttatggtgcactaatttccaaatcaccggcattcgctgctaacaaaagcgaaatgaaaaagatggggattatggtcgaaacggtgcttaactcccgctcgcggttaatggccgatctggttgacagctctacccgtacgaacgcagctgaggctgggctggatcgtgttactgacgtgttcggaaagcttaccctgatggggcaatataacgacattaacaaagcaattaatggaatggtgactgctgacagcattctttcgggtgccgctcctgcttccagagttgctaagttgggtataagtccagccacagccgcgcgtataaacgaacagtttcgtaagcatggcgaggtgattgatggttggcacatcggtaattttgacaaatgggatgatgattatgccgctggcgtgtttcagtcggctgttatgaaggacacaaacaacatcattatcactccgggtgttggagacacgcctttatgggccagctctccaattgggcgtacggtattccagttccgctcgtttacgactgcatcgtataaccgtgcaacaattggtggtttatcagaagggagcgcgcagttttactatggtactgcctttcaaattgcgctcggagcgctcacgtatgcgcttaaacaagcggcaaatggtaaagagatcgactggtcgccgcaaaaactggcactcgagggtattgaccgttccggtatccttggcccgctgatggaatacaacaacatggcggagaaggcaactggcggggctttggggttaggatcattactcggcactggtacgcaatcccgttacgccagccgcggctttatcggttctgcattggggccgaccttcggcctgctggatactgttaccgatgtaaccgccggcgttcttaatggagatgttggtgaccgcgtgctgcatagtgtgcgtaccctactgccgggaaataacctgttttggattgcaccgctaattaatcaggttgatcccggcatccgctag

SEQ ID NO: 195261 - DNA, 270 bp, Klebsiella oxytoca
atgaatgagcctgtctggttagcagtagatcccgccgatgagtcaggggattgcaccgcagtgacagcactggtttaccgcataaccggtagccagcagtaccacaccttcaccctgattgatttcagggcattcatccttgatgcagatgtaccgctctttaagtcatgcgtgtccggcataggcagcgacgaccagggcattaagaggggtggacttgtacgcctgcaactcgtttccgacagtcccgatgaggagttgccattctga

SEQ ID NO: 195262 - DNA, 195 bp, Klebsiella oxytoca
atgacgggcaatgaagaaaaagaacagctgataacagcacgctatggggagaaagctcgcccgcaagatattatctggaacactcagattgaagggttacttaagcaccgttcggtaagacatttctcgcagcaacctctgccggaactcctcaaaccttcagcagtggagcgtggtagctgttaccgaccctga

SEQ ID NO: 195263 - DNA, 732 bp, Klebsiella oxytoca
atggcagaaaaatctaaccgaatttacaagtatggagagcagccgataagaatcactactgttcaagtagtcgagaaacagttcgaaggagcggcaacggtaaagcaagttgatgattaccttaggacattgtttccgcattatcgagacaacacgcgctcaaaccttgtcattaacactgtcaattgcaacagaagccattgggattgtaataaagttgcgaggagatcagatgatgtgactcatcgttaccatgagtatgaccgtttgttcaagcgcgggaacatttttgaaatctatcaaccctctttacatggcatttgggagctataccaagatttacagggtaaatggtgttaccgacaagtaaaatcaacgtttgaacaggctgtagaagctgctgcaaaattatccccctctaaacgaaagcaaattttagcgatagaaagtaaaagccctgaactaacggaagtaacaacgagagtttataagcgaagcccgtatgtggttgctgaggttctttcaagggctaatggcaagtgccaaagctgtaagcgtgatgctcctttcctgaaagaagatggcacaccatttcttgaggttcaccacattgagtggctttcaaggggaggcgacgattcagtggaaaatgctattgcattatgccccaattgccataggcaagctcattacggtgttttggaattaatggcggttaataagcaaaactga

SEQ ID NO: 195264 - DNA, 627 bp, Klebsiella oxytoca
atgaaaaaactcgaatggggtaaatacgcgctgatctatttggcggggtttctgaccagtttcagtggtgctttagatagtttagtgaaaattccttcgtcgtataaagaattaaagaagacatacatctacgatagcgaatttttaacaggtcaatggtcaacaaatgctgaatacttagcggacagtggcgaactgggattagatccttcacaaccaaagatgactgtgagtatggatgcatccgaggacggaagcgcgagcggtgaaatgatgagtgaaaaaatctgtgacgctctaccgcttacatgggacattaggcttgaagcagatgcgccaacattccgtgatttcttttttaaccgtaagttttatttaaagcagttgcatgagggcagaatgcaaactgtggcagcattggaattaattaacgaggatagaaagcgtggcgcaatgacgtttaaagttgttggtgatggtacaggcgcactgccgaagcaaataacattggctaaaaatctcccccagtttaagtctgatttcaaagagttgtccgattattgtgcagaatcgccgatgagattctggaaggattattatcagaagcaaggcaaaaaattcccatga

SEQ ID NO: 195265 - DNA, 135 bp, Klebsiella oxytoca
atgaagaacagcaacattatggcgttagcgctcgcgcttcgcaacatcgaagccggtcaggcggttaaaatcccggcgatgactggaagccagcttcatttgctaatgatgtggctacaggctttgagagagtaa

SEQ ID NO: 195266 - DNA, 447 bp, Klebsiella oxytoca
atgaacaaacctaaatcccaacgcatcaccctatccaccatgacaggcgagcagatcgcagacgccatcatgtacggcacgtacaccaaaaccgcactttggtctttcattagccgtagtggtggcgctgacgctgcgcacgcgaagtacccgcaactggctgttgcacttcatatcctgaaacaggaaaagaaaaaggcaaagagcgcccgagcggtcaaggcgatcctgaaaccactatcccgccagtttgctgatggtcaatccctgactgagattctggccccggtgctccagggttaccgccgtctgtaccgtgaaaaactcaatctggatatgacgcccgagcaggtgatcatgttccttgttgccactgatggtgtggagaacctggaacaacacggttacagcttcgctggcgacttcgcgacattgccaacagtgtga

SEQ ID NO: 195267 - DNA, 189 bp, Klebsiella oxytoca
atgaatatctcattcccggatgagacgtaccgaacgttgctaaaagaagccaatcgccgcgacgtgccgatggcgagattgtgtagtgaattgctgcaaacagcggcaaaaatcattgataaaacgaaagcagacaaccaaacagataaccagcgaggaaatgatgaacgtagagaatacagaaaataa

SEQ ID NO: 195268 - DNA, 1065 bp, Klebsiella oxytoca
atgaacgtagagaatacagaaaataacaacgaaatttttgaccagtctgccacacggttaaaagggatcaagaacatcatgacaccttccggggatgtaatgcgtgttactgataccgacataaaatggttcaaccacttctacaccttcaaggtgcagggtaaaaaatgttatcagagtatcggcaccatcgcgaaagtgatggggcgggccaggtcagtagcacaggagaggattaacaacctggagtctctgggcctgttaacggtaggtaaagaggcattcaatgagggttggcgcaatacgtacacctgtacgccaattgatgacatcgtttcttgcatgacggatgcgaaggtcacacctcaaaacaagaagctgaaaaaatctcagcttgactccctgcttagaaaagccgaggcagtagatgccctggctatcaatcagggcataaaggaaatggcgaaagctatcgcaaattgtgatctctctgatgaagaagcgattcaattcgcctttcagattgcagcagagaaattagctgcgcttggttggaaaatcgaaacaaccgctaaggagaaaggcaaatccgatgaagaggccacagaaccgcaggcagagcagtcagcaaccgctgctacatcatccactgatgcgccaacaggcgaatccgctgatcagaatcctggcatggcctctgagtccgccccggatgattctggacagtgcgatagcttggaatctgacaatgacggcagcagcgatgatcgcgccaacggtaataatgaggtgaagccggaaatctttgatgatcgcggtgtaatcactgaggcatttattaacagcctggcaggtgatgtggctcctaaccgcaacgctgatggcacattgcagagtttccgttacgtctattgggtggctcgtcacacacaggatgcgcttgacgggatttcgactcgtaccaaagatgaatacatggcagaggcccagccctggcacattccaccgcacctgttatcgacaccgacaccagagccggaatacaacgaagatcccgaattttaa

SEQ ID NO: 195269 - DNA, 555 bp, Klebsiella oxytoca
atgattgagaaatgcaaggcgctgaccgccaaccagaacacagaagaattacccgacctcacccgcctgtttaaaaaccgtgctcgaaatgtggatgttatgcagaaatgcaagcgcctcctcatagctggatacccgccgggccgtgtggcgctcatcctgcgtctgccgctggaacgcgtcttggaattgtacgacaactcgtataatccgcgatgccgcagattcgccagacagaacgaacacaccaatgcccgtttagctctgacttcattcaatgagggagcaccgctcgccgatatcgcagcggggctgggattgtcgctgtactgggtggtgctgtccctccggcagaatggcgttgctgaatccgtgatcaatgcacgtatgccgccagcagatgaccccctctgcgtcgagtatcgtaaagtctgtgagcggaaggccgcgagccgttttaaaccgatccagataaacccgatgagacgtgttagaaaagccgcaggccaaaaggcgagccagaccgaagacacaggcacgacagctacagcctga

SEQ ID NO: 195270 - DNA, 468 bp, Klebsiella oxytoca
ttgaaaaagttacttagtgtatctgtagcattgctgtctatgatttctacagtggtattttccgaaaccagaaataatttaccaatggatcgagtatatcaagggccaatccatctaccggattttacaggtagagatcgcgcatacttaacttacagaaccaagatctcaaacgaaatgagaactggtccaaacttcgcgggtcactatgccattgtggaaattggttgcggtacaagctgtcgatttgcattcgtaggtgatgtagctacaggtcaagtattcggttttccttatggtggagaaagctactatttgcttcaactacaatatggagtcaaaagtaattacgtatcaacacgttggattgagagcgatgcttgttattctgacttcattagctgggatggcaaagaatttgtttcctcaggcaaacgtgtaatcggccccaaagaaaagtgtgaataa

SEQ ID NO: 195271 - DNA, 336 bp, Klebsiella oxytoca
atgctcatgtacgaagaagacttatccccgcaggatgtgatcgcatatcgcgatgatcccgtgttttcccacaaaacagtaacattcgccaccctggctgtggataccgtccccggcacgctactgaccccagcgggtgcagcctatgcgagtggcgctaatgttctgatcgcgctggatagccacaaggcggggagcaacatcccggttatcgttgtggatcgcggctgcgtcctgaaacgtaacggtctccgggctgctactccagcggctctaacagcagccatcacggctattgaaaccagcggtttgaaccacgtttctgcttctgaataa

SEQ ID NO: 195272 - DNA, 492 bp, Klebsiella oxytoca
atgaataaaagtaaagaagaacaaattaaaaataaaataaacgaaattgttaactttggtattgatagcaataaaaaaagtgatgagtataaagagtcaatgactcttatgattaattaccttcatgattcaatccataagaaattgggggatgttaatattaaatccgaaccatctattaaaaccgtagattattttattgaagtaggggatgcgtcatcgaaaaaatacacacgagaagttgagaataattataaacaaacagttgtaatttacaatgataaaaaatcgatccctttgtttacatgggaaataactggtaatgacggtgtaagaataaacgaagataatgcttttactttttgcacaactgatgatgaaattttactttcgttgcaaagaattgttacctccaataataaattttggagtgcagtcaatacattaaaaaaacaagaagacgataataatgctcttattgcaagtgaataa

SEQ ID NO: 195273 - DNA, 723 bp, Klebsiella oxytoca
atgccatatgtttctcgtgcatcaacccatgccagctttgatatgcttatcattttcaaaagcagtcattgcaatataccatctgatatatcagctataaaatacaatacaaaccacccaaccaaagatgattttctctataaagatggaacaacaactaaagcaggcatatttatagaggtaaatgtaactggcgaaaatgaaaggttatatataatagcttctcactggcctagcgatgcatttccgactggaaaagaaaaaagagcggaagctgcaagaaaaataaaatccgtttctgatagccatattgagtcaggtaagcaattattacttataggtgattataatacgccacctcacgccacagtacttcgtgaaaccatgtcggttaaacatagtaaaatagttgcaataaaaagctcttataatctttataatgcatcatttaatttgatgaaaccccatgtatatcattcgaaagctacagcaaatgagcgtttaagctatggtacatatatatggaagaataaccacgactcagaagatggatgtgcaatccttgatcaagtacttgtttcctcacacttcatttcggaggggccttggcatttagttgaatctaatgtaaaatacatctataattcattaacagaaaagtatatagattataagaaccaattaatagaccatttacctatttatgtttctgttgaaaagtga

SEQ ID NO: 195274 - DNA, 258 bp, Klebsiella oxytoca
  misc_feature (216)..(223): n is a, c, g, or t
atgttcaatatatctttttggaattgtgggcttgcccctttaaaaaactcaaccattattgaagataatgccattattgttaaagatattattattagtatattcgaagatgaagatttatcagttcattttttaattttgtgcgaagttaatcaatccgcaattgatttgataaaaaaattaatatctgagtcatcagctattaatctctcatannnnnnnncaaggagtatcgtcggcagcgtcagatgtgtataa

SEQ ID NO: 195275 - DNA, 219 bp, Klebsiella oxytoca
atggccgtgaactggttaaaaaaggttatgcacggctggtggatgttgataattctgcgcagccagaacagccagaacagccagaacagccagaacagccagaacagccagaacagccagaacagccagaacagccagaacagccagaacagccggaacagccggaacagccggaaaccgtgccagataagaaggctaaaaaataatgttaaaacttga

SEQ ID NO: 195276 - DNA, 270 bp, Klebsiella oxytoca
atgagtgaagcaaaaccgcaagatggcagcacagtgaaaggctatagaaaattaagcgatgcagaaatcgcagcaatgaatcgcctaaaagaactgagtcgcaattttattcgcgagttgcgagatattcagttggatttgttaccgcaggatcccgttctctccgatcgcaccgctgcttaccgtagcgcttctttggcgaccacaaaaatgcaggaggcctgtatgtggggatgccgtgcggtggcccgccctgatggcgactgctaa

SEQ ID NO: 195277 - DNA, 1389 bp, Klebsiella oxytoca
atgactccgcaggaactggaatcttgtgtactggctggactgcttaacggtggagcaagtccggacgctttcgacgtgatcgcatcgacgcctgaagaatcattcagcattgtttttcatcgtcgcgccttctcggaaatcaaaaaacaggcgttgacgaacggtctgatcgatatgctgtttgtcagtgaggctctgggagggagtagcctggctgatttatcagagatttcgcgtatgcccgccacggtaccaaacctgaaaggttatgccgggaaaatggtgaaggcatggcgcagccgacgtatggctgaattactgcaaaatggtgctgatggtatccgccaggcgaataatcaggagcagcgcgatgagattgtcgaaactgccgtggcgcagctgttggacatgaccggcgacactggcgacgtgcagccggtacacatgagcgaattattgccggtgtacatggaaaccatgcagaaacgcatggacggcgaagagggcacccgcaacctgaaaaccgggatcgaggaactggacgatgcgaccggcggaatcaacctgcaggatttgattgtcgtcgccgggcgtccgggcatgggaaaaacagaatttgcgctgaagattgtcgatggtgttaccgctgctggcggtggcgcgttgatattcagcatggaaatggccgctgcgcaaatcgtagaacgctctctggcgggttctggcaacatgtcagtgtcacgcctgcgtaatcccctcgatatgcaggacgaggactgggcgcgctttacagcggccatggagaccatgaacgggcgcgatatctggatcgttgatgctaccgatctgacgattgagcaaatccgcgccgttgccgaaacgcataagcgccggtatccgcatctggcgatgatcgttgtcgattaccttggcctgattaaaaaaccgaaggcagagcgtaacgacctcgcgatcgcccacatatcccgaaacttaaaaactatggctatgcgcctgcatacgccgacgttcgcgcttagccagctttcccgcgccgtggattcccgcccagcggcccagcgccgcccggtcatgtcagacctgcgcgattccggttccattgagcaggacgccgacagcatcatgtttctgtaccgcgatgaggtttacaacccggaaagccgggcagctggcgtcgctgaaattatcctgggtaaaagccgcttcagcgccgcaggagcaattatttatcaggaatttaaaaacggacactttctgtcaatggatcagcatgttggcaaagagaaaacacgtatccaactggaggccgcgaaaccccggaaacaaccccgtaaatactctgagaaattcaataccgatgcattttaa

SEQ ID NO: 195278 - DNA, 186 bp, Klebsiella oxytoca
atgctcaaaatcaccctgaagcgaggggatgccattcacgttatttttcctgatggcaccaaaggtaagatcgaagcctgcgcacgttgcgagtttgattttcattttccctatagcgtgaaaatcaccagagaaaatggcgcgctacggaataaaccaaatcagattaagcataatcagaaataa

SEQ ID NO: 195279 - DNA, 450 bp, Klebsiella oxytoca
atggcgacactgaaaggtgaggtcaaagccttcatcgttcagtcccttgcctgcttcgatactccatcccaggtggtagagctggtcaaaaaagaatttggcctaagcatcacgcgtcagcaggtcgaatctcacgacccgacgaaagcaaacggcagggggctggcgcagaaatgggttgagctattccacgaaacccgcaagcgcttccagaccgaattaagcgacattccgatcgccaacaaagcctatcgtctacgtgcgcttgaccggatgatgacgaaagctgagagcatgcgaaacatggctctagctgcttctctgatggagcaggctgcgaaagagtgcggggatgcatacacgaataagcagaaggttgaacactcaggcggccttgccgtgagctcagttgcatctgtcatggacgagataggagatgaagacctgtaa

SEQ ID NO: 195280 - DNA, 279 bp, Klebsiella oxytoca
atgaaaaagttaaaggtcgagaagactggctgctggggaacaattaacggcgtattccagcaacttccggtgggccatgagttcgttgcggttggtgttccgcctgctttcgctggccgcgtatcggtcgttggcgaagttgaagagcaggagcttgaagttgccactcctggtgctgacgataaacctgcagagcaggcagagcaggcagagcaggcagagcaggcagagcaggcagagcaggcagacacctccgctaaatcgaaaaaggcgaaataa

SEQ ID NO: 195281 - DNA, 171 bp, Klebsiella oxytoca
atgaagtacaaatcagtgactgaaggtaagccgaagccgctcacccgcgtctgggtcgagaccgacacggggcgggagactaccggctacgtgaaatcggacggcgagtggttcatcaactgcgaccgcatacgggccacaggttccgctgtgctgcgatggagggaatga

SEQ ID NO: 195282 - DNA, 669 bp, Klebsiella oxytoca
atggctcatcaaatcttaagccatcagcatcataatgcgccatcttataatggcgtggcaggcgtttatcagattaccaacaccatcactggtgaggcgtatatcggttccacggttaatatttcaggacggtgggcgagtcatcgttataagttgctgaaaggaactcatgggaacagaaatcttcaggagtcatggaatacgtatggaaaaggcttctttgagttttccgttctggaagtagtgagtgataaatccgaacttattgcagccgagcagcgattctttcgcgaattaaacccgtctttcaacattgcgccaaacgccgggagcagcctcggagttatacacaccgaagaatccaaggcgaatatggcggaaagccggcgcggagataagaactgctggttcggcaaagttccagcctgtgcaggtatgagcagacagcctgaagtcaaagctaagatatcaaccaagaattcaggcgctggcaaccctatgttcggtgttaccccgccacacgccaagttcactgatgatcaggtgcgcgaaattcgtcgcgccatttctgaaggttattcactcactgttatcgctagcaagtatggtgtttcaaaagcgactattgctcatatccggcagggtcgatcttatacgagggtggtgtaa

SEQ ID NO: 195283 - DNA, 348 bp, Klebsiella oxytoca
atgtcatcagcggcttcatggtcatacacggccaaggcaactatttggcgaaacctcggcgttgatgagtatggtgattcgctggggttttcccctccagaagttattctttgcgattatgagggtggagttagcaaaagaattggcggaattggcgctgaaattgtcgcgaaaaacacaatatggacagagtacgccatcgcaaaaaacggcgattacatccttataggagaatcagcatcatccgatccgtattcagttgatgccgatgaggtgcgacaggtcattcgctatgccgatactttcgagcgactggctgacgatttcgcgattctgacgggagtatag

SEQ ID NO: 195284 - DNA, 426 bp, Klebsiella oxytoca
atggcggggagagtccgcggcgtacgtgaggcaaaggcaagtatggatcgcctcattaaagatatcaccggtagaaaagcagttcgaggcattcaatcggcgcttctcattcttggcgcagcatcagctaaagaagttccccgcgatacttccacattgataaatagccagtttcgggaaattgacttcaacggaactcttatcaccggcagggttggttattctgctaactacgcaatttacgtgcatgaagctccggggaaatacctaaacacgcaaacagatcgtccagtaagggcaggagaggcgccggggtcaagaggggtgatttggggaccaggtggtaacccgaaattcttatattggccagctgttgataatcagagcgagatgtacggggccttcaaaaaggagatggaactatga

SEQ ID NO: 195285 - DNA, 669 bp, Klebsiella oxytoca
atggcggtcctgaaagacataggagagctcggcataagcgatagtctcgaaggcgggagggattatgtgttgcgcccatcattcgaagcgatggccaggcttggggagcctgaagaaatagtaaagatatatgcagtaattaacggagtcgatgcacagcaccttttttatggctgcatggaggttttctgtggcattcccaactggatgacaccagtactgaatagccttttagataaagtattgtccgcctcaatgctagttttgcaggcgtgttgcgaagatgatttgactggcgcgattggcgaatggtgtgagagggagggtaaaatagtgtacctgccgggcatcatgcccaaagaggatatcgttactctcgctaaagagttaatgctgcacggcattatagggaacgccaaagttaggcgcctacaacgacatgaagcaaaggaaactacaaccgagtttaatgcggctgagtacatcgcagccgctcagacccatttcaacattggtctgagagaagcttctcaactgacgatgacggctttccaattgctgctagctgcaaaatatccgaatcaaaaaggcttcactagggatgagtacgaaagtatcgccaatgaatatcttgctaagcaggctgcgcgccgaaagagaaaggggtag

SEQ ID NO: 195286 - DNA, 483 bp, Klebsiella oxytoca
atggataaatttgacagaaaccttcaacgcgaaattcttaaatgttgtatagacgcctacccaaatgccatccgagatctgggtgatgattaccgttgcgacgccatatcttcatcaccgaaagacaagctgttagcgaacctcttctatctttctgggcataacctgataacgatatctcccgggaaaagcgtaatcgatgaggactcagcatacagcattcttgattcagcagagataacctgccgaggaatcgattttatgcaaaatgatggcggtttgggcgcaatactcagcgtccagaccatcaaatttcatcgtgacgcagtagttgtactggaagaccttatcgcgatttcaagtatgagcgaagagcaaaaagaaatagctaaatccactcttagtgggctatccgctgaagcactcaaaactattgtgcaaaccttaacttctgttggactatcaattctgatagggaaataa

SEQ ID NO: 195287 - DNA, 906 bp, Klebsiella oxytoca
atgacaagtatagcaattcttgaagcagttaacacctcttacgtaccgttcaacggccagcagattatcaccgctatggctgccggtatcgcctatgtagcgatgaagcctatcgtcgaaaacctcgggatgagctggggtactcagcagcagaagcttatgaagtctttggaaaaattcaactgtattcatatgaatatggttgccgccgatggcaagctgcgtaagcttctgtgccttcccctgaagaagctcaacggctggctgttcagcattaaccccgagaaagtccgcgccgacatccgcgacaagctgatccagtatcaggaagagtgctttaccgtcctccatgactattggacgaagggaaatgctgagaacccacgcaaaactcagcagtccacagcgaagcaactaactccattgcgccagaccgcagagcggttaatcgccaccggcatgggaagaatttacccggacatctggaaatttgttcatcagcactttgagattgagcacatcaaccaacttaagccttctcaaatttctgaggcggtggaataccttgacgccttggaaggggagttcttggggaaacagcaggtattaaccagtcagaggtcaacgcaatttaccgataatgagctttgcacgctgtgctggttatggaacgcgtcagagtatatgcgagaaaaaattgagctagtttatccagcacttcgcaccctaaagtctgaatttgcaggtaatttttactcaatgtcctttgagtacaaaaggacattggatgaggcaaagaagctccttgatcgagagacaaaagataaagttcctcacccttacgatatgtcagatgagaactggcgccgagtgttgccgcggttgcgtcaaaccatgttggactaa

SEQ ID NO: 195288 - DNA, 504 bp, Klebsiella oxytoca
atgaaaaagaagatattagctttttttatagccgcaatgcctctggtatccaatagcgctgagtttgtaacggaaggctcttggcaggttaagaaagaagaaaacaagatgaccgatatgactgatgttgttgccattaaccgatctcctgatgtttatacgcgacagggaattgaaagaagcacatctatggtcatcaggtgtaaggaaaataaaactgaggcatatctatctgttagcgagtatctgggcagcgacgatccggtcgtaacagtaagatttgatggtggcaaaccgcaaaagcgtacttggactggcgcagagggtggagaggctgctttcagtaacaaagctgtttcatttatcaaagaaatgtcttctcataaaaagatgattgttggattcgaaccctacggttcgactatgcaagttgttgagtttgaccttacaggtatagattcaatcgcagcggaaatttccagtgcatgcaaatggaaaggttaa

SEQ ID NO: 195289 - DNA, 306 bp, Klebsiella oxytoca
atgaccacgtttaatgtagaaatgcatgaagatatcgttatctggctaaaaaagagctattgcccagagatagtcctggatctgccatcggtgccggaacccggcgataagctgtggctgaagagtatgcaaggtccatatgttgtcgaaacggaaagatgcatgatcgttgagtcgtgctgcgtttcacgtctacggccgactgtgcgtctggtattggcgtttggcattgtaactaatcaagggcacagtgaattttgcgaagagtgtgcctcttcgagagaggtgccgcatgcaccattgtaa

SEQ ID NO: 195290 - DNA, 2121 bp, Klebsiella oxytoca
atgagtacatatcataatgatcaccccatactaggtggccaaaatgaccctgatttattaaataggcttgatttttcaaatcatttggccaatattttactgttaaatcacgatgatgattgtcttactgtgtctatagaagcagaatggggatatggtaagacatcagtaataaatctcataaaaggtgctttgaataaaaaggataccttaccaattataatagaatataatccatggttggctggtcaacctgaatcattgattcaagattttttattgcagttttcttcacaactaaatattaaagataaatcagaagaggctttggaagtttcaaaaaaattaatcgcatactctagtctctttagtgttgcaaaacttgtcccaggtacagaaccttgggcatcgatcatagaaaaggttttctcaagatttgggagtgcaactaaaaaaattgctgagctaaaaaaactggatcttttaggtagaaaaaaacaggtggaggaagcaataaaaaaaataaagtatcctatagttgtaataattgatgatattgatcgattgactcccgctgaaacctttcaagttttacggttgattaaagctgtcgcagatttctcaggtacttcttttttactcgcatttgatcctaattatctaatttctgtacttgataaaaataatatcgtcaattcttcggagtatattaataagattattcaacttcgagtatctcttcctgtgatatcagaaagggatatgaatgaacttgcaagcgcagagctggaaagattaagtgataaatctttaactgaaagattcgaaagtgatcaagagagactgagctggatttatcataattattttaaacaactaattaagaaccctagagaattaaagagattttttaaccatctaaggttcgttttagagcaaattgaagggcaggtatgtttttctgatctctttgctttatctctggtcgccactaaatcgaatttggtttacgagcatattaaaaaaacaccagaagcgtacattggaaagagattcactaatgatgggcttttggcggataaaattcaagatattgtggataggtttagtgatgaaagaagtaagaacctgaataactttcctagtcgagagcgtaaattgatgctggaactcttaggcgaaatatttcctcttttacagtccgggggatattctcattatggggtttctgagcccgataccgcgggaagagtatctgcaccgcaaaggctccatattgcctttcattataaaactccagcaggatatatctctgatcaagatattattagtttcattgaagggaatgttaaaagggatgaatttctagaggatgtgctatctcaaaatgccgaagaaagattttttgaaatgatgactatgtattcaggttattgtaaacctaatagttttgaagttttaacgtgcatttatgatacttttctgttttctcaggaattgaaatcctccttggaaaaaaaccttggctttatgactaaagatctttatagatggattaattggcttactaataaaattatatctgaaagtgatgataaatatgagctaataaagagtattgtaggaaggcatgagaatgcaccatttggtgcagacgttttatacaaaactcgagaccagattcaaaatgataataatgacaagtcgtggattagtattgaagagttggctgagcttgaggatatctttaagcaaatggctattaaggttttgaatgacagaatgtattttgattgtaatcttgagtctcacatatttttcgaattaaaaagggtttctgttcaatgtgcgtcagagtttatttcttctatattatcaaaggatggattaattagagtgtgtgagatcatttgtgaaacaggtaacgattcaacaaatggtccttatattaaatttgatgaaaaatactttggagaaatagttgatataactaaagtccggagtgaagtcaaaggtttagatatttcaatttatcccatacgcattcaagctgtgcttaagagcattcaagatggaaaaaaatattatttacgagatgcaactgttggtgataggtggtaa

SEQ ID NO: 195291 - DNA, 633 bp, Klebsiella oxytoca
atggataccgttggtagcagattaagatttaggcgaaaacagaaaaaacttacgcagcgggatattgctgagtgggctggtgtcagtgcctctgctgttacccagtgggaaagtgatttgactaaattgtctggagaaaacctgattctggtttgtaaatgcctgcaatgttcccccgagtggctagtttttggcacgggggatatcgaaaacggcattaatataaatctaatctcaacaagagaggttccactcatttcttgggtgcaagcgggtaattggaccgaggtaatagggaaccctagcaatgaaatggtgaaaacgacgcgaaagctgtctgattctgcctttgcgttgagagttaaaggacattcaatgacgtcaaatcaagagcttagcattccagatggttccattgttattgtagagccggagtatggttttgttgatgaagctaatggaaaaatcgtcgtggctcaaaccgtttcgggcggtgaagcaactcttaagaagttagctattgacccgcctttttcatacctaatgccactgaatccgtctttcaaacctatcgagatcaatcaagacaccaaccttatcgggatagttaagcaaatcatcatagatctctaa

SEQ ID NO: 195292 - DNA, 288 bp, Klebsiella oxytoca; identical to SEQ ID NO: 95407

SEQ ID NO: 195293 - DNA, 948 bp, Klebsiella oxytoca; identical to SEQ ID NO: 134297

SEQ ID NO: 195294 - DNA, 1680 bp, Klebsiella oxytoca; identical to SEQ ID NO: 10332

SEQ ID NO: 195295 - DNA, 1695 bp, Klebsiella oxytoca; identical to SEQ ID NO: 31949

SEQ ID NO: 195296 - DNA, 612 bp, Klebsiella oxytoca
atgaacagactggttaggcccaccatttttttgttttttattctaataatgccattttcaaacgccgcaagcagagaggaactcgagaagctgtattcaatgcagatgcccggcactgtcattcagtgtaagagaacagatgaaacgttttttacaaaaataagaatgatttcccggtatacggttacggagcaaagtgaaaataaaacaaaaatggatgggtgggttgccatgtacgccaccggtctgaaagcgttacgatttgaagctgaatttaaagctacccggacaatgctggatactcgtgatatgtgggaggtcgaccccgactcactggttatgaaagtatcaggtgaggatgcaaaacgctttaaaaataagggaggggttgattttttcagggataatagcaggttaaactatgacgatcactctgatattcgatttactacctaccccgattatattatcggggaggatgaccccggattctttacatcaaaaggcgcagaggaatgtaccactcgctttgctgacagttttcccgcggggaaagccgggctgaaggtgaaggagcataacagtaataaggaacacaaccatgaaaattaa

SEQ ID NO: 195297 - DNA, 273 bp, Klebsiella oxytoca
atgcagatggtaagtatatgcgtatgccacacctatgcagatgcccggcatatggatatgttgaacctatgttgtattctctcttttcccggtcagatccgaaaaaaggtagttccggatctgccggtcgtcatccggccccgccctaccctccatcacaatatgcagtggctctctaagctgcaggagctaccagatgttgtgttcctccccagccccgtgacccgcccccccgcggccgaaaactgcggtatgattattttgtgggcgtga

SEQ ID NO: 195298 - DNA, 213 bp, Klebsiella oxytoca; identical to SEQ ID NO: 168455

SEQ ID NO: 195299 - DNA, 3183 bp, Klebsiella oxytoca; identical to SEQ ID NO: 95419

SEQ ID NO: 195300 - DNA, 981 bp, Klebsiella oxytoca; identical to SEQ ID NO: 95422

SEQ ID NO: 195301 - DNA, 372 bp, Klebsiella oxytoca; identical to SEQ ID NO: 95427

SEQ ID NO: 195302 - DNA, 840 bp, Klebsiella oxytoca
ttgcttaacgtgagttttcgttccactgagcgtcagaccccgataagcaccgtcagcgcccccgtttgcccgccagcgttgaggataagcaccttcagcgcccccgtttgcccgccagcgttgaggataagcaccgtcagcggtcacgtttacccgccagcgttgaggataagcaccgtcagcggtcacgtttacccgccagcgttgaggatgagcgccgtcagtggatccgtttacccgccagcgttgaggataagcactggcagcggccctgtttacccgccagcgttgaggatgagcaccggcagcggccctttttgcccgccagcgttgaagatgagcaccggtagcggatccgtttacccgccagcgttgaggataagcactggcagcggccctgtttacccgccagcgttgaggatgagcaccggcagcggccctttttgcccgccagcgttgaagatgagcaccggtagcggatccgtttacccgccagcgttgaggataagcactggcagcggccctgtttacccgccagcgttgaggatgagcaccggcagcggccctttttgcccgccagcgttgaagatgagcaccggtagcggatccgtttacccgccagcgttgaggataagcactggcagcggccctgtttacccgccagcgttgaggatgagcaccggcagcggccctttttgcccgccagcgttgaggatgagcaccggtagcggatccgtttacccgccagctttgacactaccagcgactacagtcgacattaaaatcgccgtgacctgctgcagcgtgatatacgcccggctggcatcaaaagaatcttaa

SEQ ID NO: 195303 - DNA, 771 bp, Klebsiella oxytoca
atgagcaccggcagcggatccgtttacccgccagcgttgaggatgagcaccggcagcggccccgcttacccgccagcgttgaggatgagcaccggcagcggcccactttccccgccagcgttgaggatagccaccgacagcggccacgcttacccgccagcgttgaggatagccaccgtcagcggccccgtatgcccgccagcgttgaggatgatcaccggcaacggccacgtttacccgccagcgttgaggatagccaccgtcagcggccccgcttacccgccagcgttgaggatagctaccgtcagcggccacgcttacccgccagcgttgaggatgagcaccggcaacggccacgtttacccgccagcgttgaggataagcaccgtcagcggccccgcttacccgccagcgttgaggatagctaccgtcagcggccacgcttacccgccagcgttgaggatgagcaccggcaacggccacgtttacccgccagcgttgaggataagcaccgtcagcggccccgcttacccgccagcgttgaggatagctaccgtcagcggccacgcttacccgccagcgttgaggatgagcaccggcagcggccccgtttccccgccagcgttgaggatgagcaccgacagcagccccgtttgcccgccagcgttgaggatgagcacctgcagcggccccgcttacccgccagcgttgaggataaggggtctgacgctcagtggaacgaaaactcacgttaagggattttggtcatga

SEQ ID NO: 195304 - DNA, 507 bp, Klebsiella oxytoca; identical to SEQ ID NO: 23325

SEQ ID NO: 195305 - DNA, 657 bp, Klebsiella oxytoca
atgcaaaaaagtaatgatttcaatgatttggattatgaggaggcttttctgtcaaacccatgtaagagagacaaagctttaacttatgctcttgaaatacggaagttcgaaatagaattatattggaaaagggccacttatttttggactttcattggggcaagtttggttgcattcattgctattcaatcatctaacagtttattagcagagtataggggagagcttactttattagtgggatgtttaggagttgtcttttcattcgcttgggtttgcgttaataaaggaagtaagttttggcagcaaaattgggaaaaacatgttgatatgttagaagatgatattacaggcccattatataaagttgtagccaattctcatttaggaaaaaatgagagaagtgtcctaaataaactatttttaagttcaaaaccatactctgttacaaaaattaatcaagcaataagctattatgtgttatttatatggttatcggttttatttagggaagtgattaagttgaagctttatgataatcataattggtattgtatagccatcctggtattatctttttcattttgtctttccatgggttttgcctgtaaatcttctatgactttttctaaaagtgaatgggtaaaaagaaaataa

SEQ ID NO: 195306 - DNA, 483 bp, Klebsiella oxytoca
atgtataatcaacaacttagcactcttatagtatctttggttgatactgataccaaccgtataatggcaaatcctggtgaagatgctggtaaaggtagccaatacatatggctgagtaaagacactcttgattttttccctccattagatcaaaaaaatgatcgggaaaaagttgcagagtatactctcatcaatttaaattatgttgacctaaatgaaatacgcgaagagagagttacttacgaagccgataataacatggatgtcaggcttggtactgggagactacgatatagaaaaatagcacagcctggggatttagcctgtataacaagaaccggagttaaagaatatcaactaagaataatacaacaaggctctgcctcatatgatctattaaaagccaaagcaactacttctatcggtcataaaggtaagaaatttggtttcttggataacgaaacatttttccaaattatataa

SEQ ID NO: 195307 - DNA, 1512 bp, Klebsiella oxytoca
atgctgaattttaaatttccaaattacaagctttttgaatatgaaaaattgcttgcaaaaaaagagctgtctttgatttttccatcagatttaattcttgattctgatatcggttatcatgttcaaaaaaatggtttaagtaatgatgagaaggaaaaaatcagaaggttaaccttcctgaggttgataagtgaagacgagaattcagtatcgtcattacaagagtttaaagagaattcctgtgtcaaaagtgggcatacaaagaggcagtcaactcgatacggggcacatggactacatgaatataaaggtaagttcaatcctcagatagtatcttctattttaaatattttagaagttaatgaaaagtctaaaattctagagcctttctgcggtagcgggacaaccttatatgaatccgcattaaataatttagagggggtgggtttcgattataacccattggcctgttttattagtaatgccaaaatctctactcttagcatggatgtaagtaaatttacattatttgctcaccactgtatcgataaagcaatagagttatctcctaagtttattattgaagatgacgttcgtacaatttatcttaagaaatggtttcaaatcgaaactcttaaaaaattagaaactcttcgagctattatttatgaaagtactaatgttaagtttagaaatctatttttagcccttgtgagtgatttagttagagaatattccttacaggagcctgccgatttaagaattcggagacgaacatccgaaatgccgaccactgatttttgggatgctgtcaaaataaaagtgagttcgttttgtgctaacatcaattcaatatgtaatattgaagtggattattctgttaattcagaagctatcaatattgatataagagatagtaaatctctaaaaggatttcgagaatttgattgtgcaattaccagcccaccttatgctactgctttgccttatattgatactcagagacttagcattgtatggctaggtctggcttcgcctgatgaggttaaaaaattagatcgtgagttaatagggtctcgtgaattatcaccctcgcttaaaaaagatctaatgaattctttaaacgaaaacttttttaagattccagacagcctacataaactttgtcttgacatgtccaatagcttaactgaaaaagatggattcagaagacaggcaatgccttttattgtatatagatacttcgctgacatgcaaaaaatgtttgaaaatgtttattctatgatgaaggccaatgcaaaatttgctttagttgttggtcataacacaactacgcttagtggtagagtattcaaattagatacaccttcatatcttattgaaatcgcaaaatcaattggttgggagttatttgaggacattaccttagaggtttataaaagatatgacctacataagtcaaactcaattgacgctgaaagattgattattttgaagaaacacagggcctga

SEQ ID NO: 195308 - DNA, 1110 bp, Klebsiella oxytoca
atggcagagcttataactgagttggattgggattttaaagaaaaaattattagcgattctattcatggaatccacccttaccctgcgaaattcatacctgagatccctttccagttaattaattatttaggctgtgataaaaatacttcagttcttgatccattctgcggttctggaacaactctaaaagtagcccaatcattaggtttaccatgcgttggaattgacctcaatcctatagcttgtttaatttctaaagtcaaaacaactaaaatccctcctaactttggcacggttttttatgacgttgtggctgatgcaaaatcaagaaaggttgatattgatgagttggaaagtattccaaatatcaatcattggttcaagtctgatatacaagttaatttgttgaaattgaagaaaagtatacatgattatttggggcacgatacttttgacgcgttatgtgttgctttctcgtccatcattgtaaaagcatcgaatcaagaaagcgacacacgttatgctgctataaataaaaatttagtagcagaagatgtatttagattgttccttgtttcatgtgagaaactgaactcttcattgttatacaatagtagtgatttcccatgtcaaattattaataaagatgtattagctgttcaaccatctgacattaattcgactgtgggacttgttgtaacttcacctccatatcctaatgcatatgaatattggctatatcataaatatagaatgtggtggttgggctttgatccaaaagaaattaaagaaaaagaaattggagcgagagcacattttttcaaaaaaaatcatcatactgagagagatttttaccatcaaatgtatggaactttacagcttatagattctgttcttataacgcatggacacgctgcttttgtagttggtagatccataattcatggtaaaaatgttgataatgctggccttattgttgaggcagcagaaaatctcggttttgacgttgttgaaaggttcaatagaactatgaattctaatagaaaatcatttaatctttcctacgcaaagattaaagaggaaacaattgtggttcttaggaaaaaataa

SEQ ID NO: 195309 - DNA, 315 bp, Klebsiella oxytoca
atgaaaatatactcaatcctcacagttattcttacctcatttcttctaaccgcatgtaacaatgaaccatcgcaagacgatatatacaatgttttcaaaagtgttgtagatagaacaaatacaagtatgaaagctcttgattcaagagttacagaaaaagatcttttaagaatcgattacgtgaagaaagttagttgcacagaagaagcaaacaatatttataactgcattgtcgatgcctctattagtaatatgaaacaaacaaaaccagtaaaactaatcaaatctgatggtgtctggaaagaagttcagtag

SEQ ID NO: 195310 - DNA, 1680 bp, Klebsiella oxytoca
atgcacgaagattatatcaattttgcgaaagcatatatcagatatcaacacacattgaaaccattgaaaaattatggggttattatgatggccttgcgatgtctcgaacaggcccttttgcaggttcagaacactggtctcatttataatgttacagccgttgttttcgatgaggcaatgcagatcgggagtaaatattttgaaggtaacgttttggctaaatgtggaatacagcttgaaaaaatatcaaagtttctgtgtgaacataatcttgtgaagtcaggatatatctcatggaaaaaccatgtaaaacagaaagtcaaaaacaattatcttcctgagattgaggattatcaccgaagcgataagttaccagatgaagaagcattgctcgctattgctgatattttttctcaaaatgatgagttactgagtccaagggataagttcaccagttcagtatttgcacttctactttgttgtccgagcagaatttctgaaattttagccttacctgctgattgtgagattacacaaatagatggcaagggtatcgaaagatatgggttgagattttattcggtaaaagggtatggccctaatatcaaatggattccacgggttatgataccagttgcaaagaaagcgattagaagattactttccttatcacaaaatgcaagagcacttgctcactggtgcgaaaagtacccggataaattttaccgacatgagctttgcccaacagttgatgaaaaagctaaattgaccgttgtacaagtttgccatgcactggggtataatttatttgatcataaatcatgtgttttaaaaattaaaagaacgagtttggatggtgggaaaagtttcttaaaccacaatgattacaactattcattgagtaatttgtgggaaattattagttctaattttagcagagattttccatggtatgataaagaaaaatccataaaatttagtaatgctttatgcttgctcaatactgatcaattttctttatcaagaatgacttcaattttcacattttacaaacctactaaaagtttctttttcagtgacatacaaagaaaaaaaagctatgagatgaattataaaaatatattttcccgatatgggtattatgatgatgaaggtaaaccactacttattcgctcacaccagccacggcaccttttaaacacaatagcccattatggtgaaatgtctgaactggatatagctaaatggtctggtcgtatcaatgcgaatcagaacagagtttataaccatgtgtcagaagaagatatgttagataaaatcaaagctattaaattgaataggagtaattactgtcaaagggagtcaatacccacaaatgaattgacaattgattttgataaccttaatcaaggtgcaatacacttaactgaatttggttactgtgtacataactatttaatcaagccttgtgcaaaaattaatcatcttattgaatgtgataatgaaacaccggacattaactcagtagatagaattagactgcaatctgtccgagagaaagtaatgcaattaaagagaataactcagatcgcttatgaaaatggtgattatggtgcagacaaatggttgcaacaccatgaaaaaaatttggaaagaattaataagcttttaaataattaa

SEQ ID NO: 195311 - DNA, 543 bp, Klebsiella oxytoca
gtgattttgtcgcccgggcaaggcgcttgcgccgcggcccggggaaataacacttcggccgtttccggtttcccccggtcgcgctgcgcttaccggggctacaggttcaccgccgtttgccgttttgtagccgggcaaggcgcttgcgccgcggcccggggaaatagcactgcgcctgctcagacttcccccggtcgcgctgcgcttaccggggctacaggttcaccgccgtttgtcgttttgtcgcccgggcaaggcgcttgcgccgcggcccggggaaatagcaccgcgcccgctcagacttcccccggtcgcgctgcgcttaccggggctacaggttcaccgccgtttgtcgttttgtcgcccgggcaaggcgcttgcgccgcggcccggggaaatagcaccgcgcccgctcagacttcccccggtcgcgctgcgcttaccggggctacaattccatgcgatttttacgccacccccagcagccatttctgcgcgggcgtcaggcggctggcggtttccggcgtcagccagcgctgctga

SEQ ID NO: 195312 - DNA, 306 bp, Klebsiella oxytoca
atgcgcaaacgaaaggcagcccctcaggataaaaatcaggatgctttactcggtgaaatccagcatctcaggaagcaggttcatcagctgcagctcgaacgtgacatactgacaaaggcgaatgaactgataaaaaaagatctgggcatcagctttctgaaactgaaaaacagggagaaaaccctgatagttgatgcccttaagaaaaagtaccccgttgctgagttgctaagcgttctgcaacttgcccgcagctgttatttttaccaaaacgtctgtacgataagtatgcggaaatacgcgtga

SEQ ID NO: 195313 - DNA, 750 bp, Klebsiella oxytoca
gtgttgttggaagcggcatcgatagaaggcgcccaagtatgggcggagcgatttcgtcaggacactgcggcgacagcggtggtgtgtggagaggtgtcgatcagttatagcgccagcatgggggtggctctccttgacccctgtttgcactctgtcgagcaggtgatgctgcaggcggacagcgcgctctaccaggcaaaaaagacaagggtgcaaccaagttgtgggcgcacaagtatttcagaattgagaggagtggcgatgaaggaaaagcaagcagacccgatcaaaacatttcgcgcccaatgggcagtgatgacgttctacgagcgctttgaacaggtgatcgcgctcgcgctgtccgcaatcattgccgttatcatcgtggtctcgctgctgcagctgatctcgatcgtcttcagcctgctgatcattgatgcattcaatccgctcgatcacaaggtcttccagaccgtgttcggcatgatcatgacgctgctcattgccatggagttcaagcattccatcgtgagggtggccttgcggcgcgacagcatcatccaggtcaagacggtgatcctgatcgggctgatcgccctggcgcgtaaattcgtgatcctcgacccggagaccggccccgccaaggtcgcggcgcttgcaggcgcgacactggccctcggggcgacttactggctgctgcgcgagcgcgatgaccggacagccggggaaagctcagatgatcagtcgtga

SEQ ID NO: 195314 - DNA, 348 bp, Klebsiella oxytoca
atgtcacagctgagttttgccgatgtgttcaatatggccagagagagcgctgacaaaagaccggtcacacaggacatgctgcaagggatcgaatgtgtgccctctgtgcagaagatgatgagtgcgcactatagccggagccgtttcatcagcgtgtttaaatccacgggccgccatctggggcgctgggaagtgttcagtgactttttgtcactcgctgccagtgaactggatatcgcccggataagaacgccggagagcatggagcactgccggaaaatcagtgcgcgatacgaggcgtcagatatcgcgaatatgcaggagatgtttgaatcgccacgggtttaa

SEQ ID NO: 195315 - DNA, 198 bp, Klebsiella oxytoca
atgagaaacaatccctggaaaacagagttgaaagtggcccgcagtcaacgcaacaagctgcaaacaatgtctgcccgcctgacagatatgacctgcgaatgggacggactcagtggctggctggagaccgaaagcgagcgactggttgagagtatcgatcaacatattcaggcgctggatgagcaaatccgggactga

SEQ ID NO: 195316 - DNA, 732 bp, Klebsiella oxytoca
gtgatcccttcatcgaattctctggttaccctgaaacctgcccgccaggctgctttgcaggccatcatgttcgtggaagacgcccggttacgaggcgcgcgtttgccctcgatgccacatgtccgcacgttcctgcgtatgctgaccggttgtagccgaattaacagcaccgtcgcccggagtattcccggcctgcaccgtgatccgaaagaccggctgaacaatctgaagcaggtggaagaagcgctggatactctgattgccagtcagggggaagtctgcccgctgccgttgacgaccgatgttcaggctgagctctttcctgaagtgattcacacccgaaccgatcgtcggatgcgacgtgagaatattgcgttcacccggagagtacggcgtgaaggaaaagagatagcgcatacctggttgctgcgacagaacctgctgggtcaggcggtcacggcgcttaactttcagtcaccggagaccgttaacacctggtaccgcgagtgggctgacgagttagacgcgagtgaacttgaacctgctttctggcgctggcagtcgcgattcgcttcgctcagggaactggtctggctgcgctgcagtaatgccccgttgtacgaggttatgcatgaaatcaggtttatcgtcagggagtccggagacagcattcttgagtgggaacgctggcaggtaccgaacaaactggagctgcagaggcgagcggtatga

SEQ ID NO: 195317 - DNA, 432 bp, Klebsiella oxytoca
atgcacacgatcattactaccgatgtcctgaaaaccctgactgccgacgaactggaagactatcgcgccgccggtgaatactaccgccgtgaactgacccatgctgtgatgcgctatatgcagtgtccctcagaatgggctgtgaacggggagtaccgcagcgagtttggcggtttcttcccggtgcaggtccgcttcacgccctcgcacgcgcgttttgacgtggcggtctccagcccgggggaactgagtgagtactggatggtggtttttatcacccggggcggtcagccgttctcagtggtccgcaccatgacggagtttaacccggtacttatcaaccagacgctgagtcttatcgcgtgcctcgatactgacggttactcaattgacagtattatcagcgcgctggcagcggaggacgaactgtga

SEQ ID NO: 195318 - DNA, 1995 bp, Klebsiella oxytoca
atgtcagtcaccgagtctaaagcaaaaacaccggcaaaaaccagcaaaaaagcggtgaaacctgccgaatccgcggccctcaaagccgcactggacgcagcaccgattgaatatgtaacgctctccggcctgaccgtatcgcctctcaatgtccgcgttattccatacccggaggccagcatacgcagtatggccacatccattcacactgtgggactattgcaaaatctggttgtacacacgatggcagagggaaaatcaggtgtggcggcgggaggtcgtcgcctggcgggtcttaatctgctcgccagtgaaaaggaaattgtcgctgagtatccggtgcctgttaagcgcgtcagtgaggacgtggcccgtctgatctccttcatcgaaaacgatgaacacctctcgatgcatccggcagagcaaatctacgctttccgcgacctttctgcgcagggaatgacacctgagcaaatcggtgctcagttggggtacggtggccgccacgttaaatgcatgctcagacttgccgggctggcaccggagcttctggctcaactggcaaaggatgaagtcacgattgagcagtgtcaggcgctggctctcgaaaatgatccggcccgtcagctgcaggtctatgaaaacgtcaaatccacttatggccataccgctccacatctgctgaaaagtgcagttacagatcgggaaatgtcggtaaaaaatccggcttttgagttcatcgggcgcgcatgctatgaggctgctggcggtgtcgtgcgcgaagatctgttcagcgcggatgacggagagggcacagccgacaaagcactgacggagagccttattcaccagaaactctctgcgctggctgacgaaattcaacaaaatgagggatgggcatgggcacaggttcgcagcgatcccgttcgtcactggggggatgacgcccgaatttttcagctgacgcctgcacccgaggcaaatttcactactgaggagcagcagcgtctcgatgagctctacgccacacaggcggcaactgaaacacacaatgatgaatatgccattcaggcactgattgacgaaatagagaacgccgctgtcaaccgtgaatggtcgccggaacagaaggctgaaagcggggtagtagtcagtttctggggcggtgaagtgaacattcagcgtggtgtccgccagattgccacggagcgggagcagggtgatcaggctgaccggggaaaaaacaccgtcatcacaaaaaaaattgagaaacccgtggacagcatcagcgaaccgctgctgaaaaaaatgtcttcagagcgcactctcgcggttcaggctgcgctgatgcagcaaccacaaaaagccgtggcgctgatggtctggcggctctgcacctgcgtgtttgactacggttgtatgtcccccagccatcccttcgaaatgaaagtcactgaacatcacgcatccctcgtcagcgaagccccggcaggcaaaaccggaaaagcctggctggcgctgatgcaggaaaagtctcgtctggaggggctgttaccggagggctggaaaaaggacttcaccacatttctcactctcgacggggaaaccctgatggccctgatggcgtactgcaccgccagctcagtgtatggcgtgcagacccggactatggggcatacgacccgaagccccctcgatggcgtggaaacggcgatcggtttcgatatgcgtgactggtggacaccgacagccgcgaatttcctcggattactcaacaaaaaacagattgtggaagcactgacggatgccggactgagtggggccgcctcagatgcagagaaaatgaagaagggtgacgccgccagccatgccgaacagtggctctccggtacccgctgggtgccgggatggatgcagtccccggatgtcgcaaagccggacgatgcacaagctgaaccggacactgacgaacccacttcacacgctgcctga

SEQ ID NO: 195319 - DNA, 249 bp, Klebsiella oxytoca
atgaaccacaacgttattcctccgctgaaatcactgccggatggcacgtttacccgtgaacaggcaactgaggtggcagcactgtatcagaacgtggcgattgaagacgatcagggtacccattttcgcctggtggtgcgtcaccgtgaggatggcagcatggtctggcgcgtctggaattttgaacccggcggtgagtactggatgaaccgttatatccgtgactacggggtacgcaaaacacaataa

SEQ ID NO: 195320 - DNA, 549 bp, Klebsiella oxytoca
atggcatcacgtgggattaacaaagtcattctggtcgggcatctggggcaggacccggacgtgcgttatatgccaaacggcggcgcagtggcaaacctgacgctggccacgtcggaaacatggcgtgacaaacagagcggggaactgcgcgaaaacatcgaatggcaccgggttgtcatgttccgcaagctcgcggaagtggcgggcgaatacctgcgtaaaggcgcgcaggtctacatcgagggccagctgcgcacccgcaactggcaggatgaggccggaaccacgcgctatgtcaccgaggtgctggtcgggcagggcggtaccatgcagatgctgggcggtcgtcgtgagagcagcccgtctcagaacgctgttccgcagcagcccggacagccgcagactccggcacaacccgctgaagcacctgttgactccccgaaagcgaagggcggcagaaaaggccgtcagagcgccgctccgtctcagcaacctccgcagccgtccccggacgattacccgctgatggatgacgacgccccctactga

SEQ ID NO: 195321 - DNA, 177 bp, Klebsiella oxytoca
atgagaaataacaaaaaaactgaacaaaaaaccaatacaaaccagaaaaaactattcaccgatgaactctggactgctcatgcagctttccctgtaaagaaaaagaatccatcgttcaaaaaaccgggccccactgttttgtcaaatattttaaaaaccgaggcaaaaaatgtgtga

SEQ ID NO: 195322 - DNA, 636 bp, Klebsiella oxytoca; identical to SEQ ID NO: 104002

SEQ ID NO: 195323 - DNA, 480 bp, Klebsiella oxytoca
ttgagaaaaaaactggcatttgcagccctgctgttattatccacacctgcatgggccacggattgttttgatatggctggacgggattaccgaatagatccggatctgctccgggctatttcatggcaagagtcaaaatgggtggtgaatgccatcgggaaaaacccgggaacaggatatggtgccggactgatgcaaatcgattcgcagcaccatactcaactttcgcaatacggtattaaaccggaacagcttctgacagatgcctgtctgaatatttacaccggtgcgtattatctggcactggcgtttaagaaatggggcgtcagctgggaggcggtcggtgcctacaatgcggggttccgcagaacggacaggcaggccatgcgacgactggtgtatgcgagaaagattgaggccatctacagggccatcaaaacaaataaaaattccggacaaccccgacctgttaaaaagtaa

SEQ ID NO: 195324 - DNA, 390 bp, Klebsiella oxytoca
atggccagggtccaagcgtatgccagcgatgaagtggctgaaaaaattaatgcaattgtagaaaagcgtaaggctgaaggggcgaaagataaagatgtcagtttttcaagtgttgcctcaatgcttcttgaattagggttgcgagtttatgaggcacaaatggaacgaaaggaatctggtttcaatcaagctgagttcaataaaatgttacttgaaaatgtgataaaaactcagttttctatttctaaagttttggctatggaatcgctcagtccgcatatacagggtgacgagcgctttgatttcaaatcaatggttatgaacataagagatgatgccaaagaagtggtagaaagattctttcctgataccgatgatgaggaaagctaa

SEQ ID NO: 195325 - DNA, 690 bp, Klebsiella oxytoca
atgtgtgcgacggatcgtagtcaaaatactgtatgtagtcaaactgtatccattcaatacttggtcgaaatgcttaacatttcatcgagtccttccttcattcgtaataatctgggtgagttagttcacacaagccctcttttcgataaacttttttttacaaacaacgatcgaaactcgtggttttcatccatctctgttgatgtcggggtggaattagttaaaacggaaatcagagctctgacaggtgggtctgcttgccttgttcaaaacgttcagataaatgatcaaagatggactgtatttattgaacgtatttctttaaaagaggagttattcagtaaatgggtatttatacaagatggggatgttcttcatgatcgttcaggaagatatgctacatttgcactaaaaatgaataagtacattgaaagtaagtatggagcgtccaattcagattgggcagtttttaacttatatgctattggttgttctcattccactatctctaaaattactggtgtgcaagaacaaacttcaaaaaatgtagtaaataagatcaagaaagacctgcagttttctgacagagaccaccttattatttcgtcaatttattcgttaagttactccagaattattcataatgtaatagatatacttaaaaacagtgttaatggtttattattttaa

SEQ ID NO: 195326 - DNA, 306 bp, Klebsiella oxytoca; identical to SEQ ID NO: 185636

SEQ ID NO: 195327 - DNA, 567 bp, Klebsiella oxytoca
atggaacatggcgcccgactcagtaccacgcgcgtcattgcgctgggatatatctgtctggggacagttacgacgctcagtctgaccaccaacattattcagggtatcaataattatcgcctgcagacggaacagaaagtggcggttactccgatgttatttggtgcaccttttgcggtgtcgcagaatcagtcggatgcctcttatcttgaacagctgggcctgagttttattgcgttacgccttaacgtcacaccggaaacggtcgatgcccagcatgcgcagttgctgagatatgtattcccggggtcgcagaacgaactcaaggttcagctggctgaagatgcgaaacgaattaaagacaacaacgtcaacgccaccttctatatgacgtccgtccgctcatatccggcagagaaccgtgtggatttccggggagaactgaaaacctggatcggcgactccgcaccctataccgaaattaaacactatgtcctccagttttatcgtacagacggtatcagctggctggcccgcttcggagaaataaataatgaaaaaaattaa

SEQ ID NO: 195328 - DNA, 735 bp, Klebsiella oxytoca
atgaaaaaaattaatccgttatttatttccggttgtcttttttttatggcgcctgccatgtccgtcacaatgagcggcacgctggcaccgacggtcgtgccactggcgaatggcggacaggccaatattgccgtgagcaatactgacccgaacctgttcaccgtacccggcgatcgtatcatcgccatcaacagcctggatggcggcctgactaaccaggaacagactgacagcggtggcgccattctggccacggtcagtaagaaaccgttcacgtttattgtggaaaccgagcgtggcctgaatttttccatccgggccgtaccacgtgccggtgtgggccggactatccagctggtctctgagcttgtcggtacacctgggcccgccaaatcgtgggaggagtccagcccgtatgaaagtatcctggtgtccctgaaccgtgccgttcgccagggaagcatgcccgaggattaccaggctgtaccggtgacgtcagaaacgctgcaggtgcctgcgggtctgcgcgcaacagcggaaaaggtctggaccggccatcatctgaaagtggtccgttacagcctggataatgtcacgttgtcatcccgtatggtacgcgaaagcgacttctggcaaccgggcacccgcgccgtcatgctcagcagtcctgccggtcagctgactggcggtggccgtatgcaggtctgggtcaccacatctgagggggcccgctga

SEQ ID NO: 195329 - DNA, 1419 bp, Klebsiella oxytoca
atggcgaatttcaactcgttgattaaacgcaagcagtacctctggctgggtctcattctggtcggtggcgcgggggctgtggccggtgggctgtatctttctgacctgaacctgagctctgatgaagaggcccctgtacagggtgaacccgccccggatatgaccggtgttgtcgacagcagcttcaacagcaaagtggagcagcatgcgaccacagaaatgcaggcgaccgccgctgaactgaacaagcgctttgcatccctgcagggagaagtcgacctgctgagcaaggcccgtactgcggatcaggttcgtctcgacaaactcggtagtgagaatgcggccatgcaggagcaactgagagcgctgggggttaaacccgctgtctcaggcggcgagccggctccggtaccgccgtctcctgcaccgggtccggaaggggagcctcagcccgcaaattatccgccgcagactgccggagccgtaccaccgccgacggcatattatccgggtaatggcgcggtgccgcctccacaggtcagttaccagtcggtgccggtaccgaaccagatccagcgtaaaaccttcagctatgaccgcggcaagaaaacgaagtcacttccgtacattccgtcggggagttttgctaaaagccttctcattgaaggagcggatgcgaatgcgtccgttaccggtaatgaatccacctcaccgatgcaggttcgccttatcggacgcgtggaaatgcctaataacaaaacctatgacctcaccggttgctttgtcgggctggaagcctggggtgacgtctcgagtgagcgtgccatcgtccgtacccggaatatcagctgcatcaagggggataaaaccatcgaccagccgattaatggtcacgtgtcctttatgggcaagaacggcgtgaaaggggaagtggtgatgcgtaacggcaaaatcctcggctgggcctggggggcaggttttgttgacgggattggtcaggggatggagcgggctgcacagccgtccgttggtctcggagcaacggcgacggtcggcgccggcgacgtcctgaaaatggggattggcggcggggcttctaaagctgcgcagaccctcagtgagtactacatcaaacgcgccgagcagtatcacccggtcattcctatcggtgcgggcaacgaagttaccgtggtgttccaggatggttttcagctgaaaaccattgaagagctggaagcggagaagaacggtcagcaggcgcaaaaccaggcgcaacccgaacaacccgagaacaggtcgcagcaatccggcgggaacctgaatggctttaataccgatgagatgctgaagaaactgggcaaacttgatccgcgtgagttttctccgggtacagcgtctcagggggaaaacaatggttaa

SEQ ID NO: 195330 - DNA, 327 bp, Klebsiella oxytoca
atggttaagtctgtcctgagcttaattctgtcatcgctgcgctggattaactggctgattcagtatgcggtggtatatccgctggccatgatgatgttgctgattgtcgcggtgttctggaccgggaaagtcacacccgggcagatgctggtgaataccatcgaatcggtgcagcgagagggatatgtcatcaaggactgcacggggcctgcttcgcgcggtgaactcaatgctgatgcggtcaagccattactgcctcctgttttaccggaagcgctgtggtctttgatcggacacctgcctgcagagccggtgctacatgggtga

SEQ ID NO: 195331 - DNA, 570 bp, Klebsiella oxytoca
atgaaggaattaatgctgttaattcctctgggcagcgctttgctcttaaccgggtgtgcgggcacagagtcagattttgaatgtaatgccacaacctcagatacctgtatgacgatggagcaggctaatgagaaagcgaaagcccgggaggaaagcgcctccgcaaagccggctgcagccgggttgccacgactggctgacggaaatttcagaacgtcgtcgccaaattcatacccgctaccgccgcaaccagttattaattctgggcgtaatactgctccaactgtaacggtgagcaataaatccgggttcctggatacggtaccggtcaatcatgatgacgtcctgagaacccggaccgttccggtaaatatcaggccggttagtgtcagtacatatacctctccttctacggtacccggcaattatccccggccattaaggaaaggggagcagaccgcgtcgttatgggttgcgccgtatgtcgattcagatgacgtgtatcaccagccgacaacggtcgtatttgtggtaacgccatcggcatgggggcaacctcgtattaattaa

SEQ ID NO: 195332 - DNA, 480 bp, Klebsiella oxytoca
atgactgaaataactcagcatgtcgggttaatttttcgggggttacagctatatttttatggcgtcaatctgggagggttagcggggggatttttagctctcttcgttacagcaggtatccttgctgcgtcagtatcctgtatagcttgcgcagcaatctttgctctcccgaagaagcatcatattcattctggcatcataaaaatttttctggggagcgcgctggccgcaatagcgggtatcgtcggaacaggggttgtcatttttgtcactgtctcaaatagggagctggaagcgggaaggcactggaaaacagaatgcaaactgatggaagtaaacattcagacggggatattttcagaaccggtcaataaactggattgtgccggcgttatcattaatgtacggacccgaacatataatcgctatatcctggaatggaaatcttatgagaatgataaaaacaatgtgatgaattaa

SEQ ID NO: 195333 - DNA, 285 bp, Klebsiella oxytoca
atgggaagtgaaaaattgtttatagtgagtggggttttagtcagtgcaataatgcttttctctttcattctcaaaaacagtcaacctgatgtggagagtctgattaagtcagggagatactggaaggcaacgtgtgtattaaaagaagtaaatatcccggctgggttctttcatggtgaaatgaaccgccttgattgcgagggggttgtcacgaacgtgagtaccaaaaaatataaccaggctacctcggcgtatcaggatagtttgcgaaacaaagtacgttag

SEQ ID NO: 195334 - DNA, 186 bp, Klebsiella oxytoca
atgcataccgttatttttctggtgatgattataaatcctggtgtccacagcagctggaccattacacccatgcccaatactgatgtatgcctgaaaatgctaaaagacattgaagccaggggagggcgtggggggggggatacaataccggagagtgtattgaaatcaaaaccagcgaacctttga

SEQ ID NO: 195335 - DNA, 405 bp, Klebsiella oxytoca
atgagagccttttatcttgagggtagtaatattacctggcttaacgtgctgtgcattcttttttttgttatcggtgttgtcggtgcgctggccatgtttgttatccgtgataaatttaatctgcgagtctgcagagctaatctatttttctttagtgcgcttatggcagtggtttcgttagccatgcttatcgtcttcaccagtgagtcattctcgatggatgagctggaatccgggagacactggaaaaacgattgtcagctcctggaggtaaacatccagacaggttcctttacgtcgccggttaataaactggactgtgccggtatcatcattaatgtgccgaggcttcagtatgatgagtatattcaccagtgggaattgtataaggataaaaataaatga

SEQ ID NO: 195336 - DNA, 369 bp, Klebsiella oxytoca
atgaaagagatttttttgaaatttattctttgcaagaaaatagaaaggcaagaattgaagtttcttaacctgaaatatgttttttttgcaactcttcttttctttgcgacagctggatatctttttttgcagtatgaagagtttcttgatatgcagtccgccactcctgaacaactgcaaagtattattcatgacacaccttgtgcaggtgatgcgttacggatagctcttcaaactaacactggcagttcgtcagagtcattaacttttggtgacgcaaaaaaaatggcctcagaatgcaaggataaagaagagtttaacgcagttcgtgaaaagcaacttaacgctctgaacgatatgagcaaatga

SEQ ID NO: 195337 - DNA, 390 bp, Klebsiella oxytoca
atgatggtgtttttaaaaagatatggatttttatttattccacctgtctattggttcatctatctgggcgccagactgacatacaatggactggcaggggagtttactcctgagttttttcagagtatccgtcacgatggtgtgtttattatttgtggtttgttggctttttatttttgttgcttgaggattgaggtcagtgatggggaactctcaggggtactctttttatgtattatttcttttcatgtgatcccgttagttattacccttattttttgtttatggcaaggggcgattttgtgggatgttatttgtgcctggcaaatcggcacctccatgttgttactattttttatccctgtgcttaccttttattacggtaattaa

SEQ ID NO: 195338 - DNA, 393 bp, Klebsiella oxytoca
atgggaaataccaccgaacaacagaccagaacgacgttcttcacttttcgccggagtctggtccttaccgtcctggtgagcctggtcctggcgataaatgtcggtataacgcaccttatgctgacccacaccacgcctcgtgtggtcgcctttgatatgaagaaaacactggacagcttcatggacagcgtcagtcagaagcagctgtcagaggcgcagtcaaaagcgctctcagaccgctttaatgaagcgctggagcagagcctggccgactatcagaaaaagaatggtgtcctgatcctggtttcaccggccgtggttcagggcgcacccgatgtgaccctgaaaatccagaccgacattgccagccgaatgaagggagcgcgggaatga

SEQ ID NO: 195339 - DNA, 237 bp, Klebsiella oxytoca
gtgatcgttagctttgctaaacatcctggcgtggacttctgtgtaaggttgctgctgacagccgttattattttccccgtggtttacttttcctgggatgcggttatcgggacaacggccagtgattatattgcgagtgtcatttttattcttgttacagggtttatttggtttttgctttatctgtttttttcggcctttgagaggctgttaaaaaaagaaaatggtgtgaaatga

SEQ ID NO: 195340 - DNA, 753 bp, Klebsiella oxytoca
atgggaaaactacatgccgccatactggcggggtgcctttgttgcaccctgatgccggcctgggcgaaagatgcgggctggcagtggtacaacgagaagctgaaaagaccagacccggagacgcgagccacgccaccgccaccaccggcaaagcaggacatcctggagaagctggcgcagctgcaggcggccacaaagcgctcgctttacgaggctattctttacccctcatctgataatttcgtgaagtattttcggctacagaactactggacgcagcaggctggcctgttctcgatgagcgcgaagaaggccatgctggaaaacccggagctcgattacaacctgcagtacagccactacaacggcacggtgaagaatcagctggctgccgactacgccgaacagcgtaaagccatctccggtctggcgcagcactatggcgtgatgttcttctaccgcggacgggaggcgatcgatggccagctggttcaggtgattaaaaacttccgtgaaacctacggactgagcgtgataccggtctcggtcgatggtgtcatcaaccccatgctgcccgacagccggacggaccaggggcaggcgcaacagcttggtgtgaagttcttccccgcgatgatgctggtcaacccgaaaagcggtcaggtgaaacccctcagttacggctttatcagtcaggacgacctggcgaaacagttcctctatgtctccagcgactttaaacccaatttttaa

SEQ ID NO: 195341 - DNA, 237 bp, Klebsiella oxytoca
atgcgaaagatccgattccccgatttggatattacgggaatgtgggtgctggcggttggcgtgtttttccacctgatagcccggctcgtcagaaaacagcctgagatggcggttcaggtcggagagatcctgggactggggatggtgatatttggtggataccgaattctgaatgccctgattgctgaagctgaaaaacaggagaaggcccgtgaaaagcaacctgaagacaattaa

SEQ ID NO: 195342 - DNA, 429 bp, Klebsiella oxytoca
atggatagtctcaacaaaatatattcttcgttacccgtactggaaagaaataaacgcctgaagctatcacggcaaaagagattcgatgtttattattgtctcgcttttatgtttggtttttccggattgtgcctgtggtggggaagccatgcgtatttcggtttattgtctgacctgttaaccccgccggaaaaactggggacggcaaagaacgtaatggatattttgaatgccctgatgtatttcgtgccctttattcttttttcactttccattggttgtctggcaacggctttgctgggagtactgatggctgaactggctttctggtttgagtatgcctttgaaaaaagcttccagcgatatttaaaccgcgtccacggacggaaaaataaaatgaaagaaggagggcctcatgctcattcgtaa

SEQ ID NO: 195343 - DNA, 1371 bp, Klebsiella oxytoca
atgctcattcgtaaaccattatcagtgctttgcgggatgttgctggggatgtcatttacggcggccgcagatgttaacggcgacatgaacaacttcttcaataagctcgggtttgcctccaatacgtctcagccacaagtctggcaggggcaggcggcaggttacgcttccggcggttcgctgtatgcaaggacgcaggtgaaaaccatccaactggtcagcatgaccctgccggatattaacgctggctgcggtggtatcgatgcgtatctgggctcgttctcctttatcaacagcgagcagatacagcgattcggcaaacaaattatgagtaattccgttggttacttttttgatctggcactgcagacgactgttcctgagattaaaaccgcgaaagattttctgcagaagatggccagcgacatcaacagcatgaacctcagttcctgccaggccgcacagggcattgtgggcggtctgtttcctcgcactcaggtggcgcagcagaaagtctgccaggacatcgccggcgagagcaacatcttctcggactgggctgcttctcggcagggctgttcggtgggcgggcagatggacaaggtacaggacaaagccagcgacaaggacaaggagcgggtcatgaagaacatcaatgtcatgtggaatgccctgtcaaaaaatcgcctctttgatggcaacaaggaattgaaagagtttgtgatgacactgaccggcacgcttatttttggcgaaaacagtgaaattacgccgctgccggcacgcactacggaccaggacctgattaaggcaatgatggagggcggggcagccaggatttaccactgcaatgattcggataagtgcctcaaggttgtcgccgacgccacggtcaccatcgctgcaaacaaggcgctcaagaaccagatctccacccttctgagtagtatccagaataaggctgtggcggatgaaaaactcacggagcaggagaaagggtttatctccagcaccaccatcccggtattcaaatacctggtcgacccgcagatgctgggagtatctaacacgcttatctaccagctgacggattatatcggctacgacattctgctgcagtacatccaggagctgatccagcaggctcgcgcaatggtcgcaaccgggaattatccccagtcgacaatggatatgatcctcgaaaacctgaaccaggccagtgtgcagattgccgccttccagcaacgtgttcaggtccagcaggacacgttactggttgttgaccggcagatgagttacatgcgtcagcaggtctctgcccgcatgatgacccgctaccagaataactatcacttcggagggagcctctga

SEQ ID NO: 195344 - DNA, 654 bp, Klebsiella oxytoca
atgaagaataatgaaattgtcattttttcagtttccaaaacaataacccaacgcatcatgaatgttcttattgagaggaagctcgatgttccggtatatgaatttcgttattctgacgttctcgataaagcgaatgagatgatccagtccggcgctaagataattattagccgaggcggcaccgccgccctcctgcgtaacaatattagtatcccggtcattgagatcgcccatgattttcacggcgtttatcgcattttacaacaggccaaaatcaaatcacaaaaaatcgccgcggttggtttcccccaattttgtaatgccttacgtcattatcagaacatgactaacgaagagtttaaaatttgccaggtatacaaccacaatgatattgaaaacgttataaaaaatctttcagagaacgattaccatacggtcatcggcggccttacggttgctgaaatggctaaaaaatataatctcaatgctattatgggagacaccgataatatttcgattgagcaggccatcaatgaagcctatagcctattaaaatatctcaaccgagaaaataccaagctcatcatgagccacgccgcgctgaatcaagcacgtgaggcatcatgtgtattgatcagttgggtgagatcataa

SEQ ID NO: 195345 - DNA, 279 bp, Klebsiella oxytoca
atggcttccatttacgtgggatcgccatcttgtgctgtgactgaaggcgtagaccgtaacggcaaaagtactgccggtcatcagcattatctctgcaggcagtgccgtaagccatggatactcactttcacctatacaaccttacagtgcagtacacaacagaggaaaatcatcgatattactataaatggctctggatgccgtgccagtccacacattatcggcattggtctgaacaccatttcccgtcgtttaaaaaactcagtccccagtcagtaa

SEQ ID NO: 195346 - DNA, 639 bp, Klebsiella oxytoca
atgccaaaatacctcatcatgcgtcagaatgcgctgctgcttgagcgtaaaccggcaatatcgccatcgaagcaggcgcatacagggaaagaggccgttggagaaagtaaccagcggtggtgctctgacggcttcgggttcagctgtgataatggcgaaaaactacaggtcacgttcgccctggactgctgcgatcgtgaagcactgtacagggtggaaagtaatggtggatatgacagcgaaaccgtacagggcgtgatgctgggtgcggtggaacgacgcttcggcagcagcctgccgtcatcccccgttgagtggctgacgaataacggttcggcctaccggtctcacctgacgcgtcagttcgccagaatggtaggactagagcctggacatacggcgttacgtagcccggaaagcaacgggatggcagagagcttcgtgaaaacgatgaaacgcgactacatcagtatcatgccgaaacccgatgggttaacagcggtagagaaccttgcagaatccttcgagcattataacgaatggcatccgcatagtgcaccgtggtatcgttcgccacgggaatacctgatgcggcaaaccagtaatgggttaagtgataaaaagtgtatggaaatatag

SEQ ID NO: 195347 - DNA, 234 bp, Klebsiella oxytoca
atgtgggacccaactaatgacgatagcgttgagtgtgtatcgttagaaatagagaatctcaccgagttgttagaccttatgctttcaaactccgaacgtatggggaataaacaaatcaccgccctattaggattatgcttgaatttatcttcggggatttttttatgggtcaaagaagaggagaagcgtcgggaaaaagaagaggagtcgcgccgtgaaaacaaatctgattga

SEQ ID NO: 195348 - DNA, 135 bp, Klebsiella oxytoca
atgaaagatttaattatcagtgaagaaattaaagcagaagcatcccgcctacaaggtgaattgcataaattctgcgtggctaacggtgtgtctatggttgcctgcactttacagggccgggttaaaacaacttag

SEQ ID NO: 195349 - DNA, 711 bp, Klebsiella oxytoca
gtgcttgcctacgacttcggtttcatacccgagcttttccaccaggggtttcagcacttcacggtatatttttccgaaagcgagctggttggcatacacgttctcaatgaagccggttttaccgaccgtgtcggtccccagcgactgccatttatccccgttctgcgtggcattgatcaccacggcatgggtatgcaactggggctcctgattacggttcgtatcgtggttgaatttcgccacaatgaggttaccggtcagcacggtttcactttttccgtccgtcatgacccgggtcgcagccagcgtttcaatctgttttacggcttcggtaacggcctgattgtgggcatcaatcaggcgcttatccccgccgatcatggccatgacagacacgcttttgggggcggagaaggtcagatcgtaacctggccggtgtttgttcacgccatcctgcatccgggtcaggtcgctgccgtccggcaactttcctttcagcaggtccgtgaatacctgcttatccaccttcccgtccagccccagcgcctccgccccctttccctgccagcgctcatccatgctcccgataacgtaatagttatccttgtctgtatagtaattgccggcgctccccgcggactttaccgaaccaatcgacatcatcagaagttccctcccacctcaatatcgtcatgctcgctgcggctgtga

SEQ ID NO: 195350 - DNA, 231 bp, Klebsiella oxytoca
atgccgcatggcgccatccagcatagaaatagtctctttcaggctcagcttctccgcctggtccacgatgagcgtcccgcccgggataaacgcggttccgtcctgcagggcagatttcccggtcaccgtttctcccgccagacgcgcatccgcagacagaaactcacgcgaacggttgtcagcagcaacaatgtgcacgtcccgcccttgctcccgtgccatcagggttaa

SEQ ID NO: 195351 - DNA, 306 bp, Klebsiella oxytoca
atggcttccgctctgcgccagctggttcagcgtggcattatccagctctcgctgcgtcaccgaggcaaagacggtcgccgtctcgctgaccgacctgccggggctttccacccaaccgtgcccgaccttgataccgtcgaacggtccggcgcccacagccagggtctgggtggttttctgcccggggcgctgcactgtcagatgcccggcctccgctttcagtaccgtgacaccctcgccccctttcaaccgcgtctcaggaattttccccagcaccgccagacgttcaccttccgctaccggtag

SEQ ID NO: 195352 - DNA, 1110 bp, Klebsiella oxytoca
atggatcagaccgttcagcgcccgccggtccttattcagatgggtgatcaccagcgtctgcgactgtgcctccggggtgcgaccagcgtagtccttcaccagagcctcgtagagcgtcgcgggctgacctgccggcacgctttcgcctttcttcagtgcctcctgaatcgccttctcctgtgcccgcgtgaattccaccacagaactgcccggcgcccaggcgccttcttttctcggcacttgctccggcgtgacctgctcaattgttgccagcgcgctgttcacgtcgcggtcaatgaggctgtagaccgccggtcgcagttccggtacctggcgcacgatttctttcatgatggccacatccgcggcgctgcgctgctgcatcagtctgaatggctggccgggtgcaatggactgcaactggtcggtgtccccgctcagaacggcccggccgccgccggcggctatcagcgacagggcttttgccgtgtcggccagccccaccatcgagctctcgtcgagcaggaacagggtgttgctgaaatccggtgtctggccattacgctgcaggagctgcgtgtcgtgcaggaacgaggcggtggtctgcgcatccacgccggcgctctgcatttccccgaccgcacggtgtgtcggaccgagaccgataacgcgcgggcgggtctcttccggcagaaggtcgatggcgcccgtcaccgcccggaactgggtcgttttccccaccccggcatagccctgaacgaccgtgaagcggtcagaggtctccaggatcatgcgggtcgccgcacgttgtccggaggtcaggtccgtcatcaggctggccggcacgcggtccatcagcggctgcatcgccgctttcccttcgagtacccgggtcagcacactcttttctgcgtcccaggtctggcgggaaatcagcaggtcgttgccgtgaccgggcgccaccggcacactcagcagactgccggccttaatctgcgcctgaatggaccggtcaatatccgccatcgggaccttacctcccccgtcgaattccattgctgtggacagcagctgcggacgcgtgaaggtcaggttgttgctttccagtaa

SEQ ID NO: 195353 - DNA, 324 bp, Klebsiella oxytoca
gtgtttgcccacgacttcggttttgtagccaagtatctcaacgagaggtttgagctcctcccggtagattttcccgaaggctatctggttcgcgtacacattctcgataaagcccgttttcccgactgtatcagtgccaagagactgccacttgtccccgttctgcgtcgcattcatgacgacggcgtgagtgtgcaactggggctcctcgttacggttcgtgtcgtgggtgaatttcgccacaataaggttaccggtcagcacagtttcgctttttccatcggtcatcacgcgggtggcggccagcgtttccacctgctgtag

SEQ ID NO: 195354 - DNA, 831 bp, Klebsiella oxytoca
atgacgcatcgcgccgtcgagcagggaaatcgtctctttcaggctcagcttctccgcctggtcaacgataagcgtccccccagggataaacgcggtcccgtcctgcagggcggatttaccggtcaccgtctccccagccagccgcgcatccccggcgagaaagtcccgggagcggttatcagcagcaagaatatgtacgtcgcgtccctgctcccgggccatgagggtcagctcggccgcccgctcccgctgacctgccgcgccaccctgcccggagacaatccccatcgccggccggtcctgcgccagcacgctaaccgcatcgctgaaggggacctgacggacaacagacgcatccggcgtgacagagacgtggttctggcgctgaacttcctggctcagcgctttcacggagagctcatccagcacgtggatattcgaggtgaagagacctttttcccggtcaagaggaataagctgctcgcgctcgatcgccgcatcgatacccgctctggcctgctcaaacacaccgggttttgcttccagctggctgactgtgcgggccagcaggtcggcgtaggtgaactgcaccttccggtcgctgagaccggcaatggctttcgtgaccacgtcgctgatatcagggccgtccgttttcaccggactgacaggcgcactggcgagctctgctgcgcgcttatcggcatcctcgcggtagctgcgcatatcaaacccggtctccttcatcgtgttcatccattccaccatcttctcggccgggtcgatggctgctttggatttgcgggtatcgagggcggccacatcccgtga

SEQ ID NO: 195355 - DNA, 219 bp, Klebsiella oxytoca
atgcagcaaagtacccgccttaatctgcgcctgaatggtcttatcgatatccgccatcgggacctgaccgccgccggtctcgagcgcggtggccagcagctgtggacgcgtgaaggtcaggtcgtcgctttccagcaaggggacagaaagatggatgacctgctctgccggggtatgcagcccggccttctgctgtgcgatggccgcatcgagcgttga

SEQ ID NO: 195356 - DNA, 201 bp, Klebsiella oxytoca
atgttaacagtaaaagtgatgtcgcctagtggcggcgaagaaattcattgtggactgagcgttggtttcaaccccaaccagcagagtattgccgtatcgggaatggaccagaacgtattcctgaagcagggagaagtggcctacgtgatgaacgcaaacggcaagaccatttcacgttacgaacacctggaacgacagtag

SEQ ID NO: 195357 - DNA, 246 bp, Klebsiella oxytoca; identical to SEQ ID NO: 189052

SEQ ID NO: 195358 - DNA, 246 bp, Klebsiella oxytoca
atggcagaaatcaccgacgcccagcagattcgcctgaacctgctttccaccctgaactacgacacagcagcagctaaagtcgctgtagagtttgttcaggatagtccgcttaaatatcagctattcatccagcaatacagccgtgtcacatcagagactgaagtggtggcaaagacgatgaaagcagtgcaggaagcaactgaagcgctgccgctctttgataccgctgctgagcagtccagctag

SEQ ID NO: 195359 - DNA, 1209 bp, Klebsiella oxytoca
atgtgcgaactcgatattttacacgactctctttaccaattctgccccgaattacacttaaaacgactcaacagcttaacgttggcttgccacgccttacttgactgtaaaactctcactcttaccgaacttggccgtaacctgccaaccaaagcgagaacaaaacataacatcaaacgaatcgaccgattgttaggtaatcgtcacctccacaaagagcgactcgctgtataccgttggcatgctagctttatctgttcgggcaatacgatgcccattgtacttgttgactggtctgatatccgtgagcaaaaacggcttatggtattgcgagcttcagtcgcactacacggtcgttctgttactctttatgagaaagcgttcccgctttcagagcaatgttcaaagaaagctcatgaccaatttctagccgaccttgcgagcattctaccgagtaacaccacaccgctcattgtcagtgatgctggctttaaagtgccatggtataaatccgttgagaagctgggttggtactggttaagtcgagtaagaggaaaagtacaatatgcagacctaggagcggaaaactggaaacctatcagcaacttacatgatatgtcatctagtcactcaaagactttaggctataagaggctgactaaaagcaatccaatctcatgccaaattctattgtataaatctcgctctaaaggccgaaaaaatcagcgctcgacacggactcattgtcaccacccgtcacctaaaatctactcagcgtcggcaaaggagccatggattctagcaactaacttacctgttgaaattcgaacacccaaacaacttgttaatatctattcgaagcgaatgcagattgaagaaaccttccgagacttgaaaagtcctgcctacggactaggcctacgccatagccgaacgagcagctcagagcgttttgatatcatgctgctaatcgccctgatgcttcaactaacatgttggcttgcgggcgttcatgctcagaaacaaggttgggacaagcacttccaggctaacacagtcagaaatcgaaacgtactctcaacagttcgcttaggcatggaagttttgcggcattctggctacacaataacaagggaagactcactcgtggctgcaaccctgcttactcaaaatttattcacacatggttacgctttggggaaattatga

SEQ ID NO: 195360 - DNA, 1206 bp, Klebsiella oxytoca
atgatcctagatgccagttatacattattagtcgcatgtatcgcgctactcataggaatgtttgtcgtaaaatttaccccgttcctacaaaaaaaccacataccagaagccgtcgttggtggctttattgttgcaattgttctgttaattattgataaaacatcaggttattcgtttacttttgatgcttcattgcaaagtttattaatgctcacattcttttcctctatcgggctaagttctgacttttctcgactgattaaaggaggaaagccgttagttctattaactattgcagtaacgatcctaatcgccattcaaaatactgtcggcatgagtatggctgtcatgatgaatgaaagtccatttattggcttaattgcaggttcaattactctaacaggtggtcatggtaatgccggagcatggggccctattctcgctgataaatatggtgtaacaggcgccgttgaattagcgatggcttgtgcaacacttggattagtgttgggtggtttagttggcggccctgttgcccgtcatcttttgaaaaaggtctctattcctaaaacaaccgagcaagagcgcgacactatcgttgaagcttttgagcaaccaagcgtcaaaagaaaaatcaatgcaaataacgttattgaaaccatttcaatgctgattatctgtattgttgttggtggctatatcagtgcattttttaaagatacttttctgcaactgcctacttttgtctggtgtttatttgtcggtattattatccgtaatacactgactcatgtatttaaacacgaagtgtttgagccgaccgtcgatgtattaggtagcgttgctttatcgcttttcttggcaatggcgttaatgtcattaaaatttggtcaattggcaagcatggcagggccagtattaattatcattgctgtacaaactgttgtcatggtgctatttgcctgctttgtcaccttcaaaatgatgggcaaagattatgatgctgtcgtgatcagcgcgggtcactgtggctttggtatgggagcaacaccaacagcaattgcgaatatgcaaacagtcacaaaagcatttggaccatcacataaagctttccttgtcgttcctatggtcggtgcctttattgttgatatttcaaacagtatcttaattaaaatatttattgaaattggtacatactttacctaa

SEQ ID NO: 195361 - DNA, 300 bp, Klebsiella oxytoca
atgaggtgccaggctggcgatatccgccacccgcacctgcgggcacagaagccagcgtttctggtcggtgtgcttcagcaacgcccggtaaaaatgctgttcccgtggcgtcatcagcatgtcattgctcacccaggcccgctgacgacacagtcgctgttccgcctcggtggtgcgaatacccgccgctttcagtgcctgcagtaccggagaggtcttccccgttgttcgtcccttcacaagcaaaacaagaaaacccagcagacccagtactatgacgatggcgcccgtcatcattaa

SEQ ID NO: 195362 - DNA, 885 bp, Klebsiella oxytoca
atgcatgtctatgctcggcaactgaacatcacgcgcgctttcacgccggttctgctcctgaacatgcatctctgtcagcgcctgatgccgcagaaccagcgcccgcagggcacgctcaaccggatgtggcgcttcccatatcgccgggcgtttctcccggcaaaaatacgccagttggcgggcatccaccgtatcagttttgctgcgtattccctgactctggacgaacgctttgctgagcatcggattgataacagagacctgataccctgcgtcagagagatgagcggcgacatcttccatatacgtcccggtcgcttccatgcagatatgggcatggatgacctgatgtccctgcaaccagctgacgagctcgtcatgacctccgggggtgttggcaaatttcttgctgcggtgacggccatcaggccgcaacatatcgacatcgagtttagctttggcaacatcaatgccaataaagtgaatttcgttttccatggtgtaaccatccttgcacatacggggtaccgggtgaaccggtccatgatactgttcggtttatcacttgtggataacggtggtctggtgcggggatctaccaaacagactaaaagtctgagcccggacacggcatccggaccaccaccagagggaactggccggttctctctggattttttaataatacaagcccggataaagcgttcgcgccgtcatccgggagcattccatggcggcgcgaaccgatcgaatattacggatataatcctctgtctttacgcgccaacaggatacgttcgcaggccacggcataagcggcggtacgcagggttatattcagtgtctgcgctttattccacacggtttccagcgcactttgcataa

SEQ ID NO: 195363 - DNA, 624 bp, Klebsiella oxytoca; identical to SEQ ID NO: 10352

SEQ ID NO: 195364 - DNA, 615 bp, Klebsiella oxytoca
atgtctgacatttcacgagttaaaatactcagtgctttgatggatgggcgagcttggacggccactgagctaagttctgtggcgaatatatcagcttcaacggcgagcagtcatttatctaaattattagattgccagctaatcacagtagtagctcaaggcaagcatcgttattttcggctagcaggaaaagatattgctgaattgatggaaagtatgatggggatctccttaaaccatggcgtacatgccaaagtttccacgccagtgcatttacgaaaagcacgtacttgctatgatcatttagctggcgaagttgccgttaagatctatgattccctttgtcaacagcaatggatcactgaaaatggttcaatgatcacattaagtggtattcaatattttcatgaaatgggaattgacgttccttccaaacattcacgtaaaatctgttgtgcgtgtttagattggagtgaacgccgtttccatttaggtgggtacgttggagccgcattattttcgctttatgaatctaaagggtggttaactcgacatcttggttaccgtgaagttaccccgggttatgctgcttttaagacccactttcacatttaa

SEQ ID NO: 195365 - DNA, 498 bp, Klebsiella oxytoca; identical to SEQ ID NO: 91874

SEQ ID NO: 195366 - DNA, 1251 bp, Klebsiella oxytoca
atgagcgcagaaagctcaggagtgtttactttgaaagagatcaaccggatcaagattatacaggacgtcattgaacgtcgcatcacaacgcgccgtgcggccgagcacctcggtatcagcgacaggcaatgccgcagacttcttgcccgttaccgtgaagggggaccgcttggtatggccagcagacgatgtggcatgcgtggtaaccgccagttgccacccgggctcgcagatcaggctctggaactgatcaagacgcgttatgctgatttcggtccgactctggcgcgtgaaaagctcgaagaactccacggactgtttcttggcaaagaaactgtccggcgcatcatggtgcgggctggcttatgggttccccgtaaacaacgtgccgcaaggatccctcaaccacggtaccggcgtccgtgtactggtgagctgatacaaatagatggctgtgatcacgactggtttgaaggccgtggcccggcctgcaccgcgctggtctatgttgatgatgcaaccagcaaactgatggaactgttgtttgttaaatcggagtccacgttttcttacttcgaagccacgcggcgctatatcgataagcatggtaaaccgctggcactgtacagcgataaagccggtgtttttcgtgttaacaataaacacgccacaggcggagacgggcatactcagtttgggcgagccatgcatgaactgaacatccagactatctgtgcagaaaccagtcccgccaaagggcgtgtagaacgagctcacctcactttacaggatcgtctggtcaaagagctgcggttacagggcatttgttcaatggaggctgcaaatgacttcgctgaggcctatatggctgactataaccgccgttttggcaaagtaccgcgacatgattttgacgtacaccgtgctgtagaacatgatgaggacctggggcttattttcactgttcgtgaaaaacgtaaagtctcaaaatcgttgacgatacaatatgataaaatgttgtacctgattgaagacagcgaactgagtcgccgtgcaataggtaaatatatcgatgtgtatcactatcctgatggcagaaaagagctgcgcctgaacggtacgctacttccctactctacctacgaccgactgtcagaaatcgaccagggcgcgattgtcgataacaagcgtcttggccgaaccctggagtttatcagtctggtgcagagcaagcgtaagcgtacagcgtga

SEQ ID NO: 195367 - DNA, 1209 bp, Klebsiella oxytoca; identical to SEQ ID NO: 19673

SEQ ID NO: 195368 - DNA, 693 bp, Klebsiella oxytoca
atggagagtcttatccgtaaactatctcctactcatattgatgataaggttctaattgaatatcaaaataagaaattatcaaaagccccagcatcatttcgcgttttacgaccatttttgattaaatggtttgagttaggatatccgggagtagatgaaagtgcggtagaactgttaaagcatttggacctaaaaataaaaaaatctggtcagtctgtgcttcaagatgatccaacagagggaccattaaataaagaagaacatacttctttgattaaggctatgaatcatgcatatagaaaaggtgaactgtcactgccacattatgcaatatcactattgatcagtcttacaggtagaagacctcagcagttagttatgttgaaatataaagaccttcttcaaaagaacttagataatggcaaagtagaatatgtaatttcagtgccacgagtaaaacaacggggtaaagaactacgatatcgagaacttgcaataatatcagaggttgcatcaattgttcaattgcaagctaatcaatcagtgaaacttgttgagcaagctcttggaaaaactcttgatgattattctaaacgagaagttcctattttcttaaatgaggaaaaactctcagatttatccataacaggttcaattcttctggaatataatctgtctcttatacacatctga

SEQ ID NO: 195369 - DNA, 597 bp, Klebsiella oxytoca
atggttatctcatttttcgtaataggtgatattgtcgataatttaggttttggcgtgagtggcacaggtttgatgatgttgtttttttttatcaatttcagtcttttctcaatggttatcttgttttttaaaatttatttatctgaacctagagatcaacccattcgcttaaacagaaaacgtcaaaaaatctataccttcgattataaaagaaaatggtggaatccctgggccaaatggccaaccactgtcaatgcctatcactgggctgatattcacggcgagatgcgtttttccagcgaccgctataccggaggttttcagctgtttgcttccgtctgtcagccaggaacgctgaacgtgacggaacgcttccagattgccagcggctctcctgcgcagttgcagcaactctggagctatctgtgcctgtatatgaaaggtgagcccgtgccggatgaggcagccaacaaaggtcgccctgatttctggtgcccacgaaaagcagataaatggcctgaagcactggaaattgaatcaaccaccgctgtagaaaaagtttttccctgcactgacagcgctctgctggctttctga

SEQ ID NO: 195370 - DNA, 300 bp, Klebsiella oxytoca
atgaatatcgaagaatttgtgagtgaagataaccatatgtgcaatttatgcggagatctgttttacaagatctttgacccagaagtgatttatgacttacccaataacgagtttaataaagaaatcatttactggctcagtcagtaccttgtaggaaatttgagagaacctttagactcgatctctgagcttaatgcttccaaacagatatatgtttacgagacctggttctcgttaattaaatgccctgatgaaatgaaactcttggcgaagcggataattctatatctattgggttaa

SEQ ID NO: 195371 - DNA, 180 bp, Klebsiella oxytoca
atgccccagaaacaggagaagttcacgcctcgcgaacttctcatggttttaaacgatgccaacttcgagaaaaccatcctgcatagttgcaaagagcctccgcttcaggagcttcgctcctttcttttcccaactatccctatagtgacttcaacacagcaacaagggaaaacaaaatga

SEQ ID NO: 195372 - DNA, 720 bp, Klebsiella oxytoca
atggccgatatctttgaggagaattaccgctgttacggctaccggcgccttcacgcgatgcttcgcagtaacaacagggttatttctgaaaaggttgtccgcagactgatggcagaagagcagctcgttgttaagcgcaccaggcgacgacgatataactcttactgtggcgaaatcggtccggcaccggaaaatttactcgcccgggattttagttcctgcaggccaaatgagaagtggctgaccgatattacggagttccagcttccggctggaaaagtctatctgtcgccggttatcgactgctttgatggccaggttgtaagctggtcgataggaacacgcccggacgcgacgctggtgaatacgatgctcgatgacgcactcgatacgctcaacgaacatgataaaccggtgatacacagcgatcgtggtggccattaccggtggccgggctggctcgagcgtatcaacacctccggacttataaggtccatgtcgcgcaaaggatgctcgtcggataatgctgcgtgtgaaggcttcttcgggcgtatcaaaaacgaaatgttctatggcagagactgggcgggtatcacgctggaaaaatttatctgcttcctggacaggtacatacgctggtataacgagaaacgtatcaagctatcattaggtgcaatgagtcctgtgaagtaccggcagcatcttgggatcacaacataa

SEQ ID NO: 195373 - DNA, 753 bp, Klebsiella oxytoca; identical to SEQ ID NO: 185617

SEQ ID NO: 195374 - DNA, 462 bp, Klebsiella oxytoca; identical to SEQ ID NO: 129165

SEQ ID NO: 195375 - DNA, 249 bp, Klebsiella oxytoca
gtggtggaacgcttccagattgccagtggcactcctgctcagctgcagcagctctggagctatctgtgtctgtacatgcaaggcgagtccgtgccggatgaggcggtgaataaaggtcgccctgatttctggtgtccgcgtaaagcggataaatggcctgcagaaatggaacgtgaatccactactgcgccggacagggaactttctgctctccgcgcctgtagcgaaccatctgataagacgagttaa

SEQ ID NO: 195376 - DNA, 324 bp, Klebsiella oxytoca
ttgggaagaaatgacctgcttattcgcaccttccctaacagtatttattctggcgcgcttcccaaggatgatctgacctatgtggcgcagctggtttctcagaataccggcatcagtcagcaagaggccgagcagcgggtacaggcggtttatgataaagcccaggctaatttgaaagaggcaaaagataaagcgcagcaggccgcagacgctgccagaaaaaccaccagctacgtcactctgtggtcatttatttctctgttaattggcgcttttgttgccagtctctgtgccacctatggcggccgtcagcgtgatttataa

SEQ ID NO: 195377 - DNA, 276 bp, Klebsiella oxytoca
atgggcattgaaatgattattggtctggtaactgcgttgctggccgttatcgctggcgcatttgggttaggccattcacgtggaaccagcaaggcggaagccaaagccgaacagcagcgcacagaagagaacgcagctgctacagtcgcagcagcagaacggaaagcgcaagcaacgaaagaggccagcgatgtacaggaagacgttaagcgtatggtcgatgacgatgttgatcgcgagctgcgcgaaagatttacccgccccggtagtcgttga

SEQ ID NO: 195378 - DNA, 126 bp, Klebsiella oxytoca
atgcaattcatagcactgccgtgggcaactttgcaggctatctacagagcaaaaaatggtgaggttgttgaagggaaatatgtccgtgtggcagggaacttcattaacctttgggacccactctaa

SEQ ID NO: 195379 - DNA, 189 bp, Klebsiella oxytoca
atgatttacaccgactttatgaacacgaagaacgtggagcagggaagtgccgcgactccttcagggcattctggcgctgattattatcaaaaatgtcattttttttgctttgttagattcaaatgttcttgtcgattgtatcgaattccttattttgtgtcggcattgcaatttggctttatctattag

SEQ ID NO: 195380 - DNA, 192 bp, Klebsiella oxytoca
atggcggtctctccccggctcgcgctgcgcttagccgggctacaggtatacagccgtctgctggcccgtagcccgggcaaggcgctttgcgccgccccggagctgatcagaggccacagtggatatagttttccggaggcgatgcggcgcatctgtccgggctacagcttgcagacggcgatgggcccgtag

SEQ ID NO: 195381 - DNA, 504 bp, Klebsiella oxytoca
atggctgggtttttgcttttctgcgagcggacttccatcgaacttcgttcgattattcgccgcaccgcggctcacccctctggggccagcgcggcaagcgcgctgttcaacgcctgcggcgttagtccgagtccgggcaccaaccattcagagaacccagcctatggctgggtttttgcttttctgcgagcggtttctccatcgaactccgttcgattattcgccgctccgcggctcacccctccggggccagcgcgacaagcgcgctgttcaacgcctacggcgttagtccgagtccgggcaccactatttaaagaacctgcccacaaggcggttttttgcttttggggagccagcactagcttcccttcaaagtcccctccccctctctgccagaaaaaattcattgccagggattttgcctgccccacgctctctcgcatcaattgcctgagcgtaggtccgcttgttttgcgggaaaagccttatcaccagcgtcgttga

SEQ ID NO: 195382 - DNA, 618 bp, Klebsiella oxytoca
atgaacaaatacaacactgatttacctacggcaaaactgaataaaagcggcattgccaccgttgccggctggctcacggtgtacaacgtggagtctaagcagcgcgaatttcaggcggtgacgatggaatatttagccgcgggtgtaggcttgcctgctttcagttatgccgataagccagcattaccgggtgatggctttgcactggtgcgcagcgcggatgaaaaacaatgggaaactattgcggattatcgcggtttaacggcttacagcactgagaccgggcaaccggaaatcatcgcttttctcggcgaattgccggatacgctgacgttactggcacctgtcacggcgtatgataaatgggacggtaaccagtgggtgaccgacacggcggcgcaacatgctgatgaaattgccgtcgcagaacagcaaaagcaggctctgctttctgaggcgcagcagcaaatcaccgggtggcaaacagagctgcagctcggcatcatcagtgatgatgataaggccagcctgattctctggatgaattacattaaggacattcaggcggtaagcaccgagggtgcgccggatatcgagtggccggtcaagccggaataa

SEQ ID NO: 195383 - DNA, 1476 bp, Klebsiella oxytoca
atgacagcaaaatattatgccattctgaccaatcagggcgcggcacggctggcgaacgcgaccgcactcggcactaagctgaacctgacgcaaatggccgtgggcgatgccaacggcaaattaccgacgccagacccggcacaaacagcgcttatcaaccagcagcgcatcgcgccgctcaatatgctgaccgttgacccggccaatgtcagccagattatcgctgaacaaattattcccgaaaatgaaggtggtttctggatccgcgagattggtctctatgatgatgatggcgtgttgattgccgtggcgaactgccccgaaacctacaagccgaaactggcggaggggagcggccgcacgcagaccattcgcatgattctgattgtctccagcacgacggccatcacgctaaaaatcgacccgtcggtcgtgctggcaacccgtcagtatgtcgatgagcaggttattgaagttaaatcatatgtcgatgatgtgcttgctcaacatgaaaagtcccgcaatcatcctgatgcgactacagccgcaaaaggttttgtgcagctcagtagtgcaacaaacagtaccagcgaggcgctggccgccacgccaaaagccgttaaagcagcaaacgataatgctaataaccgactgtcaaaaaccggcaatctgagtgagattaaaagtgccggcaccgccgcgcagctctcagcgcagcaaaatatcggtttgtcatcctatggtattgctcctgctttagcggctgaaaccggaaaggatctgaatagtcttctcactcagggcgtatttgtgctgacaaatccactcaatgccccggagcctgctaataacgccggtacggtatttgttgaggtgatgacgtggcagtcaggtagcggggataacgggtacagggtgattcaacgactttatggatatggtacgtcgggtagcatcgctaacagggtatgggtcagaacaaagacgccggactggggtggctggtatgagttgtattctcaggcaaataagccggccgccgcagacgttggcgctattgtgcgggaagacgcccctgtcggtattccgcagccgtggccgctggcgactgccccgctgggctggcttaactgtaatggtgccaccttcgacaaggcgatgtatccctatctggcagcggcatatccctcgggcaaattaccagacctgcgcggtgaatttattcgcgggtgggacaacggacgcggcgtggatcctggcaggtctttactggcatggcaggacgacatgataaaaaaacatagccacacgctcggtacatataaatccgttgacgccggaatcaagatgccagtgactgccggtgctgagctttctaattccggcgtgggcggcgctatgtataccggtgaagctggtagctcagaaacccgcccacgcaacattgcatttaactacattgtgagagcagcataa

SEQ ID NO: 195384 - DNA, 609 bp, Klebsiella oxytoca
atgagtgaccggttgttacccgtcggctcgtcgccgctggaagttgccgccgctgccgcgctcgctgagattcagcgcgtgccggtaccgttgcgcacgttatggaactggcgcacctgcccggtcaatctgctgccttatctggcgtgggcgctgtcggttgaccggtgggatgagacgtggccggaggcgacaaagcgcagtgtttgtgcctcctcattttttgtccatcagcacaaaggcaccatcagcgcattgcgccgggtggttgagccgctcggctatctgattgaggtgctcgagtggtggaagctcaacgaggagccaggcactttccgcctcgttgttggtgtgctcgatagcggtatcactgaggaaatgtatcaggagcttgagcgcctgattgaagacgccaaaccggcaagccgtcacctgaccgggctggctatcagtctgagctcaaccggcgagctgtatgtcggcgcggcctgttatcacggtgatgcgctgacggtttacccctatatgcctgaagaaattattgtcggtggcggtatttatccggcctcggctatccatttgattgataacctgagagttaacgcatga

SEQ ID NO: 195385 - DNA, 909 bp, Klebsiella oxytoca
atggcaactgttgacctgagtcagttacctgtccccgatgtggttgaggtgctggattatgaaaccatccttgcggaacgcattgcgacgctgatttcactttatcccgaagaccagcaggaggccatcgcccggacgctgacgcttgagtcagagccgattgttaagctgctgcaggaaaacgcctaccgtgaggttatctggcgtcagcgggtgaacgaagccgcgcaggcggtgacgctggcgtattcaaccggtaacgacctcgacgtcgtggccggaaacaataataccgagcgcctcaccatcacaccggcagatgacaccaccatcccgccgacgcctgccgttatggaatccgacaccgacctgcgcctgcgcacgcaacaggcatttgagggattgagcgtggcgggtccggtcggcgcatatgaatatcatggccgcagcgccgacgggcgggtcgctgacgtctcggtcgaaagcccgtcgccagcctgcgtgacgattaccgtgttatcccgcgagggcgacggtaccgccagcgctgacctgctggcgattgttgataaggcgctgaacgctgaggatgttcgcccggtggccgacagggtgaccgtccagtcagcggagattgtgccgtaccagattgacgcgacgctctacgtttaccccggtcccgaatctgagcccatcaggcaggcatcagagcagaagctgcagagctacatcagcgcgcagcaccgtctcgggcgcgatatccggctgtcagccatttatgccgcgctgcatgtcgaaggggtgcagcgtgtcgaactggcatcaccgcaggccgatatcgtgctgagtaagtcgcaggcgtcgaactgtaccgagcaccggataactatcgggggctcagatgagtga

SEQ ID NO: 195386 - DNA, 348 bp, Klebsiella oxytoca
atgacggcgcgctatcagggtatgaaccgcaataccggccttgctatcagtgacactgagcacatcagccagagcatgcgcgacattctgctgacgccggtcggctcgcgggtgatgcgccgtgaatatggctcgctcctgtcggcgctgattgatatgccgcaaacccccgcgctcaggctgcaaatcatggtggcatgctattcggcgatccagaagtgggagccacgcatacgcctgaccgccatcagttttgagaccggcgaggctggcgaaatgtatgtcgatattaccggggcgcgaaccgataccggcgcgtcagtttctaccaccctttcactgagttaa

SEQ ID NO: 195387 - DNA, 864 bp, Klebsiella oxytoca
atggaagaatctaaaagaatacgtcaattaaaagaaaagctcataaacgaactacctttttttccaaatgaaaaatcaatacgcaccgagctagaaaatcaaagcttaaatggagttttaatcgcttacctccattggaaaacaagaattgtacctacccgtcgaaggaaagttcatatatccccagaggtaacgagtgataaaagatggaaaacattaaagtctggtattcatggcttattagataaggtgagaaaaggtgaagacttgtatcctcacctttcattgagagcacataagtatggctacacttctgttgaaagaattcgcaatggagaagttgattcatgggaagacaaggatcaattattaaatacaaaaggttttcatcattttcatttaagcatggatatccaaagcacaggtttgggcgtaaggacgaatagtgttcttttcgccttcgtttctcgcgaccaatttcatgcagttgggatatttgatcatagcgtatttgataagccagatatttttaatggcatgactgaggaacatgaaagaatgtgggccctacatgaaaagtacaccacattcggaatgaaacccggaacagtttatatgaataatccgataacaacctccggacatcctgtaagccttatcatgcttgccgatcgttatgctgcaatcatccgagaatatgatcagaaggcggaacaaagaacttttataaatgaaatttatgctcaaagcccatttccatctccagaaaggtataagcttgaatggagtatagaaggtttagatcttgttctttttgatagaaaaaatagagtggcctttaacatctataaggcgtacatttaa

SEQ ID NO: 195388 - DNA, 159 bp, Klebsiella oxytoca
atgccgggaagtgacccgaaaacgaatggcgacctgagcgcggatatacgccgccttgagggggcgctgaccgcctgcgcgctgcaggtcaaaaccgtcaaacactgtcaggatgaactcgatgcagaagcacaaaagcctgcgcaaagcgctgattaa

SEQ ID NO: 195389 - DNA, 1059 bp, Klebsiella oxytoca
atggcaggtgaaacacaaaacatttcagcaatggcagaaaaaatttcttctgatttatttaaatggttcaaatgggagctcgttggttcaactaatgagaactttccatgcatgaagactgaacagcataagactaaagcaggaactcacccgacagatgttgtcttttcctacaaagatccttacttaaatagaactatctttttaaacactgatttaaagagctatgttaaaggttcaatatcttcaacctcgatgcgtaaggcgttggtatcactagcaaattcaattgattgcgccgaaggcagtaaagaatggaaagatcgatactcttatcaaagtgggtcttctgaagtcagaggaatgctatttgtttataatcatgatggcgattttgaccagtgcttttatgatatattttatcaatctcacgcatcagagacggataaagttcagcgcggtataaatcttgataacatacctttaaaacaggggcaaaaaatacatattattgaaccaagaactattaattacctccaatccataacctctgacttatctcaattgagccataagagagagtttccactcggtagaaactatcagtttttttatcctgatttatcgctacataaggttagtggttcgcccgaagaccacccagcgacagttgaattacttaccggcccatttctcatcattaagcacaatgatgtaaagcactgtaatgaagatacggaaaagtgggaaaaaacctttgatcatggatatgtggtctactataacggcgaaggaaaaaatgagttagagttcgtttacattttagacacactatcaaaatatcaactactggatggcaatgaaaaaataagaataaggattgttcacccaaacatttacaaagatgtacgtggtatttttatgcgagctaaagaaacatactctaaagagtggggatttgatgagcacaaacaaaaaataataaacgcaattgatttccatcaggtggaatttacaaaacctcgctttagttcagttgagattggttgggagcgataa

SEQ ID NO: 195390 - DNA, 1119 bp, Klebsiella oxytoca
atgaagatcggtttatatagtgtaaatgataaggcaatgtttgatgctcttaatcaaacaaaagttacccatgaagatatgaaaagcctgtttttcaaaagaggcattattatatccaaagagacaaagcgaaaagccttagcattggatttttcaaaaaactatcatgggtattatgacttcgaatatctttctgaaattttgggctctgtagggagaagagagaagttatcaataaacattgtcaacaccacaattaaaaaggatgaaatggaagcaagtcttaagtctatttgcgaagacctacaaaaagaaggtgacgtcacaaatataactttcactgaaaaagggttcgaagtatcagtgaaatatgtgaaattagactataaaatgagcgaattccgacaatcatcatctcgcgaagcaaaaattcaaatcgacataaatgaagcaggggaatacattactcgattcccacagaataccaaggctagagatttcaatgatcgcctcattgaaaaaatcaaagaaaataataaagaagatcaagcaacgcttgaggaaatttctcttgagaccgttaaagaccccacagagagaagtaatttctttaaggaacttattgtcagcatgcataattatagatgcatagatgtttctgatgtttatgtcacccatcctattttagaagcaaaaaaacaccctaaagaagatagcgaagcagatgatgatgaagacgatgatactgtcattgatactgggtatcacatatctaaagcctcattaaaaggtcgtggggtattagaatctccagagctaaaagaattattaagtaaagggttttacattaccaaaattgtttggaactccgttgtggagggtttcaaagattcagataaatatgaatttgaagcacaatttgtggacgcagataattgcaaattattttcttacctcgttcgcggtttatataaatataaaaaagtcaatgaatatacgtatcgtcaaaatgtggataaagaaaaagagagtgtgttattattatctatagaaaacacagcccgagctatttctggaaaaataattgcctctcatacccttgaggttgtcactgaataa

SEQ ID NO: 195391 - DNA, 672 bp, Klebsiella oxytoca
atgaaaacaaaatggtttaatgccaactaccctgctggacttgataagctatatgcatctatcattagctctccttttgacagtgaaaaagggtggggttttagcattaacacatacgaagatagttttatatcatcaaaatacatcgaaaaaattgaagtgcgggaaataatcactgacccatatgggaatgaaactgaatttgaacatttcaaatacatccaatttaacttttggttttgtaaaacgcgtaataataaattcttattgattattgagtctccaccaagaagcatcaaaagctttatatccaatataattaaactaacgaaatctgatttcaatatttctaatctcactataaggattgatgatttcattacatatcttacacctcaattcgaaaaagttcaggtgcataaagcaaaattgaaagatttaactttcaacaagcatacatctggcattctagaacttgagtcttcgagtgatgctattgatgagattagacatattttcaaaaatgcaaaatttactattgataaagccaagcttaatgtaaaaagtaaaactggcaatgagtccctggaggtaaatgccaacggttcgattactttttcagaagaaatattcgacgagattttttctacagttgaaaacttcactttttag

SEQ ID NO: 195392 - DNA, 834 bp, Klebsiella oxytoca
atgaaattaaagaagctattagaattagatttcatggttaaattcaaatccacattggaaacagaatttgaaaaagagctatttatagcaagccttcgaaattatgcctctcatggtaaccctctgagatttcacaactttgcatatactatgagagagttaattttacatgttatagctcgaaaagctcctgaagaaaaagttatcggtgcaccatggtatgtacgtatagatcctaatagaaaagtaacaaggaaacagcagttaaaatattgtgcccaaaaaaacataccagatagttttctaggcgttatcaacactacatttattgatgattccatatcagatttcttagctgagtttgttaaccttaataaatacacacatataacagaaaaatattttaaaccatcccccaagcagttttttgaaaacgcacgggatgtagtttccatcgctcagcactgtttagatttgatggccgatactgctaaggaagtaatctgtatcctagaaaatgaaatcgatagctcagttagggatttggcgaacgagagtttgccagatgaagtgactattttagctcctcgagtttacactgagtatgtacaaattgaagatgtgtatgcctctgatattgatgatgaattcatatacataggcgttgacggttcagtatttgttacacaagaatatggtcccaaagatgacctatgcgaaattaacactgattatccatttagcctttccatgcagtgcagtttgcgcaatccagctcaactaactataacttcgaaggaaatagaagtagatacttcctcttggtacgagtaa

SEQ ID NO: 195393 - DNA, 570 bp, Klebsiella oxytoca
atgaatgtaattgcaaagtccgttgcagttggattactggcaatggctgcaggcagcgcctgggcaagcgatggtactattgaattcacgggtgaaatcaccacctctacctgtgaattcgctaacggcgatacggtaaatgttgaactgggccattactcttatgcccagtttaaaagcataggcgacaaatcaccaactacccagttcaccattccattgaccaactgcccgactcagccctggaaacacgctaatggtaacaccaacaggatgttccaaatatggctggaaacgcgtagcaccggtactacaggcgataataacgatctggttgcagtaacaggctcaggcacgccagcgaccggcgtcggtatccgcatcgatcgcgcttccgacggtacccagttagcgctgaataaactgaacgacacgccagtctattttgatatgacgggtgaacaaacggacgtcaatctgcaggcttactacgtctctaccgttgaatcttcggccatcaccgccggggaagcgaacgcttccgtcgacgtcaccatcgattatcgttaa

SEQ ID NO: 195394 - DNA, 468 bp, Klebsiella oxytoca
atgaacgcaaaagagattgatggtgtatttcactgtgattgcggattttcctggtcacgcgggaaaaacggtagccataactgcgccgatggtttgcgggaaaaggtacagcagctggctgcggagaatgtggcgctgaaggcttcaggatcatgcctggtatctgagtacatgatgaacaaaggtactgatagcgaatttatcgcctgcattaccccatcaaagaaaactatcggcactggcggagtttgggatatgtggcgttatcttgacttaatgctcagcaaaacccccgccaccgatcgcatcgtagccgggattaaggctgatggggtggaagatatggctaaccattttttcaaattagccaaagatgaggcgaatagtttgatttccgagcaatggcgcgaatcaggtcgggttgctaatgagcaggcccagcagctgcgcgagggggccgacaaatga

SEQ ID NO: 195395 - DNA, 213 bp, Klebsiella oxytoca
atgaccagtaaattaacagcgctcatcgtgctattcgtcattccagcagcggtggcggcagataacccacattgcgttacagcaaaaaatggctttggtgctaccaccacacaatgcgatgacgggacggttactgtcaccaccggccagaaggtgattgtttgcggaaaggctcttaacggtagccataactgcacggagattaagctatga

SEQ ID NO: 195396 - DNA, 1197 bp, Klebsiella oxytoca
gtgagagatcttaatggagcggtcttcaacacagaactgaatgatttatgcagaaaatattttataaaaggtccaatcgaaccgactaagaatgaagttcttgagtttccaactaaatacaatgaaattaaatcatgtctttttgaaagcttcatccttaacaaagaaattaattttaaagttgaaggtgaaaacattcccctatgcgtactcgtaaatgaaattggattgagaggcattgaggagctaatagatgataatgctttaagttttacattatgggaaccaatgatagttcatatggttgataaattagatggtataacaccaatcgctgctgggcgttatagcaatgggccctatgttgatcccgaggaatctgtaaatttgggattaggttttatgagatcaccgctaagaaaaggcgaagtaagagcattaaccagaaaaattagagatttgtacctatttgttccaaaagggatagaacatgattgtgttagcattacaatgtccgctctcgaaagtggaaagcttaaaagtttaggtttgtctgcaccagttaagcctaacgaccatcttagtcgcgaagataaaattacattaacaaaatgtgcatcagatcttttaagttacaaatatcttattcgcaaacatgcttcagcaagcccaacaagcaatgtgcaaattttattaaataataccattggtaaatcaactgtgatgtctaaagaaaatatattctctgctatattaaagcttgaagacttcccagacattcaatcttcattcaaatccatggggctccctatggacgagttaatcagagttagaaaaagcaaaaactctaaaaaatttaggaaatggttagatacactccattcaatttcagatccaattgaagcgcaacgctattacttagaaagcactcaaaatcccaaagggatatttgattcattctttggaaagtcaacaaagagtattgccatgatgatactaggagcatacgctggtgcccaagtggatgcgagtattggaccatatgtcggtgcattaggttcaaaagttgctggcccaattactgattatattttagacatggctgacgaatatctgttttccgagttaactaaggggtggactcccaaaattttcataaatgacattaaacaattaagcttcaaatactcagtatga

SEQ ID NO: 195397 - DNA, 672 bp, Klebsiella oxytoca
atgtttaatgtttcgagagttgcaccagctccttcctgtttagctcgtaatatttataatgatcccactgtggttgctattctaaaacccatgttttttggtaagtgctatctatgtgagcaaattgatcttacagacccagaaattgaacattttgtgcctcatgaaggtgatgttttgctaaaatataattgggataatttattctatgcttgcggtcgttgtaatagtattaaaggggcgcatcacactaatcttctaaattgtacggactccagtgtgaatgtcaccaaggaaattgaacatattttaccaggggtcagttctgaaaaagtaattgtacgcgctcactattcaaatcctagtcaagagacattaaatactgtggcattgcttgatgagtgttataatttagataatacaggcttgcgtggtattacgcgagagaacttaatggaaaaaatctttgactactattatgagtatataaatgctagacgagtgctgatcactagaactagtttacagagtaagatcgacgaagcaattgaaactttaaaaataatgtgtaaacccaagtttcctttttcagcgttctgggtatggcattttaagcttgatatacgactgcatgagttacggcctgaagttttagagtttattgatgtgtaa

SEQ ID NO: 195398 - DNA, 1224 bp, Klebsiella oxytoca
atgaagttttcaatagaaaaactaatacataaagatgattttggtaatgattttgaaattgagcttggaggaaaaaatctaattattacaggtaataatggatctggaaaaacaaatatactgagaaaactgaatgctcgtttagagcagagattagttagtacagggaataacactttacagcaagctgaaagtaaatttcgagaagcagaggagagattgaaaaatatcctcccgggtgatgcattatacaatcattattgtatgcagatgaatgctgcgcaatcaacaattgatggtgaaaaaagtttctctataacttttaataatgaaagagatttcaaaacttcaattcatcaaagaaaatcaattatcagatttttcgaagcaacacgtcaagcaagtatacgaggagatggttcgatttcaggtatcgaaaaattgctgcaagaacacaagcagctcgctctgaatttagactctggtgtaatgtttgaacgctacttggtatcatattggaactatggattacttcaaaaaggaagcggaaacgatgtggaagctgaacgtgtatttagttggataactaaaataaatcaagatttaaaagtgctatttgaggatgattctttggtgcttgattttaatctggttgagttgcgtatttatttaaaacaaaatggtaaatcaccttttagactcgatcaattatcatctggtttttcatcggtactatctatttatgcagatctgttagtgaaagttgagcttgaaaagctctcgcgccatgaaatttcagggatcgttttgattgatgaaattgacgcgcatcttcatgtgaccctgcagaaaaaagttttctcattttttaatgcagcgttcccaaatatacagtttataattacgactcattctccatttgttgtacaatctgtatcagattgtattatttttaatttgtctactctagaaagcatgcacgatctttctatgtattcttacacatcgattataaaaggattgttaggggaaacttcagaatctgaggctctaaaagaaaaaattaaatcgttggaatctatttttaataatccggaaattaatgttattgaattgcagcaattggtaggagatcttgagccttatattgataagatggatgcaagttcgaaagtaaaagtagctctagcccagaataaaattattgagcttctgggggagtaa

SEQ ID NO: 195399 - DNA, 243 bp, Klebsiella oxytoca
atgatgatttactgcgcacgtattactgccatcgggctgtttgtcgccgacggcctcaccgacaagatgctcatcaccttcgacagcaacgggccgaaggactgcctcgattactccctctcgctggagccgtcgttccgggaagagagcctgatgatactccccggcgaccgcctgatgctggcagggccacaattatctggtgactgccgtcggcaagggtgcacagcaggcgctgtttga

SEQ ID NO: 195400 - DNA, 1014 bp, Klebsiella oxytoca
atgaacaaaatcagagttgccgtggtcggcgcaggtatctatggcaaacaccacatgaacgcgtaccgtcataatccggacacagtgctggtcgccatctgcgacaccgacacagagcgctgtgatgacctcgccatgacctacggcgtgatgggctatacccggctggatgtcctgctgcaggaggaagccatcgacgtggtctcggtggcaacacctgacccgtaccacactgaatccatcctcaccgccctgcgccacggcaaacatgtgctggcggaaaaaccgctcgccacctcagtacgcgagtgcgagcttatcgtggagatggcgcagcagcgggacctgctggtcggcgtcgatttccacaaacgctgggacccggcagtgatgcgcattaaagctgaactggaaaatccggagaccgggaagatcctgcgcgggcatatcagtatggacgacgtgataacggtcccgacggcgtggctgaactgggcgggcgcaagctcccctgtgtggtttctcggttcccactgctttgacctggtgcgctacctatccggtcaggaggttgcatcggtgtacgcggtaggacaaaaacaactgctggacatatgggggatggacacttatgacagcgtgcagagcctgctgacgatggccaacggcagttcatgggtggtcgagaattcgtgggtgctgccggaggggttcccgaaggacaacgacgggcgcatcgagatcctctgcgggacgacatatatccgcagcacctcacagcatcggggactggaaattaccaccccggataagacgctcacgcccaacagctacttcatcaactaccgcaacggcgtcgccagcggttttggtatcgatccgataaacgactttgtgcgggcagtcaggcacaaagtgccgtatccggtaacggcagtggacgggctggcggtgagccggatttgtgaggtggtacaccgcagcctggagagcggtaaacctgaaaacatttaa

SEQ ID NO: 195401 - DNA, 207 bp, Klebsiella oxytoca
atggaatctgagcatgaagctatcaatattgcattaaccattgaaaatggtgttgttaccaatgttcgccaaattcgaaaagatgaacatatagcctctctggaaacttttctctggatagtaaagcgcgctggctatgaggttgttccgcctcaagaaagcactcaagatccagaaaatatcaaggttcccgctgaagtcgaatag

SEQ ID NO: 195402 - DNA, 291 bp, Klebsiella oxytoca
atgagaatgaacagattcgccgctggtactgcgctgatttgcctgatgctgtgcgccagttgcaccagcgcgccgcctgtgccgacgccggtgattgtttacaacgcttgcccgagggtcagcctttgcccgatgccgggaagtgacccgaccaccaatggcgatctgagcgcggatatacgccagctcgtaagcgccctcgagggctgcgcgcttcaggtcagaacggtaaaaaactgccaggacaaaatcgatgtacaagtcaaagagtctgcgaaaagccttaactga

SEQ ID NO: 195403 - DNA, 324 bp, Klebsiella oxytoca
atgtacaagtcaaagagtctgcgaaaagccttaactgacgccgtgcctgatttggcgcgtaatcccgaaatgatgcgcatctttatcgataacggaaaactggcctcgacgctgtcggcgtcgctgtcgtttgaaaatcaatacacgctcaatgtggtggtgaccgacttcaccggcgatatcgagctgctgctcgtgccgattcaggcatggttgcgcatccatcaggccgacattatgacgaccgacgagggtcgcaaaaaggcttcccctattttgccgatatcaacgacaacgacagcgccgatatcagtatcagcctga

SEQ ID NO: 195404 - DNA, 450 bp, Klebsiella oxytoca
atgaatgactttaaaccgttcgacgataagctcgccgggctgattgcggcgctgtcaccgaccgcccggcgcaagatggccgcagatatcgcgaagcccctgagagcccgacaacagcgccggattaaaacgcaaaaagcgcccgacggcaccccatacgccgcacgaaaacgccagccggtgaaagcgaagaaagaccgggttaagcgggaaatgttcgcgaaactccgcatcagtcgctttatgaaagccacggcgggaaatgatgtggcggttgtggagttcactggcaaggtgcaaaggatggtgaatgtgcataagtacgggcttaaggacaaacctagccctaatagcggctctgtagaataccctgcacgtatcttgcttggattttcgccttccgatattgactttgtatccacaaagaccgttaattatctatcggagtga

SEQ ID NO: 195405 - DNA, 546 bp, Klebsiella oxytoca
gtgcgaaaattaagcaaggggaatgaaggcgcgatagacaaaaaaattgaattaatgataaaggttattattcgtactgactcttatctaaactcagcaaacactaagtctactatattacttagtttgtcatcagcactattagttgctctgtctgtaaacttcaagaacatcacgggtatggtgatagttgattcagataaagctgttcttgctgttctgataagtttgatgatttttttactaataacgtcaattgttttctcgcttagaggtattactccatatattaaaccaagtacggtaagtaacaccttttcatttgttgatatttcaattaatttccatgagttacatttatataaagaacgttttaattcagtatctaaactggagtatttaaatgaattaatttcattaaaccataatttatccaaagcgctcgttgcaaagtataataagcagattactgcaataacctgtattgaagcaactgcgtacgtcctgtgtttttcagtgtatatgattattatagctaattgctaa

SEQ ID NO: 195406 - DNA, 1359 bp, Klebsiella oxytoca
atgtcggctaaaaatatatattctaatttggaaaaaagcttagagaaaactatttctgagtccaggagtatacggttgcgtgattctggctatatttctgaggcagcatcgagttcccttgcagggatggaaaatctagatagtagatatgattttgtgaaaagctctgttgccttagaaagcgtgcgtgctgattctaatgaacaacattacgggataactgaattagtgaggcataattttggaaagcatggccgattaatgccaagttttggatgtcatcctgatttcgataatatggatgaaggagagttgagaaatggctactcagttactatgtttatggatatcattggctccactaaacttggtgtaatcttcagtcctgaaactgtttttaaaataaaaaatgatattattagatgtgcaatagaaacagtaaactctttcgatggacatgtgcatcgtattatgggtgatgctgtgatggccttctttagaagtgataagtgcgagagagaaggtcgcattgcagacagtgccattgatgcattgaattgcgcgacatatttaatcgatatgtttaaaagtacggtaatccctaaactaaatgagctgggggtagatgaaaatcttggcatacgtataggaatcgactatggagcacatgaccaagttatctggggtaaatatggttatatggaaagtcaggaggtaactgctacatctttttttgtcgacgtagcagctaaactacaacaaaaggcaccgaaaaactcgattatgataggtgatagtttagcagaacttttaggctttgataccaatcaactggcagtgagaacaaaaataaaaaataatgaagaggtttctcttcattatatcaccccgaattataaggatgcgtcggggaaatcaattaattacaggcagcatcttttaaagaatgagtcatactacaagcttttgccaacagggatgcttgatagtgatttctatatacgagccagtctgaaaagagacaaaaacgatccatctgatgataattatatttcttgctctcgggtggttagaaaaggaatgggtatttcatttaaggggtattatcattctacgatcacttacgacaaccccaaatttaaatttagagtaaaaaatactggagcggaagcggcagatgctgagaataatggagatcattatttttttgagcctgcaaagtattcagatggtagatatttcgctccgcattgggaagatacaaaatataaaggccttcatcatatgtatgtgtctttctgggatggtgaacaactaattgaaccggaaaaatgcttctcagtattcataaatgactga

SEQ ID NO: 195407 - DNA, 636 bp, Klebsiella oxytoca
atgaatactcgcgcaaatcttcaggacgctttacgtctcctacgcaatctgatccgcaccggcgttatcgtcgaagttgacctcgataacgggcgctgtcgtgtccagactggcggcatcgttaccgattggcttcagtggctgacgtcgcgcgctggtcgctctcgcacgtggtgggctccctctgtgggcgagcaggttttactgctggccgtgggcggcgagctcgataccgcctttgtgctgcccggtattttctctgatgactaccccgcaccgtcggcatcggctgatgtatttcacattacctttcctgacggggcggttatcgagtacgagccggagaccggcgcgctgaccgtaagcggcataaaaaccgcagacattacggcgtcggattccatcgccgtgacggtgccggtggtgacggtgaaagcggagacccgcatcaccctcgacaccccagaggtggtctgcaccaacaagctgacgaccgggtcactcgaggtcaccaaaggcgggacgatgaaaggcaatattacccataccgccggatcgctttcttcaaacggaaaagtgcttcatctgcataaacaccccggcgacagcggcggtgaaacagggacaccactatga

SEQ ID NO: 195408 - DNA, 147 bp, Klebsiella oxytoca; identical to SEQ ID NO: 102984

SEQ ID NO: 195409 - DNA, 1548 bp, Klebsiella oxytoca
atgaacattgaagaagaattggttaactttttacacaggacgatgcgtgataatgatactaaatatagagatattgagttaattttattttattttggttttcgagaggaaatatggccaacattagatgatgcagcaataagatttaacgttggtgattcagataaacgtcgttcagagagaccaagacaaataatcaaaaacaaatttacaagtaaggtgactctgtctgatctacctataacgcaagaggtttttataattatcgaatcaagcagatgcgctactattgaagatattaccataaaattaaaagagaaaaatttagtcccgaattcatttagtataaaaggcatactgaatttattgcatcatttgaacgtttgtgaagaatataatatatacactaacagactttccactgcaagccggcaatcaattgaatctgaaacaaacctttatttgttaaaatcttcagaacttcctgagataaaaaaagccatacgaaaaattagaacttatccagggttggttggcatatcaaacttctcaactttttttaagaacagtgaagaatatgcaacttacaaagaattgctattgaatataattcgttctcgggatgatatttggttatcgaatataaatgacgactattggtatatcgtagaagaaagagagaataccctaattaacaacttagggaaaattaaaaacattgctgaggtagtcaatattgatacgctttctattgtgctattgaatgcttttaagcaaagaactccacctaaaggcgcaatatatccccccataaatgttttaaaaaaatatcttgaatcctctcggtttactgagtttgatggttgtgctgcaaagttaacattagatgctactaacttaagagatatagaattagatatcattaattacatgaaaaataaagaatccattagtttcgtagatgttaagtgttttctggaacagaggggatatagcaaaccgaatataaataaagccatattaaattcaacactaatctttgctgataaaactattcggagaagttatacatataccttgttgaaaagtgaatcttttacaagtggcattgttcttgatagatatgaggaatttaaatacaaactattaacagcttgtgccgaaggaactgatatcgatagcatgagtgtatgtcggaaagagcagcggttattgaggagttggctttttgacaataaagagagtgaaacttgtgctatttgctctaatgtactttcagttaattctttggtcgctgcacacaaaaagccaaggtcaatttgttcttttaatgagcgagtggatccttatattgtaatgcctgtatgtaaatatggatgtgactatttatatgaaaattgtcacattataattattgatggcattgtaagtaaaaatttttcaaaaaatctaacggcatttgaatgcgattatatagaaaaaattagtggtaatattgttgacaaacgctggcttaaaggggatcccaattacttccggagaaagtaa

SEQ ID NO: 195410 - DNA, 1674 bp, Klebsiella oxytoca
atggaaccaacattgtcattaaccgtgatgttctgtgctgcagtgggtgcttcagtatcagaatcgctgtcagaatccgagtcactgtcggaatccgagtcactgtccgaatccgaatcgctgtcggaatccgagtcactgtcggagtcagaatcgctgtcggagtcagaatcgctgtcagagtccgaatcgctgtcggaatctgaatcgctgtcggaatccgagtcactatctgaatcggagtcgctgtcggagtccgaatcgctgtcgctatccgaatcgctgtcggaatcggagtcgctgtcagaatcggaatcgctgtcgctatccgagtcactgtcggagtcggaatcgctgtcgctatccgagtcactgtcggagtcggagtcactgtcagagtcagaatcgctgtcggagtccgaatcgctgtcagaatccgagtcgctgtcagagtcggaatcgctgtcggagtccgaatcgctgtcagagtcagaatcgctgtcggaatccgagtcgctgtcggagtccgaatcgctgtcggagtccgaatcgctgtcggagtccgaatcgctgtcggaatcggagtcgctgtccgaatccgaatcgctgtcagaatccgagtcgctgtcagagtcagaatcgctgtcagaatccgagtcgctgtcagagtcggaatcgctgtcagagtcggaatcgctgtcggagtccgaatcgctgtcagagtcagaatcgctgtcggaatccgagtcgctgtcggagtccgaatcgctgtcggagtccgaatcgctgtcggagtccgaatcgctgtcggaatcggagtcgctgtccgaatccgaatcgctgtcagaatccgagtcgctgtcagagtcagaatcgctgtcagaatccgagtcgctgtcagagtcggaatcgctgtcagagtcggaatcgctgtcggagtccgaatcgctgtcagagtcagaatcgctgtcggaatccgagtcgctgtcggaatcggaatcgctgtccgaatccgagtcactgtcagaatcggaatcgctgtcggaatccgagtcactgtcggagtcggaatcgctgtcagagtcggaatcgctgtccgaatccgagtcgctgtcagagtcagaatcgctgtcggaatccgagtcgctgtcagagtcggaatcgctgtctgaatcggaatcgctgtcgctatccgagtcactgtctgaatcggagtcactgtcagaatccgagtcactatcggaatccgaatcactatcggagtccgaatcactatcggagtccgaatcactgtcagagtccgaatcgctgtctgaatcggaatcgctgtcggaatccgagtcactgtcggagtcagagtcactgtcggaatccgaatcgctgtcggaatccgagtcactgtcggaatccgaatcgctgtcagagtcagagtcgctgtccgaatcggaatcgctgtccgaatccgagtcgctgtcagaatccgagtcgctgtcagaatccgagtcactatcagaatcggaatcgctgtcagagtccgagtcactgtctgaatcggaatcgctgtcggaatcagaatcgctgtcgctatccgaatcgctgtcagcatccgagtcactatcggagtccgaatcactgtccgcatctgagtcagtttctgaaatcgaagagtgctga

SEQ ID NO: 195411 - DNA, 465 bp, Klebsiella oxytoca
atgaaggcgaggcgatcgcctcctgaagaacgctgctatgaaggagcgctcaggctgctgacacagtgcgttgttgcgaaattgcccggcggcctcgcttgctcgggcctatgctcgggcctaaggagctatgcacgatcggctgatatttctgcttttccaggccgggtgaggcgcgagccgtcacccggcagaaacacaatcacattatctatagtcgtttttcgtccttcccggagcgctgaaagagcgccaaccccatccaggcgccgtgtctgcatcaaatggacacagccgctggcagaatggttatcaatacatctcttcagccaaaggcaaggggcggtctctcgaccagcgagcgtacagtaccaacgccgcgttcacttcgttcgagtcaaaagtatacaaatgctccatcattttctgcggatcggcatctggctgctcaataaaatccactag

SEQ ID NO: 195412 - DNA, 177 bp, Klebsiella oxytoca
atgaaggtagcgcccaacgtcccgatctggtgtctgctcatcgtgtgtatacccgtcatacttcaagttgcatgtgcgttggcttcctcgctcgccccagtcacttacttaagtaagctcctggggactccctgcgtcgccgccttcctgcaactcgaattatttagggtatattag

SEQ ID NO: 195413 - DNA, 231 bp, Klebsiella oxytoca
atgagaaccgtatcgatatttaaaaacggcaataatcgtgctatccgtctgccccgagacctggattttgagggagtgagcgaactggaaatcgtccgggaaggtgacagcatcatccttcgtcccgttcgaccaacatggggttcgtttactcagctcgaaaaagccgattcagactttatggccgagcgtggtgacattgtcagcgatgaaggacgatttgacctgtga

SEQ ID NO: 195414 - DNA, 417 bp, Klebsiella oxytoca
gtgatcaaaacctatatgctggacaccaacatttgctcatttatcatgcgtgagcaaccggaagctgtcatcaaacggctagaacaggcagtactgcgtaatcaccgcatcgtggtttcggccatcacctatgccgagatgcgtttcggtgcgatcggaaagaaggcatccccccgccacggcctgcttgtcgaagctttctgcgcccgcctcgatgcaatcctcgcctgggaccgcgccgcggtggacgcaaccacggagattaaggccgcactgactgcggccgggacgccaattggtccgaacgacacggcaattgccgggcatgctatcgccgccggcgccgtactggtgacgaacaacgtgcgagagtttgagcgtgtgcctggactaattctggaagactgggctaactga

SEQ ID NO: 195415 - DNA, 495 bp, Klebsiella oxytoca
gtggaagcatttacagtacggagaataatcgagagcgatctggacgatttcaggaaattgaggttggaggctttacggcttcatcctgaggcctttggtgcgtcttatgaagaattcagccagaagccactgcatttctttgccgaacaactacgaaccagtcatgtcttcggcggttttgatgttcataacaccttgcagggaatgattggcgtaaatagaagcccattaccaaagctgagtcatgttgcgaatatctggggaatgtatgttcgcgccgagaagagaggttccgggcttgcagccagactcatggatacggcgctggaagctgccagttcagccaaaaccgtaaagttgtcagtagttacaactaaccgggctgcatatgcactttatcgttccttcgggttcgcagagtgggcgactgataccgctgcgctatgcgttaatggggagttccatgacgaatttctgatgagacgcgactcgtag

SEQ ID NO: 195416 - DNA, 606 bp, Klebsiella oxytoca
atgaatgctctcgaccttaaagccgcaatcaaagtaaaacgctacacctcctggcgtggcgaacgtgggtgtgctgctgacaacctcctgcaacgaaacttcaaagccagccggcccaatgaaaaatgggtcacagatgtcaccgagttcgccgttaatggccgcaaactctatctttctcccatcatcgatctcttcaataacgaagtgatttcctacagtatttcagaacgcccgacaatgccgatgattgacgacatgttgattaaggcattcgccagaatggacgcaaagagcaaaccagttcttcactcagatcagggctggcaataccggcatcggtggtatcagtatcagttgcgggagtttggtgttctgcaaagcatgtcgcgcaaaggaaactgtctggataatgcctgtgcggaatgctttttcgggacgttaaaatcagaatgcttttacacccgtaaattcaacgatgttgacgaactgaagcgcgttcttgaggattacattcattattacaatacccgacgaatcagccttaaatttcacgggctaagcccggttgaatatcgcctgaagacctacccgctgcgaatttaa

SEQ ID NO: 195417 - DNA, 555 bp, Klebsiella oxytoca
atgcactgcacccatttagttggactctcaaactggagagtcctatgcccggccgtaaatataccctcgaagaacgccttgaagtcgatatgcactatcttgctagcgactgaaggctatcggttaacttcagctcgtttcaacgttcccagaacccaggtgagaatctgggttgcaacctatgatgcttatggagaagagggattaaggcccagagataagggcgtgtccatcgatcctgagatcagaattgaagctgtaaaagccgtgctttcaggccagatatcccagactcaggccgcgactaaattcaatgttgcaggtgcgtcatctgtcgccaaatggctaaaagtatacaaagagcagggtgaagaagggcttcgctcactcaaggtaggcacaaaaagggtatcttacatggctgaacaccctgaacttattgaagccgcagaggaacgatcaaaagcgcaacggattcatgaactggaaaggaaagtcaaacgtcttgaattacagatactttatttacaaaagctgaaagccttagttcggtaa

SEQ ID NO: 195418 - DNA, 573 bp, Klebsiella oxytoca
gtgattcggattccgacagcgattcggattcggacagtgactcggattcggacagcgattcggactcggacagcgactccgattccgacagcgattcggactctgacagtgattcggattccgacagcgattcggattcggacagtgactcggattcggacagcgattcggactcggacagtgactccgactctgacagcgattccgactccgacagcgactctgactcagacagcgactcggactctgacagtgactcggatagcgacagcgattccgacagtgactcggactcggacagtgactcggattctgacagcgactccgacagcgactcggattctgacagtgattcggattccgacagtgactccgactccgacagcgactcggattctgacagcgatgccgactccgacagtgactcggattccgacagcgattcggattctgacagcgactcggattccgacagcgattccgactctgacagcgactcggactctgacagcgatattgaggccaaccccgatagcaacagcccggacgttgtcgcgctggaaggtaacctga

SEQ ID NO: 195419 - DNA, 1017 bp, Klebsiella oxytoca
atgattattcaacgcgctcgtcaactggctttgcgttcgcccgcccgggtggtgtttccggatgccctggacattcgcgttcttaaagcggcgcactacctgcagcagcaggggctggcaaagccgattttgatcgccagcccttttgctctgcgccagttcgccctcagccaccggttgccgatggacggaatgcagattgtcgatccgtacagcaaccggcaaatgcgcgccgcctttgcccggcgctggctggatcgggccggggaaaaaacgccgccggacgcggaggaaaaactcaacgacccgctgatgttcgccgccgccatggtcagcgccggaaaggccgacgtgtgtattgccggcaatctctcctcgacggcgaacgtactgcgcgccggattgcgcattattggccttcagcctggctgcaaaacgctgtcgtcgatctttctgatgctgccgcagtacgtcggaccggcgctgggatttgccgactgcagcgtggtgccgcagccgacggcggcgcaactggcggatatcgctatcgccagcgctgagacatggcaggcgattaccggcgaggagccgcgggtggcgatgctgtcgttttccagcaacggcagcgcccgccaccccaacgtcgccaacgtacagcaggccacagagatcgtgcgtcagcgcgctccgcagctgatggtggatggcgaactgcagtttgacgccgccttcgtgccggaggtcgccgcgcaaaaagcgcccgacagtccgctgcagggacgggccaatgtgatggtttttccatcgctggaggcgggcaacatcggctacaaaatcgcccagcgtctgggcggctatcgtgcgatcgggccgctgattcaggggctggccgcaccgctccatgacctctcccgaggctgtagcgtgcaggaaattatcgaactggcgttagtggcagccgtgccgcgccggagtgacgtaagcagcgattgccgcttacccatgcaggttgaatga

SEQ ID NO: 195420 - DNA, 174 bp, Klebsiella oxytoca
atgtattgcgattctgccccaagcagcagaaagcttaacttattcgtggttctatgcagtatcatgaacccgtataagttgctccatctacggggtacgagagagaaagtcggatatctgttaacgcttgaagaacagatccctgcatttctgcacctcctaagtaaaggttga

SEQ ID NO: 195421 - DNA, 156 bp, Klebsiella oxytoca
atggctcgccgctacttcaacggtacggtgcgcgatttgaatattctggtcgagtctttccccagcctgctgctggcgcgactatttaaatttaaagcagaagctttctttgaactggactcaccggaagaagctcaatctccacggatggagtga

SEQ ID NO: 195422 - DNA, 327 bp, Klebsiella oxytoca
atgatggtaagttcgtttccttcacctgctgccgactatgttgagcagagactgactgtcacggctgcgtgcaatattggcgcgaactctcaggttatacagacagatcgaggctatgtcgttctcgatttgtcgctgaaggtgacgcaaggaagcgtcctgcttatccgcctggctggcgaactgcagtttgcaaaattgatggggcgttcttttatcactgtcgaaggtgaatcgatagaaggggaggcgatggaagatgttgaagtgttgggggtggctacgcacgcgatcaacgacttgaggcaggacgatagccctatttga

SEQ ID NO: 195423 - DNA, 240 bp, Klebsiella oxytoca
atgctcagacaatcagacatcaaccaggcctttcgggagtcgattcttcgtaactcgaaaggctaccagtatctgcacacggtggattttgtttcatctatgcagcaacgaggcattcacttttcatactcagaagctaaccgatggatagagcgctatcaaagctgcttcgctgacaaaacgccggaccacaccgaaaacaggctttggattttaaggaatatggggaggatcatgtaa

SEQ ID NO: 195424 - DNA, 528 bp, Klebsiella oxytoca
gtgacgcgcccggacgaagtttgcactgttcgccaggacctggattttatggctgctgaccgcggggcaatttttgctgattacaacatgcccgccagcctgcaggcgatgagcggggtttataatgccgggcaagccattgtctgccttgacaatgattctgtggctgagtatgtgaactttatgaaccgtcgcatcagtaacagcatcaccaatcagaacctgactgcagcagctaaaattgtcggtagttcagagataaccgtggaagttaaacgtttagggcaagtgagaaacggccatcagtcctttatcagttcatttattaacgacgatatgcgtgtatttgatggcatcaacaaatacagcggtgcgccgcttgtatcaactcagctgaaccgcttaatgattggacgggccagaacgacccctggcgctgtttcaaacgcatacctgaagcgcctggtttactacccgacaacgttagctgatgctgatttagtatctcagtttaatgcgttgtcgtag

SEQ ID NO: 195425 - DNA, 294 bp, Klebsiella oxytoca
atgaaacaattaacagtatttgaaatggaagaaatttctggcggctattcctgggatttttcctctatccaatccagcattaccagcctggtctctaacggtgttgaagctgctgcctcagcaacattatggggtgtaacatgtggtgtcttcggcacactaatcggtggcactcagtctggtgctaatggaggtatacttggtttcggtttaatcggtaatgctgtcggcttggtttggggagctattactggtgggatcattggtgcagtaacaggtgcatcaatgggctag

SEQ ID NO: 195426 - DNA, 579 bp, Klebsiella oxytoca
atgaaaaacaatgatatgaagcccagactctctcacgcgctactgtttgttccttttttgcttttggcaggatgttcatcctcatcgaaaccgcataaaaccgccgcccagagtagtcactcgaccatcgacggaggttcagacgatctgatcccggtgatcgccgcgctgcacgatcaaatgcatacctgggagggaacgccctacgaatggggcgggacggagcaaagcggcgtcgactgctccgggtttgtctggcgcacgctcaaagatcgcttcaacctgccgatggagcgcattacgacgcgcgagcttctgcatatgggcgagcgcgtgagcccgcggcagctgcggccgggagatttagtcttcttccgtattaaaggcggcatgcacgtcggtttctatgataccgaccgtaattttcttcatgcttccaccagccagggcgtgatgcgctcttcgctggataatccatactggcaatcggtattctaccaggctcgccgcctgccgaaggaatataacgcccagataaccatgaataacgataatctgcatctggcaaaaaatcgttaa

SEQ ID NO: 195427 - DNA, 1659 bp, Klebsiella oxytoca
gtgcgggttaaatcgattaagcttaccaatttcaagaaattcaaagatgagcattttgaattcaacgatgacgtaaatatctttgtaggtgataacaacgccggtaaaagtactattctggaagccctggaaatcgtacttaattacagctatcggggccgccccttcaacagcgagtttacgccagacatttttaataaggatgcagtgcagctttttttggcttcagataaatcggccacgcacttgcctgtcttggcaatagaggcattcattgagggggtgcctgaataccggggtacaaataatttccttaaagccgatgctcaagggatcacggtgctggtgcgctttgatgacacgctcaaggacgtttacgccgaccacttactgacaaacccacacattacgagtatcccgatagaattctacaagctggaatggctggatttcggatggaatcccgttaaagccgtagcgaagaaattcagggcgttatacatcgacccaactcgtatccaccccactctgggcaagaatcagtacatctctaccatacttaataccgctttaaagaaagaggaactggttaagctgaccctcaattatcgtgagaatcagcaggtttttaacaactcaggtgaggtcaggacagtcaacaccggtctggatacggaccacttgatcacagaaaaaaagctgtccattgccgcaagcactttacctgcgggatctattcagaccagccttcaacttgaagtagatgatgtccctttccagttcattggcaagggtgagcagagtaatgtgcagatcaagctcgcgattcagaacaagtcgaaggatatcgatttggtgatgatggaggagcccgaaaatcacctttctcacactaacctcaataagctggttcactacattgaaaatcagcggggcgacaaacaactcttccttaccactcacagctcgtatgtgctcaacaagctgagcattgataaaatctgcctggttcagtcgggatacaaacgtcttcataagcttgcccctgcagtggtcaaaaccttaaagcgcttaccgggctatgacacattgcgcgtggcactgtcgcacaaagtcatacttgtcgagggaccgtcagacgagttagtactcaagaagatttacctccgcaagcacaaccgcctgcccgagcaggatggtattgatatcatcgtcgtgcgcggagtcgggtttgatacgttcatctccgttggtatggaaattggtacccggataaacgtcctcagagataacgatggcgactatgatgaaaacgtcgtgaaagtgcgtgccgattatgcggcctatcccaatatcaaacttatctcctctgccaaaaatgaggagttttcgcttgaacccgcgatgatatatgccaatggaaccgacttggttacgctggacgctttcgccaaagtggtgttatcgacacagacgtttaacctctacgataaagtagtcgacttagataagagacgcgacttcctgatcgactggtttcgaagcgtccagggaaacggtaagggcgctcgcaaggtcgattcagctatcaagctgttcgatggcactctgaatttcaggtatccacctttcctcgatgaggtgttcgactttgcctaa

SEQ ID NO: 195428 - DNA, 1155 bp, Klebsiella oxytoca
ttgcctaatgaattctggattgccggtgcaggatcaggaaaaacccaaaaagtcattgaggatgccattgaagtcataaaggcgggcggacgcgtgttggtcgtcacctacaccatgaacaaccaggcagagctccgttctcgctttgtggaattgtacggcaaacacagcgatgattttgttgtgaaaggcctgttttcattttacctagaagacttagtgagaccttatcaaacggccatatttccagatcgaatcacttctacaatgttcaccgagcataaccctcacctgatacctggtacgaggaaatggcatcccaaaagaggggaaaaaattaatggggcgttgaatcctcttcattatctgacgccgtgcaaaaccaaagcttacactggactgctggcgaagctggcaacaagaatctccgcttcaacaaagaatgcccccgctaacagattgaaagagatttatcagaggatcttttttgatgaggttcaggatttggttggatgggattttgacgttatcaaagcacttagtaaggcaatgcgtaactctatttgctgtgtaggcgattttcgtcaaactatttacacgaccacgttcggccacaaggcaccggaaacacctgagcaaaagattcaatacttcaaagacctcaattttagtccgttctcgctggcgaagaatcgcagatgtatccaggaaatctgcgatctcgcggataccattcatcccggtatttatgaacaaacgcaatcagaggtgggagaagttcctgctgagatggcccatcactgcggctgttttctcataaaaccatctcaggtggacgattatctcgatatattcaaacctcaagttttgcgatggtcatcgcccatgggaaaaggctatttgccaccaggtctcacctgtcacaccttcggctcatgtaaaggtctcggttttgaccgcgtactaattattccaccggagaaacatctcaagtatctgggtggcgatcttggcgtgttcgataaagataaaacggaggaatctagaaacaagctgtacgtggccattacccgagctcgttacagcctggcgtttgtcgttgaggaagagcatcttacaaatataaagctgccgcattgggctagacctctgtaa

SEQ ID NO: 195429 - DNA, 1770 bp, Klebsiella oxytoca
atgacgctcttaagcaccgatccactcacccagctcgctttctccgttcacgaaaataaaggggtttttgctgttcttttaggttctgggttatcccgaacggcacaaatacccacgggctgggaaatcactctcgatctcatcaaacgcattgccgccgcgcaggacgttgaagaacaaacggactgggcgcaatggtaccgtgacaaaacaggtaacgaacccgactactcaaaactattagaagacctgacgatttcgcctgctgaacgccgctctattttgcacaactacattgagccgaatgaagaagaaaaagaggagggtaaaaaattacccacgccagcacatcaggccattgccaggcttgttcgctcaggccatattcgggtcatcctcacaaccaactttgaccgattaatggaaaatgcgctgcgggaacagggggttgaaccaaccgtgatttcctccgtggattctctttcaggcgcagaacccttgacacattctcaatgttatttggtcaagctgcatggcgactacaaagatgcaaggattctcaacaccgataatgaactggcaagctatcccgttgaatacaaccagttgcttgaccgaatcattgatgaacacggcctaatcatttgcggctggtctggtgagtgggatcatgctttgcgtgcagcaatactgcgggcgcccaacaaaagatatcccatgttctgggcagcaaaaaatccgccgggcacaaacgcccaggatcttatctcccatcggcaggcaaaaattatggaaatcaccggtgccgatgatttcttcaacacacttcagcaacgagtaaccattcttgaacaaagccgaaaacaaaacccattaagcgtcgaactgttaaccaacagtacaaaaaaatatctggctaaagcagaatttcgcattcaacttgatgagctcttttcaggtgagtttgagcgtttattagaagcaatgaattcagacacactctcccctaacggccgatggagtcctgaagagttcagtcaacgggtatcaacttatgaatcgataacagagccattaggtcgtatggccggaatactgggtcgttggggagaggataaacataaagaattaatatttgatatcattaataacatcatcagccattccaaaaaccacaacggtgggctgagtgcatggataaatctgcgcacttacccggcagtgatgattatgacagcgtatgcgcttggcttaatccgttctcgccgatggggcacattacacgagctgtttttgaaaaaaatagtgatcccccatcacgaaccgtgcagcatcattacgcttttatttttatggtcgtgggaaggcggtggtgatatctggaagcaattggatgggctagacagaagaaaaacagcgttaagcgatcatcttttgacgattatggatgaatggaaatccagcttcatcggaacaaccgccaacttcgaactctcttacgaccgatatgaaacgttagcatcactggcatactttgaggaacaactgtcaacatatccggataaaacccaaattgacatacaatacttccgtatgcctgttggccgggttggctggaatagttcttcctaccgcatactcacccaggaattgaaagatacaaacatccttgatgatttgttaacgcatggttttgccaacaatagcgaagaagacctggctctgtttttacgatgtttcgaaagcatcgcaggacgcatgagctggtaa

SEQ ID NO: 195430 - DNA, 651 bp, Klebsiella oxytoca
atgacgttacttctgctgatattgatggggtttcatcttcacggtgaaaccgtacatgaatgggcggggattatttttacgctactcatcttattgcatttataccttaatcgtcatcgattatggtcactatcgccaaatattccgttaacaatgcagatagtgaacaggatcattaacggagtgactttcgttgttatcctgaccgctattgtctctggcatgatgctgtcccgacatattcttctggctatgccgttccacaacccggcgaactgggttagaaaagtacacatgacgtcggtccattggggaatgctcattctggcgctgcatatcgggttgcactggaaaatgttggcaacgtttttctgccggatcctgagcatatccggcaactcacaccttgcaaatatcattatgccaggtgttttttcgctcatcgcactactgggtttgtacggattactgagccaggactatatcgattatttgctgatgaaggtcgacttctccttttttgattacgatgaatctgctctccttttttatttccgctacctgtccattattgttttatttgcattaacgacacgctttttgctttggctttttatatttagaaaatgcaaagcgatgccaccacaatag

SEQ ID NO: 195431 - DNA, 222 bp, Klebsiella oxytoca
atgaaacaacaatcgactaaatgcgcggtcgatgaatgggggaatctggtcaatgcagaagattttcgctatccctcattctggaaactttactgcttccattgcaagagtccggtagtgcttgttcttgctccgaacgggcaggtaccgcattttctgcatgatgaaacctttatggcatcagccgatttcatggcatgcccgaatgtggaatgttcctaa

SEQ ID NO: 195432 - DNA, 825 bp, Klebsiella oxytoca
atgcgattagcatcccgctttggtgcggtgaaccttgttcgccgtgaccgtcccttaacccgtgatgaacttgctcactatgttcccagcgtgttcagtgaggaaaagcatgaatcgcgcagtgagcgctatacctgcataccgaccatcactctgttggataacctccagcgcgaaggttttcagccgttctttgcctgccagacccgtgtgcgtaaccccgacaagcgggaacacaccaaacatatgctacgtctgcgccgcgaagggcagattaccggtaaacaggtgccggaaattatcctgcttaacagccatgacggttccagttcctaccagatgctgccgggactgttccgatcggtctgtcagaacggactgatttgcggcgagagctttggagaggtgcgagtgccccataagggcaacgtggtggaaaaggttatcgaaggggcttacgaggtgcttggggtgtttgacagggtggaggaaaaacgcgatgccatgcagtcactaatgtttccgccgccagcacaacaggtactggcaaaagctgcactgacatatcgctttggcgaggagcatcagcccgtgacggaatcacagctattggcccctcgtcgctggcaggatgattctggagatctctggacaacttatcagcgtattcaggagaacctgattaaaggtggactggtggggagagcggcaaacggtaagcgcgcaaatacccgtgccgttaagggtatcaacagcgacgtgaagctcaaccgcgccctgtgggtgatggcagagaacatgctgtcattgctcggtcagtcctga

SEQ ID NO: 195433 - DNA, 231 bp, Klebsiella oxytoca
gtgcataccgaacctgctttatccctccccgacggtccgtttacccgccaccaggcaacatccctcacagagctatataagaacgtcgctatcgaagacgaccaggggacacattttcgtctggtcgtacgctataacggcacgatggtctggcgggcatggaacttcgagccagaagccggacggttacttaaccgttacatcacttcttacggtattcgtaaaccctga

SEQ ID NO: 195434 - DNA, 441 bp, Klebsiella oxytoca
atgactattgccctccctgatacttctcttgtccctgcccccataaccgccacgctcatccctgatgagcaacgtctcagcttctggccccagcatttcagcacggttcctcagtggatattactggagccacgtgtctttagccggatggacgcgttatgcgcggactacaccggtggcatctggaatttcttcacgctcagtaacggtggagcctttattgccccggacggtgacgaaacatggtcgttgtttaacgtccttaacggtaatagcgccatcctcggtaatgaagcggcaggcatcgcggtttgtctgctggcctggaaccaccacgcatggcatacgggtagtgacgtgatgtgtgaccacttttaccgcctgcgtaattacgcccttcagcatcctgaatgcagcgccattttgcagattattgactga

SEQ ID NO: 195435 - DNA, 477 bp, Klebsiella oxytoca
atggctttcgaattaacagcgtcacctgtactgccgatgacgacccgtcgtacggttcagagagcactctcattactggagaaacatcttcgtgagccgggtgcattgtttacgtccactgcggcggttcgtgactggctgcgtttgaaaatgaccggcctggagcgcgaggtatttatggtgctgtacctggataaccagcaccgtctgctggaatgcgaaacactgttcagcggcaccatcaacagtacggaggtgcatccacgtgaagtggtgaagtcggccctgcgccataacgcggctgccgtacttctggcacacaaccatccttccggcgaagcggagcccagcctggctgacaggcaaaccaccgacaggctgttgaaggcactttcgctggttgaggtcagagtgctggaccactgtattgtcgggggtatgaccgtgagttcgtttgcagaacgtggctggctataa

SEQ ID NO: 195436 - DNA, 333 bp, Klebsiella oxytoca
atgtcatcaaatgacttacagcaatggggattatgtcgcagcatctcaccgtgctttggcgcaaggctcgtacaggagagaaaccgcctgcactttctagctgaccgcgccggttttaacggtcagtttaccgaagagcaggcgctgcgactcgaccaggcatttcctctgatgatgaagcaactggagctgatgctctccaccggtgagcttaattcgcgccacccgcattgtgtcaccctttaccacaatgggctgacctgtgaggccgatacacgagggagttgtggctacgtgtacctctccgtttatccaaccccgccgccagcataa

SEQ ID NO: 195437 - DNA, 360 bp, Klebsiella oxytoca
atgcagcctttaaatgaactgactaataagtcggttggctcttgcattgtcccccagcattgcatctttaccagcatacagtgcagtactgcccacatcacggatcaggacaacgaaagattttatgaactgtcgcatgatcagactgaatacagtgatgcggagtggatccactttaccggaacaggttacttgctccggctcagtgcctggcaatacccagtgctcaggttgaaacgacttggcctgtcgcaagcgtgtcgtcgattgatcctgatattatcccatcggtatgcgatcacctatatccattttgatgcggctggagacgtgttgcctggagtcgagcatttcgactga

SEQ ID NO: 195438 - DNA, 240 bp, Klebsiella oxytoca
atgccgcgaaactcagatatcgaaatggcctggcgtcaggcaattgtcattgaatcaaatggccgccgtacagtgacaacatccaggtttatcttggaactcgcaaaggttaactggatatggtctccgcgtcaggcaaaccagtggatagagcattatgtgacgacgtttcgggatgtctcaacgaaagagggggacgagcgaacattccagctttataacccaaacggagggctgtaa

SEQ ID NO: 195439 - DNA, 696 bp, Klebsiella oxytoca
atggacatagaagcgttacgagacctaacattgtataaatactttactgacttgcagtttgctgaggatttttgtaatggtcacttgagattaggaactctccatggatataaaaaatgcgaggatgatttgcgaggtgaccgtggtgaaggagacttcacattcaatgccttcacaaaaaaagttaacggttcaccaaccgaagaggaatccagaatattacaaagatttggtattggatactctcacgtcgaaaatgttcaattttcaatgaatcccactataatctccacaactgaccggtgggttttatgcacagccacacagcaattaaatcaaaaagagcgtgaggtctttggtgaatactgtatagcaattaatggtcatagtttattagttggacttattgaggggattactaagcactataaattttatcaaataaattgtgaccatgtaaaatacattgagcgaacagcggaatacacagagattttaaaaatagagccaccattcataaaacctgcaattccttttggaaaccaatttgagtttagatacactatattagctggagataatgccacacgtaaaaatggcattgtatattttgataaaaatgaatatgagcctatcttcattgattccgacacgatcgccaatgcatgtacaaaactatataaaactggaatatga

SEQ ID NO: 195440 - DNA, 282 bp, Klebsiella oxytoca
atgcgcctgtccgggctaccggcccgcagacgggctgtaaacccgttgcccgggcaaggcgcgttaagcgccgcacccggggaaagggagcagagtggaatcatttcccggaggcgatgctgcccatctgtccgggctaccggcccgcagatgggctgtaaacccgtagcccgggcaaggcacgttaagcgccgcccccgggataagagcgcagagtggaatcatttcccggaggcgatgctgcgcatctgtccgggctaccggcccgctgacgggctgtaa

SEQ ID NO: 195441 - DNA, 1530 bp, Klebsiella oxytoca
atggtcctgggactagcaatagcggtaggtgttcttgctgttttattcgtggttatggttacgatgcatattttattgaagaaaaagcatgcaatcgatcttttacgttacagcaagattgttgatcttgaagaagaagcgcgaaaaataaaaaaggctatggatgatgaagaaaagtccagccgcaatgctattgataaagaagtgaaagacaagcgtactgagatagatagtgaagtgaatgcaaaacgccaagcgatagataaagaggttaaagataaagatacagatatacagaggcgtgaaaaaatagcgagagagcttattgcgtctcaggagcaagagctaaccgacttaaaaaaatcatataatgaaaaacgccaacttttgttggatctctctgcaaaattagctgaagtgagtgactctgttgatatgattgattatggtatgtataaaccgcgtttcgactatcatgattccaaagctttccaagaggccattagttacaataaagaaagacagaaaagtctaattcgacaagatgctgcttgtgactttaatactagttgggaggtaaatggtagcaagtcggaaggtaaaaaaatgatcaagcgttatgtgaaattacttgtcagagcattcaatagcgagtgtgatgccgcgataggaaaaattaaggcaggcaatgttgagcaacttaaaaaacgtattgaaagcgcttttgatgcactcaataaatttggacaatcaatgaatataagtatcacttatgattatctgaatttgcgattggaggaattactgctttgccacgaaaaagaacttaaaattcaggatgagaaagatatccttagagaagaacgtgaattgcaacgagaggaagagaaagcacagcgtgaatacgagaaagctattcgcgatgaacaaaaggcggagaaagacttccagaaggcaatggaaagagcaagaaaagagcttgaaaaggcaaatgctgaagaaaaatcccgtattgaagccaaaattgctgaactcgaacttcaggttgaagaggcaagggctttgtctgagcgcgcaaaatctcaggctcagttaactcgaagcggccatgtctatgtgatttctaatattggagcgtttggggagaatgtctataaaattggtttaactagacgacttgaacctgaagatcgtgttaatgaactggggtctgcatcagtgccgtttaaatttgatatccatgcgttgatttactccgatgatgctccagcacttgaaactagcctgcataatgaattttcttcgcaccggataaatatggtgaataatcgcaaggaattctttaaaattaatctgtcagatattgagggcaaggttaagtcacttggttttgatgcgtcatttacggagtatgcacttgctcccgaatatcgtagcacgctatctattttgaatgcaaaagacaaagcaaaatcaattgcagatgcagtagagaataaagttgaagagttattccccgaaatggcttaa

SEQ ID NO: 195442 - DNA, 207 bp, Klebsiella oxytoca
atgctgaaagccgcattaagtcaggacttagtggaaaagtgtaaagtggtgatgttaaggaatgttaaggttttagcggggaaaaatgcaaaagtgtgtggtgaccaggcaggcctatggcagcggtcaattagccaggttggtctgaagctcctgctacccccacaaaggcagaatgagtgggaggaacggagcaggggagtctaa

SEQ ID NO: 195443 - DNA, 222 bp, Klebsiella oxytoca
atggctgtaatgagcaaatcggcctatgcccgtcattgtgtggtgagtcgacagacggtttatgactgggtagccaagggtgaagtagtgatgtccggtaacaagattgacgttgaagctactgaacaaatgcagcatggcaacgaacattctgagagaaaggactacatggtcctgtgggcttcacaggtaattgaatggattcataccaatcagtattag

SEQ ID NO: 195444 - DNA, 306 bp, Klebsiella oxytoca
gtggttgaaaggcagggttttcctgccttttatcttataaccaggatggttagcattagcattgattcacgcaaaagcaaaggcgtgcaagacttgcatgagttgctctattttcttagtttcgtctctatttcctggctactctatcgcggatttcgcatccttcttgtagctcaacctccttttgcaaaagccgcgtcattacatctgggcctggcattcatttaccgtaacgacgataaaattcatcagcatcattatgccagccatgcaaatcctttcggtcaattgctggatattaagtaa

SEQ ID NO: 195445 - DNA, 717 bp, Klebsiella oxytoca
gtgcgctacattattttatttttcttattcattatggtaatgggtgttaaccaccttcattataattatcttttatccggcgatgctggaatgtcaggcgaatatataggttatatatttatcgggccaattatctttagcgctattatttccgccatcgtctgtcttattgcaagaaaaagaaatagcgcgagtttcattcgcggatgctgctgggtaatgggattgatgctcattaccagcgctcactccctgctgcgcaaatcccccagtcaggaatatgttttttctaaagaaaaaataacagtcactataccgaataagcactggagagattataaaaatgatgaaggaaaaaactttctcatcacgcatgacgccaatgcagccattatgatcaaccgatggtcacaaaaggaaaagggcatttattcctttaaagaactcaccgatacgcaaaaagagacaagcgcatttatcgaaaaattccccgatcaggacctgacgcttaaaacatgtgaagtcaaaggcgcccagtgtcgatatcaggaactaaacttaacgttacagaacaaccaaaagaagagagtaatatatacttatttattagacagcgatgacttcataataataactgcgactattgcccctgagtttatcgatagctatcacgatgatgttatgaagataattaactctgttcataacactaaataa

SEQ ID NO: 195446 - DNA, 312 bp, Klebsiella oxytoca; identical to SEQ ID NO: 49033

SEQ ID NO: 195447 - DNA, 831 bp, Klebsiella oxytoca; identical to SEQ ID NO: 36219

SEQ ID NO: 195448 - DNA, 186 bp, Klebsiella oxytoca; identical to SEQ ID NO: 28362

SEQ ID NO: 195449 - DNA, 552 bp, Klebsiella oxytoca; identical to SEQ ID NO: 28363

SEQ ID NO: 195450 - DNA, 390 bp, Klebsiella oxytoca; identical to SEQ ID NO: 28364

SEQ ID NO: 195451 - DNA, 351 bp, Klebsiella oxytoca; identical to SEQ ID NO: 28365

SEQ ID NO: 195452 - DNA, 132 bp, Klebsiella oxytoca; identical to SEQ ID NO: 102396

SEQ ID NO: 195453 - DNA, 1278 bp, Klebsiella oxytoca; identical to SEQ ID NO: 52758

SEQ ID NO: 195454 - DNA, 327 bp, Klebsiella oxytoca; identical to SEQ ID NO: 52759

SEQ ID NO: 195455 - DNA, 675 bp, Klebsiella oxytoca; identical to SEQ ID NO: 52760

SEQ ID NO: 195456 - DNA, 249 bp, Klebsiella oxytoca; identical to SEQ ID NO: 36223

SEQ ID NO: 195457 - DNA, 1200 bp, Klebsiella oxytoca; identical to SEQ ID NO: 36224

SEQ ID NO: 195458 - DNA, 867 bp, Klebsiella oxytoca; identical to SEQ ID NO: 36225

SEQ ID NO: 195459 - DNA, 495 bp, Klebsiella oxytoca
atgactatcacactacaggcagtaaacgagctcattcagtcgctggagagtgcgggcgagctgtcgatcaaagagacaaaggttatggcgctggcgaaagcttaccagcagctggctgcggagaatgtgggcatggatggatttgtcgaagaggtgctcgctatcgcatggcagggaggctccactgatggctccgatattcaggaattagccctgaagcatggccttattcggcaagaagtatattgcgctgataagcacgaaaactgcgtgtacgacccaggtaatttcgatgatggtgatgcggtttacttccgcacggaaaccccatccaccgatcgcatcgtagccgggattaaggctgatggggtggaggagttcgtatccaacaccgtgcataagatttttgatgaaagcgaagcagtgtcagctttgtcttatctttccctggctaattcacacgtgaagcaactgcgcgagggggccgacaaatga

SEQ ID NO: 195460 - DNA, 1101 bp, Klebsiella oxytoca
atgaaaaaatggtcacgccacctgctcgctgcgggcgctctggcaatcgggatgagcgccgcgcacgcggacgatagcaaaacgctctatttctacaactggaccgaatatgtcccgccggggctactggagcaattcaccaaagagaccggcatcaaggtgatctattcaacctacgagtcgaacgaaaccatgtatgccaagctcaaaacctataaagacggcgcttatgacctggtggtaccttccacctacttcgtcgacaaaatgcgtaaagagggcatgctgcagaagatcgataagagcaagctgagcaacttcggcaatctcgatcctgaaatgctcaataaaccgttcgacccgaataacgattactctattccgtacatctggggcgcgacggccatcggaatcaatagcgatgagatcgatccgaaaaccgttaccagctgggcggatctatggaagccagagtataagagcagcctgctgctgaccgacgacgcgcgcgaagtgttccaggtcgcgctgcgtaaactgggctactccggcaatactaccgatccgaaagagattgaagcggcctataacgagctgaaaaaactaatgccgaacgtcgcggcgttcaactccgataacccggcgaacccgtatatggaaggcgaggtaaatctcggcatggtgtggaatggctccgcgtgggttgcgcgtcaggccggtacgccgctggaagtcgtgtggccaaaagaaggcggcatcttctggatggatagcctgtcgattccggccaatgccaaaaacgtcgacggcgcgctgaagctgatcaacttcctgctgcgcccggaagtggccaaacaggttgcagaaactatcggttacccgacgccaaacctggccgcgcgtaaaatgctgagcccggaggtcgccaatgataaatcactctatccggacgccgcgacgattcagaaaggcgaatggcagaacgatgtcggcagcgccagcacgctttatgaagagtattatcagaagctaaaagcgggtcgtcaatcatctcacaggccgggtagcattacccggcctcttcgggaggaccgccgctag

SEQ ID NO: 195461 - DNA, 339 bp, Klebsiella oxytoca
atgcctgttattgagagtattttacgcatacagctagacagagatgtatttcatggagaagaacaaatggttagcggtatagcccaactagctgtagatcggggatttaacgcgttatcccctcgccaaaaaatagtattagagccgttcttaacacaacactgttcaggcgtaatcgatccaggtggtcaccataacaactgtactacagttctgactggtgaggcattattagatgcgtatgagaattgtgatgatacggaaagcctggagtgtgaaagctgccgtgaggaaagttcttttcacgcccaccagtgggcaagaatagagcgagaatag

SEQ ID NO: 195462 - DNA, 357 bp, Klebsiella oxytoca
atgaacaatcactcagaatccggtaccaagccggagaatcccgcctgccagcagtgggggctacagagtacgataacaccctgttttggcgcttgtctggtgcaggaaggcaaccgactgcattttctcgctgaccgcgccggatttaacagtgctttcagcgacgatgacgcgttgcgtctcgaccagacatttcccctgatactcaaacaacttgaactaatgctcaccagcggagaactctctccccggcatcagcactgcgtcacgttttaccacaacggactcacctgcgaagccgatatgcttggtagttgtggctacatatacatcgctgtttatcccactcaacgttaa

SEQ ID NO: 195463 - DNA, 444 bp, Klebsiella oxytoca
atgaatacacaaaatcatcagttcgcgaagcatactgcaattactgcctcagtggtcccggacgagttacgcatcggcttctggccgcagcactttggctccatcccacaatggataacccttgaacctcgcattttcgcctggatggaccgcttctgcgcagactaccacggcggaatctggaacttttatacgctgagcaacggtggcgtgtttatggtgccggaagcggataacaatgagccttggtcgttgttcaacgtcatgaacggcaacggtggtgaactcagtcccgaagccgccgggctagcggtctgtctgatggcttacagccaccacgcctgtcgcaccgagtgtgacgctatgactggacactattatcgcttacgcgactacgcgctaaaccatccggaatgcagcgccattatgcatcttatcgactaa

SEQ ID NO: 195464 - DNA, 495 bp, Klebsiella oxytoca
gtggaagcatttacagtacggcgcataattgagagcgatctggacgatttcaggaaattgaggttggaggctttacggcttcatcctgaggcctttggcgcatcttatgaagaatgctgccagaagccactgcaattctttgctgaacaactacaaactagccatgtcttcggcggttttgatgtgcataacaccttgcagggtatgattggcgtgaacagaagtccgttaccaaagctgagtcatgttgcgaatatctggggaatgtatgttcgtgccgagaagagaggttccgggcttgctgccagattgatggagactgcactggaagccgccagttcagccaaaaccgtaaaactgtcagtagttacaaccaaccgggctgcatatgcgctttatcgttctttcgggttcgccgagtgggcaacagatacagctgcgctatgcgttgatggggagtatcatgacgaatttctgatgagacgcgactcatag

SEQ ID NO: 195465 - DNA, 2952 bp, Klebsiella oxytoca
atggaaggttactggaaccgcccaatccgattttacgaatcagaacgacgtaattttctcggaacattgttcagtgaggggggattaccgttccgcttactgaaagaatcggatagccattttcagaatgtattctcccggattctcaatcaatatgggcaggcacaactggcaggattttccatactttctctagtaagaactgtcatagaaaaatcagccctgccaactgtttttagcgaagacacctctgtagaactcatcagccatatagcggaaaaactcagctcgctggttctaatgtacaacctgagcaatcataccgaacccgtgaagcagcttgataaagtgcatccaaaatggcgtgatgagttccctatgcctttggatgatgaaacaggtactcgctttcttaatgggttgctatgtactgcctccgtagaggctaaatcccacttacaaaaaaataagggttccggttgtcaattctattggtcggaaaaccatcccaatcaaatccaggcgataatttcgctgcctgatgaactcaccttcccaatcatcagcactccctcaacgacgcgatttgaacttgccatttatgaagatggtgaagaagtcacctgtctcggccccgcctatgcatccctggagaacgcccatgccaaagttcgcctgcgtaaaagtgagtcgagatttgtcagacgccagccagctgcgagcttaacgattgttgcacgaactggaggaatgattgttggcaccataaaacttgaagatagtgaaatcgccgttggcgaggtaccacttacttttgttgatgatgaggaacgctggttattgcaagggcaagcttcttgtactgtacgtaatagcaatgttcttattgccttacctcaagaaaaaaccactatttcagggtgtgaaggctctccaggtacagcgtcgttattaggactcagaacactgtccgtaaaaggacgccaggatataaccatttccggagatgaaacatacaggatccgcaccgggagggaacaatctaatcagagcggatttgatttttatggaaaacatgttacctggaattgccatcctgatgaaacattccttggtgtacctaaagttacggcgaaaaacctgaatgctgaagatatacaattcaaacgttacctgagtggcatatcgttagatgaatgtcaggtacaagagatgatgggtacgcaatatgtttctgtcagaaatactcacaatgaaactctactgcgtcgaaaaattgggatcttgccggcagattttaacattgaaataaagggtggtgagctagccaatgaaggttccattgttatctcaacgcaacatccctgcatgtctgtcttaaaagataaaacactagaggttgctcgcaaacgctcagcaggacaaacagaaatattacttaaagcagaaggaatacctcctgcgtttgtctctttgcagatttacccaaatttgggtgcagccccagtagagatgactctacctttccctgcaaaaggttgcctggcccttgatgcaaatggatgcactctggataaaaatattactctgcatgatttgctgggttcgagagcctttttatttggtaaaaatggcgatccgacacgtttttcactggaattacatttacgttccaaaagtgggttacaggcatggcatgaatggtgttataccgcgggggaacaccccgtcgaactcaatttatacagcctgagagagcatattgaaaacttactgtctcttgagacaggaattgaccaggttgttgagatgcaaatcaaaggcgcaggtgctgtaatgagctggcagattcgccgctataaatacagtttacgctatgattatgaaagagaacttctcgtcagccagtcaacccattatcgtaccgagcaaatgtcttcacctgtcatcatgttattgagtgagccggagagaaaaatcaccccattatcatcaagaatgagcgaaggtgtaccgacaggtgaatatgaactgagttcggttattaacaaaaatgggccgtggttagtcgtccccaaacagggtgaggaaatggcgtttcgcccctgcttcattcgtggggaaccgtcgttacctgtggatgaaagtagtattcgttcattgcagaaagcgacccagctttttaatccccagtctgaagttaataccattacactggtacttgaacagatggctaacgatcccgctcattccggctggcaatttatgcgttgcctgtacgaccaatttggttatctgccgctggcaacctttgaagtttggcgtgcgctagtacagcatccacgagcactggcgatgtcgctatttaaatttgagatgtcagctgagtatctgagccgcattgaaaatgagttccctattttatgggagttcttccccatcttcgaaatcaaaaccgcagccgatcgatttaaattgttcctgagccaaaagggtgcaccggaagaaacccagaatttactggtgaagagcttgtatcagcgattggggctcgttttcccgacatatgccgacgaaattgagaaatggttaagttatggacaattccctccgcccattccagagttcttcattcgcgagtggtatcaggagcttttacgtgagcatagtgaagctcgctggccagagtacggcagcaagcggctgcatagctggatgacatcacaaaaaaatccagtgatcagcattaatcctgacgcagaataccgctattccgttgcctggttacccgtcttcgccgcagctgtagcaagcggcaatacctcttttgaagccgtatttgaccgtaaaccgggtgccgtatttttcctgagacaggtcagggacttcgattcccgctggtttaaggccatcttccagtgcagcctgttgcgttattttgctcaaaaataa

SEQ ID NO: 195466 - DNA, 6327 bp, Klebsiella oxytoca
atgactacacgctatttttcgtcacttattgaacaatcgttgtctcgttcaactgaagcaacactgagtatcatgggggtcacaaacccgcagttgcgtgagcacctcgcgcaacaaatgggcgccgattgtgggaaatcaggctcattccttgcttctcccgttttccaacaaatgtttggctggaaagcgtcaaacaaaacgatgcgtagcctgacggaaggcaaggcattgctcagtaaagctgtggttgattcgctggatgatcagaacaatggacgctatcgttttggtgctgattggaaaccctttactcaccagctagccagttggaaggctctgctggaaaaaaaacattctgtggtagtgaccagcggtacgggttcaggcaaaaccgaatgttttatggtgccggtgctggaagacctctaccgggaattacatgaaaatggcaacaacccacttatcggcgtcagggcccttttcctctatccacttaacgccttaattaattcgcaacgtgagcgcctggacgcctggacacgtggttttggttccggaatccgatactgcctctacaacggaaataccgaaaatctacacgccgcagtgaaaagcgaacaggtaaaaagaccgaatgaagtactctcgcgcgaaaaaatgcgtgaagaacccgctccaattctagtgaccaacggcacaatgctggaatatatgatggtccgccagatcgacgctccaattatccagcaatctaaatcacaaaaatcattacgctggatcgtattggatgaagcgcatacctatgtcggctcgcaggccgctgaactggcgctgcagttacgccgagtgatgacggcctttggtgtgactccagatgatgttcgctttgtagcaacctctgcaaccattgccggaagcgatgccgaaaagcaattaaaaaaattcctctctgaattatccggtataccgcaagagcgcattgacgtactggacggaagccgggttattccggaactggaaccatgcaaacacgtttttattccgttagaagaaattgagcaaatccctgatacagacatgaagggcgtaagcccagagcgctttgatgcacttacgcattcacctgaagcgcattacttgcgtgaaatgttagttactcaaccgaatccaatgaagttggatgatatgacgcagcggttgaactcgctaacaaaacagcattatagccagcaggatgtgttgcgctggattgacgtctgctctggcacacaacccaatactaaggatcccgcatttcttaaggtcagggcgcacatattccaacgcaatacccagggggtgtgggcctgtgttgataaagaatgcagattaaagcacggtaccccgctggaaaagggttggccttttggttatgtgtatgtgaacaaacgccaaaattgcgattgtggaagcccggtttacgagctggcattctgtaatgaatgtaatgagccacatcttctggcgcgggacaaaaagggaaaacttgtccaatgggaaaataaaggcggtgatgagttctctttgcaagatgatgtgcatattgaaaatgatgccgcagaagaaaaagttgataaagagagtcgttttcagcccccactcattatcgccgcagagaagaccagcgcggcgggttatacccaacagcgtctggaccgtcagacgcgtcgtattggtgttattaacaatgacagcatcccgctagttattaacgacattgaacaagtatgtagtgccagtagctgtggctacagaggcgcgagcggaaaacaaccgttccgccgtgccttattaggtgggccattttacgtcaccaatattgtgccaaccgttctggaatattgtcaggattttattagtgaagaaggaaaagagggcgtcggacctgattcgttaccaggtcgaggccgtcgacttattacctttaccgacagccggcaaggaacggcccgaatggcggtgcgcatgcagcaagaagctgagcgcagccgcttacgcggtagtgtggtggaaatcctgagctggcatcaacgaacacagacttctgcaacaccgaatgccaatgccgatctggaaaagttagcgacgagggcaaaacaggcacgccatgaggcgaaagaatatagaagctggggaatgccggaacaagcaaaactggctgaagcgcaagccgaacagcttgaacaggctattcaggccgcgactggtggcaaagctgcgaccattctgttttcgcgaacctggattgaaatggttaatgaacttaaagaaaaagccgatattcgcggccctattctgcaatataaccactatctgaagcctgaaattttcaatgagaatggcgggccgctaaagctttctgaaatgttgttattccgggagtttatgcgccggcccaaacgaactaacagcctggaaacgcagggattagttcaggttggttatcaggggctggagaagagccataagatgccggtgcattggcaagagaaagggctgacgctggatgactggaaggattttcttaaggttacgctggatctgtacgtacgtgaaagcaacttcacacaactggacgatgagttgaaaaactggattggtagccgtttttcatcgaaattcgtccgtaacccggacacaaaagatcccgaagataatcagaacagacgctggccacaaattcgtaatggcaatatatcccatcgtttagtgaagttattaatgcttggcgcaggattcaaaaccgtaaatacggcgacgatggatattatcaatacgtggctgaaagaagcgtggacccaacttaccggcccacttgcagtgctgaaacctgatggtaaccgtttctatctgccaaaagagcacatgactttttctttaatcacagatgcctggatttgtccggtaaccaataagattctggatacggcctttaaaggcttaaccccttatctgcccacccacatttcgtttgaacaccttaccaagacacaatatgacgcttttgtcgcgcaaaaggtcaccatgccggaaatctggaagctggatcgttcgcaagaagactacgctccgggtctggcgaaggtacgtgactgggttagtaaagagccactaatcgcacaattacgttcggaaaacgtctggacggatattaacgatcgtgtcgtggaaggcggattttactaccgcacagccgagcactctgctcagcaatcgtcagaacgtttgcaaagctacgaaaagatgttcaaaaacggacagcttaatgttctcaactgttccaccaccatggaaatgggggttgatatcggtggcattaccgccgtggtgatgaacaacgtaccgccacatccggcaaactatttacagcgtgccgggcgagccgggcgtagtcaggaatcacgtgcgatttcttatactctgtgcaaaggaaacccgcacgaccagcaggttttttccaacccactctggccgtttgagaccatgatccccgcgccgatggtggcaatgaattccgcccggttggtgcaacgccacgtcaatgcgttattactgtccgactttttatgtcacgtcattggcgaaacagataaagaaaaaaccagtcttgatagcctctggtttttcggtgaagacgacgggcaatcaaaatgtaaacactttaaagtctggctcgagcgtccggttcttgatatcgacgcggcgctggaacggctggtgaaaggtacagcattacatggcgccagacccgacctgttgcgggataaaacaatccatgcgattacgttcctgcaacagcgatggctttccgtctaccgcgatcttgtagcccaggaacgagaatcgcagccgcaaacgccttatcgcaagcgcatagaactggagaaaaaacgacactgtggcgagtatttgctgcgtgacctggcggccaggactttcctgccgggatacggcttcccgacagatgtggtgacgtttgataacttcactatggaagactatatccgtgaaaaatcacagaaaagccgggataaaaaagatcgcgaagataatgtgtcacgttataagggacttccctcgcgtaacctgggggttgccatccgtgaatatgcaccaggtgcagagatcatactggatggccgggtcttccgctctgctggcgtctcactgcactggcacaatattaatgccgataccaatgaagcccagcgtctggattgcgcctggcgctgtcacaaatgcgggaccataggctatgaagaggggttgagcagttccgggacgctattttgcaccaacagcgcctgtggtgaaaaaatcatcatggataatcgtcgccaggtgctgcagccagccgggtttgtaactgatgcacacgcgccggtgacgaacaatattgaaaccatgaaatttatcccggttgtccctgcctgggtatttgttaaagcagaacccgtatcgctacctaacccgataatggggtatatggcatctggcgctgatgggcatgttttccagcaaagccttggagaaggtgggcatggttacgcactttgtctgagctgcggtcgcgcagagtcgatgctgaacgcaaacgatgcgccgaaaagtatggaagcccactacccgccgcgtccgggaaaagcagatcgcgacagccagaatcaacgtctaatttgccccggctcgacggcgctcatgaagaacgtcacgctgggggcattggcacgaacggatgtctttgaaatggttctacgcaagccgcaaaacggtgaatatctcccggatagcacggaagaagggcggattgttgccatgactctggcggtagcactacgtcaggcgctggccggggttttgggtatctccgcggcagaactgggctacgccgtgcgtccggtcagactggaagatggacaatcagtattagccgttcaactctacgatgtgattagcggtggtgcaggttttgcatccagtgcgccaatgcacattgaggccattctgttgggaatggtgaagcagttgggttgccaccactgcgatacggcatgcagtgaatgcctcctcgactcccagactcgccacgatcacgatttgctggatcgtaaagcagcacaggcatggcttggtgatgacttctcgtactacatcggtttgccggatgatgaaacattctcgctaccggatgcccgatattgcccgggagccattggcgatacccttcgtcgggcgattaacgagggtgctgaaaaactcacactgtggatgaatgggccactcaatgagtgggatctttatgcccgtcaattccgggcggctattcagaactaccggattaaagacaatgttgcggtcgaccttgtcattcctgctggcgtcgatgatccggagctgttgcatgagctttcgcagtttactgctttgggcgtgcgtttgtgtcatagcgaacaggctctggaattgccgattgttgcgcaagtcgcctttgccgatcgcgtaatgacgctggcttcacgcagccagcaggcaactatcccagggccaggctggcacctgaatgacgaactggtcgttcgcagcctcggctataacacggtaaaactgaacgagtttgttttgccggggaaagcagcgaacgcggttgagcgtgtcaaagacatagagattcataaacagttaaatggtccactttcgcagttcggacaacgcttctgggatttgctgtgtaacaaccatgaagaagcacagtcactgatgaaaaaccagcgaatcacaagcgttcactataccgatcgctatctgcaaaacccggttgcgctggcactgctgggggcgatactgaaaccgctaaaaacaaagctgaccgatgacgcggagcttgagcttgagcttgatactctgtttaagcccaaagatcgttcaggaaatcgcccctctcatgactggatgagcgaagcggattttcaggatttcgccgaccagtggtttactgcggcaatgggcagagcggtagaactgacggtgttcgattcgccacgtgatattccacatcatcgtaagctgacggtgacctttgaagatagtcagatgttgaagattcgcttcgaccagggaatgggatactggcgtatcgacttcccgtatgcatggcgtaactttgactttactgatgatgtgacttatcagctagtaaaactggcgcaagcctgccaggagggcaaagtccttaatagcgaggaaagctgggcaacggatgtgctggtagaggtgatgccgtcttaa

SEQ ID NO: 195467 - DNA, 312 bp, Klebsiella oxytoca
atgtcagatataaaatcttatccaattcccttaccacctctccaagaacaacacgaaatcgtccgccgtgtcgaactactcttcgcctacgccgacaccattgaaaagcaggtcaacagcgccctgacccgcgtcaacagcctcactcagtcaatcctggcaaaagccttccgcggcgagcttaccgctcagtggcgggctgaaaacccggatctgatcagcggtgaaaacagcgccgccgccctgctggaaaaaattaaggccgaacgcgccgccagcggcggtaaaaaaacctcgcgtaaaaaagcgtaa

SEQ ID NO: 195468 - DNA, 480 bp, Klebsiella oxytoca
atgtgggcagtctacaatatgagatgcaacatgactcaattgttgttcttgccaatggcgatttccatccagcctatctgcaagttttccattcactgccgcagccagcaccgcctgacgaaaacgtttcaggatttgtgggatttgctcaagacgtgctttggtgctgtctacctgcgccagcagtatatcgagtttttcggcgatgattttttgttcggcgagtggagccataacgaagggaagtgttttagctgcgctacccgaaatttctttaaatgtcgtacctgtacccatttcttccgcaagatgcctgatattacggagatagtaataagcataatcagggtaaatatcatttgtaaaaacgaagcttttaaatccctgattagtagcaatcttattggatgcaaccgcgacgtagccaatgggggccctactgctaaacaatatagcgcctgctggcatcaattttgctga

SEQ ID NO: 195469 - DNA, 1590 bp, Klebsiella oxytoca
atgaacaataacgatctggtcgccaaactgtggaaactgtgcgacaacctgcgcgacggcggcgtctcctatcaaaactacgtgaatgaactcgcctcgctgctgtttttgaaaatgtgtaaagagaccggccaggaagcggactacctgccggaaggctaccgctgggatgatctgaagtcgcgcattggccaggatcagatgcagttctaccgtaacctgctggtccagttaggcactgatgagaaaaagctggtgcaggcggtgttccataatgtcagtaccaccattgagcaacccaaacagctgactgagctggtcagctatatggacgcgctggactggtacaacggcaaccacgggaagtcccgagacgacttcggcgatatgtacgaagggctgctgcagaagaacgccaacgaaaccaaatccggcgcgggccagtacttcactccgcgtccgctgattaaaaccattatccatctgctgaagccgcagccgcgcgaagtggtgcaggatccggctgcaggtacggcgggcttcctgattgaagcggatcgctacgtgaagtcgcagactcacgatctggacgatctcgacggcgacacccaggatttccagatccaccgcgcgtttatcggccttgaactggtgcccggcacccgccgtctggcgctgatgaactgcctgctgcacgacattgaaggcaacctcgaccacggcggcgctatccgtctgggcaacacgctgggcagcgacggcgaaaacctgccgaaggcgcatattgtcgctaccaacccaccgtttggtagcgccgcgggcaccaacattacccgcaccttcgtacacccgaccagcaacaaacagctgtgctttatgcagcatattatcgacaccctgcaccccggtggtcgcgcggcggtggtggtgccggataacgtcttgtttgaaggcggtaagggcaccgatattcgtcgcgacctgatggacaaatgccatctgcacaccatcctgcgcctgccgaccggcatcttttacgcccagggcgtaaaaaccaacgtgctgttctttaccaaaggcacggtagctaatccgaatcaggataaaaactgcaccgacgacgtgtgggtgtatgacctgcgtaccaatatgccgagcttcggcaagcgcacgccgtttaccgagcagcatctgctgccgtttgaaaatgtctacggcgaagatccacacggcttaagcccgcgtaccgaaggcgagtggagctttaacgccgaagagacggaacttgccgacagcgaagagaacaagaacaccgaccagcaccttgccaccagccgctggcgcaagttcagccgtgagtggatccgcaccgccaaatccgattcgctggatatctcctggctgaaggataaagacagcatcgacgccgacagcctgccggagccggatgtgctggccgcagaagcgatgggtgagctggtgcaggcgctgggcgagctggatgcgctgatgcgcgagctgggtgcgggcgatgaagcggatgcgcagcgccagttgctgaatgaagcgtttggtgaggtgaaggcatga

SEQ ID NO: 195470 - DNA, 3513 bp, Klebsiella oxytoca
atgatgactaaatccaattttgagttcctgaagggcgtcaacgatttcacctatgccatcgcctgtgcggcggaaaataattacccggatgatcccaacaccgcactggtgaaaatgcgtatgtttggcgaagcgacggctaaacaccttggcctgctgctggatatccccctctgtgagaatcaacacgatcttctgcgtgaactgggcaaaatttcctttgttgatgacaacatcctttctgtattccataaattgcgccgaattggtaaccaggccgtccacgaataccataatgatttggatgatgcccagatgtgcctgcgcctgggtttccgtcttgccgtctggtattaccggttggtaaccaaagattacgactttcctgtgccggtttttgtgctgcctgagcacggtgaggatcgctaccacgccgaagttctcaccctcaaacagcaactggaacagcagacacaggaaaaagtacaaagccaggcagaactggaagctcagcagcaacgattaattgcactcaacggctacattgccgttctcgaaggcaaacagcaggaaaccgaagcacaaaccaaagcacgcgtggccgcactggaagcgcaactcgccgccaaaaacgccgagttagcaaaacaaaccgaacaggaacgcaaggcatatcataaagagattaccgaccaggctatcaagcgcacactgaatctcagcgaggaagaaagccgcttcctgattgatgcccaactgcgtaaagcgggctggcaggccgatagtaaaacgttacgtttctccaaaggtgagcgtccagaaccgggtgtaaataaagccattgccgaatggccaactggcaaagatgaaaccgggaagcaaggttttgcggattatgttctgttcgtgggccttaagcctatcgcagtggtcgaagcaaaacgtaaaaatatcgatgttcccggcaaactcaacgaatcgtatcgctacagtaaatacttcgataacgcgttcttacgcgacacgttgttagaacactactctcctgatgaagtacatgaagcggtacctgcttacgaaattagctggcaggacaccagcggcacacagcgttttaaaatccccttttgctactccaccaacgggcgtgaataccgcgcggcaatgaagaccaaaagcggtatctggtatcgcgacgtccgccacaccaccaatatgtcgaaagcgctgccggaatggcatcgcccggaagagctgctggatatgctgggcagcgacccgcaaaaacagaatcagtggtttgccgataaccccggaatgagcgaactgggtctgcgttattaccaggaggatgccgttcgcgcggtagagaaggccattgttaacggccaacaagagatcctgctggcaatggcgaccggtaccggtaaaacccgtaccgccatcgccctgatgttccgcctgatccagtcgcagcgtttcaaacgcgtcttgttcctggttgatcgtcgctcgctcggcgagcaggcgctgggatcgtttgaagatacacggattaacggcgacacttttaacagcattttcgatatcaaaggattgactgataaattcccggaagacagcaccaaaattcacgtcgccacggttcagtcgctggttaaacgcacgttgcaatcagatgaaccgatgccggtcggccgttacgactgtattgtcgtcgatgaagcacaccgcggttacattctcgataaagagcagaccgaaggcgagctgcagtttcgcagccagctggattacgtttccgcctaccgtcgcattctcgatcacttcgatgcggtaaaaattgccctgaccgccacgccagcgctgcacacggtcgatattttcggcgagccggtttaccgctacacctaccgtacggcggtgatcgacggctacctgatcgatcaggatccgcctattcagatcgttacccgcaatgcgcaggatggggtctatctttccgagggtgaacaggtggaacgcctgaacccacagggcgagctgatcaacgacacgctggctgacgatcaggattttgaggttgccgattttaaccgcggcctggtgatcccggcgtttaaccgtgcggtatgcggtgagctcaccaaatacctggatcccaccgggcaacaaaaaacgctggtgttctgcgtcaccaacgcccatgccgacatggtggttgacgagctgcgcaccgcgtttaagaaaaagtatccgcagctggagcacgacgcgattatcaagatcaccggtgatgccgataaagacgcgaagaaagtgcaaagcatgatcgtccgcttcaacaaagagcggctacccaatattgtggttaccgtcgatctgttgaccaccggcgtggatatcccgtcaatctgtaatattgtgttcctgcgcaaagtcaaaagccgcattctctacgagcagatgaagggccgtgccacgcgtctgtgcccgtcggtggggaaaaccagctttaagattttcgactgtgttgatatctacagctcgctggaaagcgtcgataccatgcgcccggtggttgtgcgtccacaggtggaactgcaaacgctggtcaatgaaattaccgactcagaaacctacaaaaccattgaagcggatggccgcagttttgccgagcacagccatgaacagttggtcgctaagctgcagagaatcatcggcctcgccatttataaccgcgatcgcagcgaagctgtggataaacaggttcgccgtctggacgagctgtgcctggatgccgcgggcgtcaactttggcggtctggcctcacgcctgcgggaaaaaggaccgcactggagcgccgagatttttaataagcttcccggctttatcgcgcgcctcgaaaggctgaaaaccgatatcaacgcactgcgcgaggcccccattttcctcgatattgacgatgaggtggtgagcgtcaaatcgctgtatggcgattacgacacgccgcaggatttcctcgaagcgtttgatgagctggtgcaacgctccccgaacacccagcccgcgctgcaggcggtgattaatcgcccgcgcgacctcacccgtaaagggctggtggaattgcaggagtggtttgaccgccagcattttgaagagtcatccctgcgcagcgcgtggaaagcgacgcgcaatcaggatatcgccgccaggctgattggtcatatccgccgtgcggcggtgggcgatgcgctcaaaccgttcgacgagcgtgtcgatcacgcgctgacgcgtatcaaggccgagaacgactggagcgatgaacagctaagctggctcgaccgtttagcgcaggcgctaaaagagaaggtggtgctcgacgacgatgttttcaaaaccggcaatttccaccgccgcggcggtaagccaatgttacaacgcacctttgacgacaacctcgacagcgtgttggataagttcagcgattacatctgggatgagctcgcctga

SEQ ID NO: 195471 - DNA, 1266 bp, Klebsiella oxytoca
atggctctgagtgatgtgaaggttcgttcggctaagcctgaagcaaaagcctataaactgactgacggcgacggcatggttctgctggttcaccctaacggctccaaatactggcggttgcgttatcgcttcggcggtaaagaaaagatgctggcgttgggaaaatatcccgaagtctcgctggcggatgccaggtcacggcgggatgaagcccgtaaactattagctaatggcgtcgatcccagtgagaacaagaaagccgttaaggtagagctggagcaagaggcgataacgtttgaagtggtagccagagactggcacgccagcaatcaaaagtggtctgagtcgcacagtgctcgtgtattgaaaagcctggaagacaatttatttgcttcagttgggaagcgaaatatcaaagatattggtactcgtgacttactggttccaattaaagcagtggaaaagtcaggacgccttgaagtggctgcgcgtcttcaacagcgaacaacggcaataatgcgctttgcggtacagaacggcttaattgattacaatcctgcacaagagatctctggtgcgatcgcaacagctaaacgaaagcatcgcgctgcgctagatctcaaccgcattcctgagttactccatcgtattgataactacaccggcaggccgttaacgcggttagctgtggatttgacgttactggttttcatccgttcgagcgagttacgttttgctcgctggacagaagtggattttgaaacggctatgtggacgattcctggtgagcgtgagccgctggaaggtgttaaacattctcagcgaggttcgaagatgcgaactccccatcttgtacccttatcgcggcaggctctcgccattctgaaaaagatcaaaagaatgagcgggaatcgagaactgatttttgtaggcgatcatgatccccgtaaaccaatgagtgagaacacagtgaataaagctctgcgagtgatgggctatgacacgaaaacggaagtttgtggacatgggttcaggacaatggcgtgtagttctttgattgaatcaggattgtggtcgagggatgcggtagagcggcagatgagccatcaggagcgtagctctgtgcgggcggcttatatccataaggcggagcacttggatgaacgcagactgatgctgcagtggtgggctgattatttggatgcgaaccgggagaagggggtgagtccgtttgattttgggaataatggtaatatgttgaaatga

SEQ ID NO: 195472 - DNA, 1002 bp, Klebsiella oxytoca
atgagccagatgacgctcaagacccccgctacgggacaaaccggcagtagcccgctggcgtggctatcacgggcagggttcggcatcattaccctgctggcgattgccctgttcggctgggcgaacccggtatttctgaccttcgacaactgggccaatttgctgcagggcagcgcgattctgctgatcgtggcgatggcgatgacccttatcgttagcgccggagcgattgacctctccgtcggcgtggcgctggatttcggcgccgcctttgcgctggtggcgctgaaaacctggcacctgccgtggcaggcggcggtgggctgcgcgctgctcggcggggtgattatcggcctgctgaacgccttcctgatccttgtctgccagattcgcccgttcctcgccaccctcggcacctggtttatcgccagcagcgccgagcgcatctataccgacggcggcggctctatctcctaccgccggatggcgccggagtatcacgatctggcggtcggcaccgtcgccggaattccgacgccggtggtgatagttctggcgctgtggttggcggcctggctgctgaccgaacgcacgctgttcggcaagtacgtgcgcgctatcggccagaacagcgaagcggcgcgtatcgccgggatccgcgaccgccggaccatgctgtgggtgctggtagcggcctccgcgctgtgcgccgtcggcggcgtcattctctccgccaacctgcgccagtttacgccgctggccggccaggcctacctgatggatgccatcgctgcggtctttatcggcaccgcctttaaccggctgggccgggtcagcattgccggcaccctcggcggcgtgctgttcctcgccattattgataacggcctgaacctgatggggctgaactacctggtgaaagatgcgctggttggcgtaatcctggtggtggcgctggccctctccttctggcaggcgcgtttgcgccagacccaccgttaa

SEQ ID NO: 195473 - DNA, 651 bp, Klebsiella oxytoca
gtgctggagtacagcgcgcctgagcagccgcaggtttttctggcggattttcgcgccgacccgcagcgctatccgctctctacgccttccggcaagattgagctcttttcagaaaccattgccggctttggctatcgcgagtgcccgggccatccgtggtgggatgagcaggaagcggcctggcggcggcaggaagctgcgcgctggccgctgcatctgctctccagccagccgcgtacccgcctgcacagccagtacgatcacggaagcgtcagccgggcgacgaaaattcagggacgcgagccgctgtggatgcatccgcaggatgcacaggcgcgggacatcagcgaaggcagcgtggtcaaggtctttaacgcgcgcggagcgattctcgccggcgtccatctcagcgagcagattttgccgggagtggtgcagatgtcgaccggggcctggtacgatccgctggacccgaatgaaaaaggctcgctggataagcacggcaatcccaacgtgttaaccgaggatcgcggcagctcgcgcctggggcagggctgtagcgctcaaagctgctgggtggagatcgaaccgtggcgggacgcgctgccgccggtaaccgctttcgatccgccgaggtttattgagggttag

SEQ ID NO: 195474 - DNA, 807 bp, Klebsiella oxytoca
atgaacgaaagatatttcttatacttagatatcctgggctttaccgatttagtgaggcagggtagtaataaaattgatgatctttatgaagtcatagccagcttgaatgctcacagtcatgatgcatttaaagtaattgtcttttcagatacggtggttgtctataatgttgatggtgggcatactccggccgactctcaatatcttgttatgtttctttgtgagtttgtaaaagacttgatgcatcgcttaacggggagaggtgtttattttcgagctgttataacacatggtgattttacacattacgaaatcaatggagtaccttgtttttatggaaacgctttaatcgatgcttataactcggagaaggagttaaaagctattggattgttcattgataaaaaaatagccaagcactgtaatatattcaaatttgaagagtataatgataattacaattttgtttatgttacccaatctctatatgatctggagtcatggcggctgcctattaaagctgaatacatagagatgactgattcaaaatggtttatttatccagagttaacgcatgttaataatatgtaccttggttctgtgaataatggctatccagactcagtaagaataaaatatgcagcatcatggggtatgtatcgaaaacattatccgaaattaacgacctatttattactgtcaggtaataacgttactgctatatcacctgacgttgagtgggatgaggttgtagatagacacccagagagttgtaaatatgcaattgaaaaaatagtaaaatattag

SEQ ID NO: 195475 - DNA, 549 bp, Klebsiella oxytoca
atgatcgacctcgaaactatgggcaacaaaccaaacgcccctatcgtctccatcggtgctgtgttctttgaaccctcgactggtgaacttggcgaggaattttatcgtgtcgtcagcctgaagagttcaatggatggcggtgccgtccctgaccctgacaccattatgtggtggatgcagcaaagcgcagaagccagagcagctatctgcgataaagatacggtcaccagtctggttaccgcattaagtgatctgaactgcttcataagggataacgcagatccggacaaagtacaggtctggggtaatagtgctacgttcgataacgtaatcattcgggccagctatgaccgtgagcacataccctgcacatggaaattttggaatgatcgcgatgtccgcacaatcgttgaattaggtcgagcgattggcatcaaccctcgccgcgacataccgtttgaaggtgatgtacataacgcgctggccgatgccagacaccaggctaaatacatttccgttatctggcagcaattaattcctgcacaatga

SEQ ID NO: 195476 - DNA, 240 bp, Klebsiella oxytoca
gtgagtaaagacgaattgcttcagaggttacatgcgctcactacagattttcatattctggcctgtgagcttgatatcggcgatgagcgcaccgaggtgttcgaaatgtatgaggttctgcgacgcattcaacgccgtggcgcagctagtgaaatgctggctgcaactaaccctctgctatgccttggtcttcatgatgatggggaattgatagattttattgatgaagatgatgactga

SEQ ID NO: 195477 - DNA, 753 bp, Klebsiella oxytoca
atgattcactatcacggaggcccaataacacccgacacctgcgcgctgaaggcatggaagggccggcacgcatttatctctttcgcgaactctggtcagttagcgctggctagcgaagttactcagtcatttgctctggataacggcgcattcagcttctggacgaaaaaacgcgtggtggactggaaagaatattaccggttcattgagcgttgggctaatcacccgcggttctcattcgccattatcccggacgttatcggcggtagtagcgaagaaaacgatgcgctgatagctgagtggccacacggaaagttcattggggcgccagtgtggcacatgaacgaaccggacgagcggtttattcgtctctgcagcgagtttccgcgcgtggcaatcggcagtatgggcgaatacgacgcaaagcgcccgcgccgctgcgtggctcgcctgcgggacttaatccggcacgttgtggatgagaacggctacccgatttgcaaactgcacggcctacgtatgctcaatgccgatattttccgccatataccgctgtcatcagctgatagcacaaacgtggcccgcaatatcggtatcgataaatcatggcagaaatcagcgtatgcaccggccagcaaagaaaccagagccgctgtactcgttgagcgtatcgagtcaatgaatagcgccagtgcgctcaactataacgccgaccgagaccgctttatgccgcaattggcctttgagatttag

SEQ ID NO: 195478 - DNA, 585 bp, Klebsiella oxytoca
atgttggtgactatgacagacaaagaactttaccggcttggcattattcagcgagtatttgaccgggctttgcttcagcgcgacgcagcagacatacttaagctcagtgttcgtcaggtgcagcgtcttgtgcgcctgtaccggacagatggcgcaaccgcgtttgcatcttcccgccgtggacgtcctgcaaacaaccggatcgatgaagaaacacgctgtaaagccctggatttgatccggtgccactattcagattttggcccaacgctcgcaaccgaaaaactggctgaacgccatcatattcatctctctgttgaaaccgtccgtaactggatgacagccgacggtctctggcgtcctcattcccgccggcgaacccgggtttaccagccacgctatcgtcgcgactgtctcggtgaactggttcagatcgatggctctcaccatgactggttcgaaggcagagccccaaaatgctgtcttctggtcttcatggatgatgccactggtcgcataatgcatcttcgttttggtgaaaccgaatcagcctttgactacatgcttgctacccgtgtggagtga

SEQ ID NO: 195479 - DNA, 636 bp, Klebsiella oxytoca; identical to SEQ ID NO: 188184

SEQ ID NO: 195480 - DNA, 294 bp, Klebsiella oxytoca
atgcgcctgtccgggctaccggtccgcagacagcggtggacttgtagcccggctaagcgcagcgccaccgggaagaagccacgccgctccctcacctcagcacatcctccgcaggcggcgcgatgcgccttgtccgggttaccggcccgcagactgctgttaacctgtagcccggctaagcgcagcgcgagccgggaagaaatcatgccgatccctcacatcagcacatcctccgcaggcggcgcgatgcgccttgtccgggttaccggtccgcagactgctgttaacccgtag

SEQ ID NO: 195481 - DNA, 1230 bp, Klebsiella oxytoca
atgttctttcccggattgtttcaaaaatctaatactccggtgaccacacctgcagagttagcggaagccgtagggatgacttacgacacctacactggaaagcgcgtcagcagccagaaagcgatgcgtctcacagcggtgtttggttgcataagggtgctggctgagtcaatgggaatgcttccctgcaacctgtacaaggtcactggcaacagtaagcaaaaagcgacatctgaaaggctgcacaaattactgacgatgaagccaaacgactatatgacccctcaggagttctgggagttggtcattgtctgtctttgcctgcgcggtaatttttacgcttataaggttaaagccctgggggaagtggttgaactcctgcctattgatcccggttgtgtagacccgaagctaaacagccagtggcaaccggtgtatcaggtcactttccctgatggatcgacggatgtgctggggcaggatgatatctggcacgtcaggacgctgacatttgacgggctggtgggcctgaacccaatcgcatacgcaagggaggccatttctctgggtatggcgactgaagaacacggcgctcgattgttctcaaacggtgctgtcacttccggggtccttcgtactgagcaaacgttgactgatgcagcctatgacaggttgaagaaagattttgaggatcgtcaccttgggctcagcaatgcgcatcgtccgatgattctcgaaatgggtctcgactggaagtcgatggcgctcaatgccgaggacagtcagtttcttgagaccagaaaattccagctggaggagatttgccgactgttcagggtgccgatgcacatggtacagaacaccgatcgcgcgaccttcagcaatatcgaaaaccttggcatcggctttattaattattcccttgtcccttacatgacccgcatcgagcagcgaattaacgtagggctggtgaaggaatcgaaacagggcacctactatgccaaattcaatgccggtgcgttgctacgcggggatatgaaatcaaggttcgaatcgtattcgaccggtattaactggggcatttactcaccaaacgactgccgtgaactggaagatatgaacccacgctctggcggtgacatttatctgacgccgatgaatatgacgaccaagccgtctgacagcaataagagcaaaacaaccgaggaacaacatgatgccgatgactaa

SEQ ID NO: 195482 - DNA, 657 bp, Klebsiella oxytoca
atgatgccgatgactaaacagcggctggatattccgctgaagctaaagtctgtcagcgacagcggggagtttgaaggctacggctctgtgtttggcgttaaggacagttacgacgatgtagttgttcccggcgcattcagtaaatcacttcagtcatggcgggagaaaaacgcgctcccagctatgctctggcagcaccagatggatgaacctatcggggtttataccgaaatgaaagaggatgaggttggcttatatgtcaaaggccgattactcattgacgatgatcctctttcaaagcgagcacatgcccacatgaaggccggttctttaaccggcctttctattggttacatgctcaaagactgggaatacgaccgcgagaaaggcgtgtttcttctcaaggagatcgacctttgggaggtcagccccgtaacgtttccatcgaatgacgaggcgcgggtaagcgatgttaagagcgcgtttgcccgtggtgaaacaccttcccagaaaagtattgaacgggtcctgcgcgatgttgggctctcccgcacccaggccaaagcattcatggccgggggctatggcaacctctctcagcgtgacgctgatggtgtggatgccgcactggatgcactgaaaaacatcaaattttaa

SEQ ID NO: 195483 - DNA, 2073 bp, Klebsiella oxytoca
atgtctgcaacagagtctaaggtaaaaactgcaccgaaaaccagcaaaaaaacgcttaagtctgccgaagctgaggcgcttaaagtggctctcgatgccgcacaggtcgagtatgtcccggtgacggcactggtgaagtctcccctgaacgtcaggaccattccctatccggcggagaaagtctgttcaatggcagattccattgaagccattggcctgttgcagaatctggtcgtgcataacctcccggatggtcgctgtggtgtggctgccggtggtcgtcgcctgaaagcgctgcagctcctgcagagtgaaaaccgtatcgatgccggatatcaggtgatggtgaaaaaggtacctgatgaactggctgttgcggcatcaatggcagaaaacgaacagcagatggcaatgcatccgtctgaacagatcgctgggttccgcacactggcagagcaggggaaaacccccgcgcagattggcgatttgctggggttcggtacgcgtcatgttcagcgcatgttgaaactgaccgaactggctcccgaaattctggcggcgctggcgaaggatgaaatcaccaccgaacactgccaggcactggcgctcgaaagcgatcagaaacgccaggtggaagtgctggaatccgcccgcaaacggtcctggaataatgaagtatcagtttcctcgatccgtagcctcattacctcagaagaggtttccacaaacggcgacaaattccgctttgtgggagaggccgcattcagtccggatgaaatccgggttgatctcttcagcagcgaaaacggcggctatgtcaaaagtgcatcgctcgataccgccctgctggaaaaactgcagaacatcgcggagcacctccgcgaagcggaaggctggtcatggtgtgatggtcgtcttgacccgatttcacactacgggaaggacactaaaatctggcgcctgcatgctgtcccacctgtggaatataccgaagccgaatcagaacgtcttgcggaactggaagctctggaagctaagtatgaagacgagaaccccggcgtgaatgatgacgtcttggccggggctctggaagctgtctgggaagaacagcagaccatcgcgcaccgggcaaaacaccgggcatggacggatgaaatgaagcaatctgccggagtggtggtttcctggactggccaggaggtgaaagtacagcgcggtgtggtgctgtgcgccgatgaaaaaatggaggagaaggatgcatccaccgatcaggcccctgaaaaagtcgatccgctggacgccgtcagtgtcccgttgctgacccgcctttcttctgaacgcacactggcggttcaggcggccctgttgcagcagccgcagaaagccgtcgcgctgatggtctggaaaatgtgtaactcggttttccataccacaacgtccgtcaaagagccgttctgcattagcgtgagtgtgtcgcattacgcgctgacccgtgaagcacctgacggtgaaaacagcgttgcgtttcaggccatccagtcagaaaaagaacgtcttgaagccctgctgccggaaaactggcgaaaggatatgaccaccttctttacgctcgatggcgcaaccctgatggcactgatggctttctgcaccgcctgttccatagatggtgtacagggcaaggatgaatttggtcgtaaacaccagagttcgctggatggggtggaaaacgccattcagtttgaccttcgtgactggtggaaaccgacggctgataaccttttctcgcacatgaagctgccacacattgtacaggcactctctcagaccggactggctggcgcagcacaggacgccgcgaagatgaagaaaaaggatgccgctgaacatgcagagcacttcctctcaaaaatccgttgggttccggaatggatgaccagtgctgacaaccagaaacagcttgccgcaaagtctgaactcagtctggcaacaagtcagaacgataccgacgttgatgccggcgaccgtgtatgggtccaccacatattgcaatttttactctcacgtaaaatatag

SEQ ID NO: 195484 - DNA, 186 bp, Klebsiella oxytoca
atgatcctgatgattcttgccccgctgatcggggtgatcggtgctgctttgttttcatatggtgcatggctggtattcccgcccgcaggatttattactgctggtgttctgtgtcttttctggtcatgggctgtatcaaaatatttgtccgcgccacgtaatgttcaaaacgaaggcggtgattga

SEQ ID NO: 195485 - DNA, 165 bp, Klebsiella oxytoca
atgctcaagccgaggcagctgctgaagttcagaaatatacgtctctcgctcgacaaatgggcgttcagaatgatcaaaataatggttacgtacagaacgctgctaaatatcagcgggaatataacaaaatatcccgcgatattgcagatactacatctcaattaa

SEQ ID NO: 195486 - DNA, 681 bp, Klebsiella oxytoca
gtggaagcgctgccagtcggccagctggttaaaatagtgcagcgtctgcccgtcaagcgtcagcgctgtttccaccacttcccgcatcgccaccccctgcatctcaaagctgatgccctggctgccgtcggtgaacagaatatcggacagctggctgagctggttcaccgcgttcaggaaggccgggctgaaggtcagcccctggctgcgggtgctgtccgccacccagtcgctgccctcccggcgcagcaccccgcccagctccgtactgagaaaacggtcaatacgtccggtatcgcggcggataaacgccgccagcatcggcagcgaagcgtcgctcttcccggccgcaaagggatagcgcccctgaaacgccgcattccagttcgcgaccacggagcgctgccacgcctcgttcaggctggccgccgacggctgcagtaccgcctcccgggcctgagtcagcggctgaacaaacatcgtctgcccgaaaccgcgccacgcctcaccgaggctggccgccaccaggctgccgtactcctgcgtgtcggtcagatcaacgctccggccccggaacaccgtctgcgccagctgctgcatcatcgcctgcgggtcggcggcgttcgccacctgctggagtttcaggcgcacgcgggtgatgcgggtgagccaggtctgtaa

SEQ ID NO: 195487 - DNA, 162 bp, Klebsiella oxytoca
atgctgaccattcatcattatcaaagactggtaagcccgattctgttcatctgcttgctgacggatcagagcaactcgccgatgctcaagcccctcaagtacctgttgtatttgctgagatttggcctgcatctgcgccaaacgttcctgctccacagctaa

SEQ ID NO: 195488 - DNA, 213 bp, Klebsiella oxytoca
atgaaagtatacggccatcaacactcatcagaggctttcttccgggaaacttccccatcctgttttgaaccaaaagcggaaaaggtgatcgcttttcatggaaaggatgccagttacgcctataacgtgctggccgatctgaaagccgcaggtgcttcatatacgcgccggaatatcatcgccgatatgttccgccgtctgggtgtgaaatga

SEQ ID NO: 195489 - DNA, 498 bp, Klebsiella oxytoca
gtgattctgactctgacagcgattccgattccgacagcgactctgactccgacagtgactcggactctgacagcgactccgattccgacagcgattccgactccgacagcgattcggactccgacagcgattccgactctgacagcgactccgattccgacagcgattccgactccgacagcgattcggactccgacagcgattccgactctgacagcgactccgattccgacagcgattccgactccgacagcgattcggactccgacagcgattctgattcggacagcgactcggatagcgacagcgattccgattctgacagtgattcggattccgacagcgattcggactctgacagcgactcggattcggacagcgattcggactccgacagcgattcggactcagacagtgactctgactccgacagcgattcggattcggatagcgactcggatatcccgcaagccaacgcggataccaataccgctctga

SEQ ID NO: 195490 - DNA, 573 bp, Klebsiella oxytoca
atggcaacacaggcgttaattaccaaagcgattatggcgtcgttcggcggtggtgctggtgggatgttcggtagtctttttagtggagcaagtggagctgcaagtagtggaactgcattgcaaagcttcggatcgtcttttgcctttaatgccctcggtggtgtctacgattcgccttcactgtccgtatacagcggcggtgtatacagcactccgcagtactttgcttttgcgaaaggagcgggcgtgttcggtgaagcgggcccggaagcgattatgcccctgacccgtggcgctgacggttcgctgggtgttcgtgcggttggtcgtgagtccccggcagtccaggatgctgcaaggcaaattgaggcgcagccacggatagctgtcagcgtggacgcacgaagcacgttcaccggcaaacccgatgacataacgatgcaggctgtagagcgaagaaatgatgctcttgaacagcggatagttaacaccttaaccgccgaggtaaataacccacagaagaaattcggccgggctatttactccaacctacagccaaaaaaaccacgataa

SEQ ID NO: 195491 - DNA, 270 bp, Klebsiella oxytoca
atgccgtccgtttcgataaacgtcattcccctggataaacatactgcggacttcctggcctggcgctttgaggttaattccatcttcgccattatcacggatggtattgctgtcaatctggtattcgccgtctcgctgctcagtcgtgctgttgtaatagacgccatgtttagcatttttggcgataatattgcactgcagacgcccgcgcgaaccgggatatgccagcacagttcccggactgataatcacgccataattattttctga

SEQ ID NO: 195492 - DNA, 486 bp, Klebsiella oxytoca
atgacgcccgttgttataaatacggtttccggatatttccatactgcggacttcctggcccggcgctttgaagcaaacaccatcctccccgttatcacgaatggtgttattagtgattgcatattcaccatcacgttgctctgttgtgctgttgtaatagacgccatgtttagcatttttggcgataatattacccaacaacaggccgcgcgaaccggggtaagccagcaccgtccccggactaataacgacaccataattattttcagagaagttgtttccctgcataatcatgccatccacgccacaatcgcccatacctccgttattaccggtgcaggtattccccatgatgatggtgtgctcagaactgtatggcgcgttggtgccatgctgtttctcaaggaagatgccgaaattcttcccgttgcggcagaagttgccagcaacatacagcggctcactctgtgttcccccagcccctaa

SEQ ID NO: 195493 - DNA, 144 bp, Klebsiella oxytoca
atggttaaaaactactgggatgtgcaggtaatcgacctgctttgtatctatgagattcagggagaagaatctccttgcgacgctgacaatcaggaagtcgtcattgattcttcaacctacgaatggttaacgggtgctttatga

SEQ ID NO: 195494 - DNA, 270 bp, Klebsiella oxytoca
atgtccaaagaaacgttgaacttagccgtgagttactcaaatgctcatatggttatcgaacgctcaataaatctttttcacagagtaaatcagatccgtacatcactgggtgacctgcatgaatcaatgcaaccctgtgacattgttatcaatggcgaattagacaattacgaccagagccttcgcaatctggaaaaattactccagaagatagagcgtgatgctcgtgaagatgccattgcgcttcgctacaagctagaaatgcaataa

SEQ ID NO: 195495 - DNA, 369 bp, Klebsiella oxytoca
atgaaaatctacgataccacgcccatcggcaaacccagaatgaccagagctgataagtggaaacagcgtccggcagtaatgcgttaccgggcgttctgtgatgaagctcgtctgcgcaaaattcacctgcctgagtccggcgctcacgtcacgttcgttatgcctatgccacaaagctggagccagaagaaacgcgcagcgatgaacaataagcctcaccagcagaagccggacaccgacaacatgattaaagctctgatggatgcgctgtttgaggatgacgcacacatctgggactttcgggtaacaaagctctggggtgtaaccggacaaattttaatttctgatatcggagaagtgagcgcatga

SEQ ID NO: 195496 - DNA, 282 bp, Klebsiella oxytoca
atgaaatatcgttctttatggtttcctgctgcacttttcgtttttttatcaaataccgcattttcggcagagttaccgcagaccatcgacatgaggtcggtacataacctggagaaaatgggtttagtctcgatcagtggagttagcgggagtctggacgacgctgttgctgaattgcaggagaaagcggcgcagatgggagctggaaaggtgagggttgtgtcgcttgatacacctggcgattcaagcttgtggcgtggaaacgcggtagcttatcgttaa

SEQ ID NO: 195497 - DNA, 666 bp, Klebsiella oxytoca
atgctcacgcatgatcctttcaatattgcaagagatgtaaacaactttaaaacagaggtgcaacagcacctcacatccactgatgaaataaataaatcagtatcaatatttaggcaaataagcctttgcaacaccatgttaagtcacacccctaacctaaatcattcttcatatataaaaggttttatatatgatactttaaactctttaattgccattataaaaaaaagagaacgatatctccaactaaatttcagatcgatggtggagcatgtagccagaataagtctcaataaaaactataatggtggggattttgaccaaactgtacgtcgcagagactttgacttcttaaaagcccatcagaatgatgaaggctgggcttatttacataatgtctatattaacgcctgttattatgttcattcttcaccacaagcgaacttaaatgtcacatcaacatttatatcacttatggatggagattgtaattcaacacagcataaaatggtgaaaaaacttcatgaagtagtatcagcgcttatgaagatcattataaaatattatcatcagcatatctcaaacattttctttagaaatatgaaggatttaaagaaaataatggggaatagcctttatttatattataccagtttagacaattaa

SEQ ID NO: 195498 - DNA, 399 bp, Klebsiella oxytoca
atgaataagcaactaatcagagctattaataaagctcaccatatgcctatggctaaagaaaacttcttaggcctagtaattatgttgattctttcaaaagatgtttttagatcaaatttcgatgttgccgaatttattaacaaaacattcaaaatatcttttttgaaatatgctgtaagatcaagaactttgatgtgcgctaaaatttgcaggcatatcaatgaattaagtgaagatgacgtaaaaatgacatatatgcatttcttaaataacattaatacattagtcattaagtttgatgatgaaattaaatcaagccacaaatctacatctaaaaataagcatgccataaggaatttaaatatatggattgatgcaaacaaaaaggataaagaataa

SEQ ID NO: 195499 - DNA, 846 bp, Klebsiella oxytoca
atgactgcaccagtaattagttttataaacatgaaaggtggggttggtaaaacaactttatgcgttggaattgctgaatttttagccaattatatggggcgcagggttctagttatcgatatcgatcctcaatttaatgccactcagtccttaatggggcattatgatcgagttgaagaatatatgactgcccttcgacctaataatcaaactattcgaaaaatttttgagcttccaaattcattaatggaggatgaaaagaaagcgacaccagaacaggtcattacaaaagtatcagacaatcttgatattatcttaggtgatataaatattatctttgatactaaccaagaaggcattagaataaaaatgttgcgtaaatttatcaatgaaaatgatctaaaagaaagttacgactacatttttatcgatagccctccaactatttcattatttacagacacggcactccttgcttctgattattatcttacaccggttaaaattgatcattactcggtgctaggggccagcagtttaaatagcgtcatacgaaatatgcgcacacatcatgagaaagaaatcaagcaggtcggttacatttacacaaatactgacgctgaaatgaccaataaaacaagggaaattaaagaacaattcgagagccatacacagtttacgaatttctatttctttgaaaaccaattaacctacgtgcgagatttaatggtggggtatcaaggaaatattccttcttgttactcaaaatcgcgccaagatatagaaaatatctgtaatgaatttattagcagagtggctcatttggaaggtgatacaaatgaataa

SEQ ID NO: 195500 - DNA, 1146 bp, Klebsiella oxytoca
atgagcaaaaaaattgcccgtggcagcctttgcgtgctggggatggttttcctgacggcgcaggccgccgagccgccgacttctctcgataaaggcgaaggtcgtctcgatattattgcctggccgggatatatcgagcggggacaaaccgataaaagctacgactgggtgagccagtttgaaaaagagtccggctgtcaggttaatgtcaaaaccgccgccacgtccgatgagatggtcagcctgatggcaaaaggaggctatgacctggtcaccgcgtccggcgacgcttcgctgcgcctgattatgggtaagcgcgtgcagccgattaacactgcgctgattgctaactggcactccctcgacccgcgcgtggaaaaaggcgcgtggtttaacgtcggcggacaggtctacggcactccataccagtgggggccaaacctgctgatgtacaacagcaaaaccttcccgacgccgccggatagctggagcgtggtgttcgtaaaacaaaatctgccggatggaaaaaccaatcagggccgcgtacaggcttatgatgggccgatttatattgccgacgccgcgctattcgttaaagccactcagccgcagctgggtattaatgatccctatcaacttaccgaagcgcagtatcaggcggtgctgaaagtcctgcgcgaacagcacccgctgatccaccgctactggcacgataccaccgtgcagatgagcgattttaaaaacgaaggcgtggtggcctccagcgcctggccctatcaggccaacggtctgaaagcggaaggccagccgattgccaccgtttttccgaaagagggcgttaccggctgggcggataccactatgctgcacagcgatgctaaacatccggtttgcgcttataaatggatgaactggtcgctcaccccgaaagtgcagggggatgtcgccgcctggttcggttcgctgccggtcgtgcccgcgggttgcaaagccagcgcgctgctcggggataaaggctgcgaaaccaatggttacaacgaattcgccaaaattgcgttctggaaaacgccggttgccgaaggcgggaaattcgtcccctacagccgctggacgcaggattacatcgcaattatgggcggtcgttaa

SEQ ID NO: 195501 - DNA, 276 bp, Klebsiella oxytoca
atggatacaggtattttgcacctgacgggccgatcctgccatgacaataaatcgcagcgcgcggatccttttgttgtcttatcccgcattattgcgggtaaaaccaaatacgtaaaggatcgtttttctgctcagatcctccatgaagccagtaatgacgcgggttcatggctgttttacggtttttgggagaattggggtaatgccaggacaaacaggatcgaacaaaaaaaggaagggagcagggaaggggaggatgcgctacgtgaattctga

SEQ ID NO: 195502 - DNA, 324 bp, Klebsiella oxytoca; identical to SEQ ID NO: 128177

SEQ ID NO: 195503 - DNA, 267 bp, Klebsiella oxytoca
atgaaatcagatgttcaacttaatcttagagccaaggaatcacagcgggcgctcattgatgctgctgcggaaattcttcacaaatcacgaacagacttcatcctggaaatggcctgtcaggccgccgagaatgtgatcctcgatcgccgggtctttaattttaacgatgaacaatatgccgaattcatcgacatgcttgatgcccctgttgcagatgaccctgccatagataaactgctggcaaggaaacctcagtgggacgtgtaa

SEQ ID NO: 195504 - DNA, 1305 bp, Klebsiella oxytoca; identical to SEQ ID NO: 96845

SEQ ID NO: 195505 - DNA, 231 bp, Klebsiella oxytoca
gtgaacagagttactgagcgccaggaacagaagagtaacccggagttccagagagagtaccggaaccgtatccgggaaacacacgaccagttaaacctttatctccccaaagatgcaaaaagaatgttgatagagatcacaaaagttaaaaaactcactcaggctgaagtcattgaatttcttgtcaaaagctattacgacggattgaaatttgacgattctgaagagtga

SEQ ID NO: 195506 - DNA, 654 bp, Klebsiella oxytoca
atgaaaggatattcgtatactgttgtcgataacaacatggctaaatcaaaaggtgttggctactatctgtcacgcctgtctgtagccataagtatagttattttaacaataagtcttccgttgactgtatattctggctttcttactttaggtggaagcctggcattggcgtggtttgttgctctacttgttttcgatgccatgctgatcacatatgttgtacgccaggtaaaaagtaagggagtcaaaaaggtcgttgcaggcatgagagtttatggatgctttaatccatcggctaaagaggaacaatacatgccggctcagaaaacatattttggtatagatatggactccggtgttgttgggattgctgccctttatgctgtacaggcctctattaagcaaaagagaattttgtttgaggccgagacaattgagtcttgggagtatactgatagtaaacttgtcgtaaatattcggaaccgacatgtgcctactgttgaaataatcttgctcaatgccggcctagcatatcgccagctggaaatgttaaccaggatgcatgagcaacataaaaaatacaggggtgaaaaatatctccagtggcgaaagactatgcttgatgaaggttggatgctaccacgaacgtattga

SEQ ID NO: 195507 - DNA, 2196 bp, Klebsiella oxytoca
atgaataagtcaagaaactcattggtcgcattgttgccgctatcgcttttcattaccccggcatattctgcagatctgggaattgatagtattacagaggctgctaaacggtctggtgatttgtcacgtcagatgctgcataccgtttttggtgaagtggtaaataatcctttcagtccgtcaggtgatgggttgttaaataacgtatttttcacagtgaatgaggttatcgccatattagcgctgatttatatggcgataatcagtattaaaaaactacatcaggcagggcaacttgggaagtttatagagggtgatgggaataatgccttcaattttgttaaaacaacattcggctggctccttttggttccaactgttgttggatggtccgttgcacaactgctcttcctgtggtgtgggtcaatcataggtgtaggttctgccaatgttattgcagataaaacagcgtcggaactagcgagtggcaaagctgtttatataacgccagttatgccagaaatggcttctgtggctaaaggaatgttcgaaatgaacttgtgcgctcttggtgtcaatcaagggttagctcagatggaggcttcaggccaacattatgaaagtaatagccagatgaagtttaatactggtgattctagttactcaatttcagttgacaatggttctgctgtttgtgggactgttaaattaccacaaaaacctacaggttggacttcggtattctccagtggttacgctgattctgtttatgcagttcaacagcaggctacagactcgctttggagtaagatgaagaatacagcagagcaatttaactctgcttatatgtctaaaatgcgttccggagatgggcagctgcctgacgttgaaactgcaattcagacagcagcaagagattaccaacaacaagtacagcaagctgcagacaatgctgccggaagcaatgatatgctccagaaaatggagtcggatataaaggaaaaaggctggctatatcttggtatttattatcataccctggcaactgctaacactgagctgaaggacgttgctaatctgaaacctattgtatcagggataagtggtgatggtgatgtaggttctacggactattataaaggtctgttccaggcatatcattcacaactgaaaaacagtacctacactccccctttaggtactgctgataatgctttagctcagaacattgacaataaaggcatcgaagaagcggcaaaaagtggtgatgcagattcgttgattaccaaaattttcaactttaatgttacttcatggcttgccactagaaactacggcactggcgatggatacagcgatgtaacgaatcccttgttgaaaatgaaagccattggtgattacacgatgtttactgctgagagtggtctagctgcttggggagctgttaatgtcgcaatgagtgttgcagatggtaataacgctgctggaatgggggcgggattacttaatttcttcacttcaggtaaggatattattaagggtgtaattaaaactgcggctccgatcgtatacatgattttagtcgctctgttctgtatagggttaacgctttcaatttggcttccatttgtgccatttatctattggtttgtcgcaatggcggattggttagttactttgctgactggtatcgttgcatcttcattgtgggccgctacccatattaacattggccaaactaatgaggaccggtcaacgtatggatatattttcctgatagatgtgatgattcgaccactgttgatggtaatggggttcatttttgcatcattggccattgtggctcttggcaccgcgcttaactatattttcaaaacagcaatggaaaatgtacaggcagattcaacaactggcctttggtcaatgataggtatcctttttgtctatgcaaggatgtgtacaggtatggtcgctagggtatttgcattacctgcaaggatgcctaactacgtcatcagctggattggtaacaagcataacgattcaattcttggtgatatgcagaatcatgttcacgacctgtttgctgcatttggtcgtggagctaaaaatacaggtggacgtccttctgggccgaagaacttcaacccaaccaatacggttgataaagacaaagatggtatagcgggggcgtga

SEQ ID NO: 195508 - DNA, 597 bp, Klebsiella oxytoca
atgacagacgaaaataaaacaggggaagaagttacaaaatcccccggccgcatgaaaaaagcggtttatcatattaccggaattagtgatattcagtttatgtggaaatcactaagggaatctatcagcctgctcaatgagcgggcttctttcgttaagaagcaaatcaaaaatttggaagctccggacgaaaaatcagcttcgaatcagtcgtttgaggatgttgttaaaaagagttctatccccttagaacagcatctagctaaagccggtaagtataaaaaatattggttatgttgcttctttatagctgtttttgttgccctgtttttaatcgctggctgtgtaaaattgattgttaatactgaatacaatgtaagccttctgaaggtgacattaacacttggtttaatgtttgctgtttgtatctactcgttcgtaaaagcaatgacttatgaatttttaggttggcaattacgcaatgaggcccattctgaagaagaattcggtacattgagacattttattaacgataacggtgtgcgcaatacatttaattttgaacaagctggccagattcggggggcgcatgaataa

SEQ ID NO: 195509 - DNA, 318 bp, Klebsiella oxytoca; identical to SEQ ID NO: 95992

SEQ ID NO: 195510 - DNA, 972 bp, Klebsiella oxytoca
atggacgctgatttaaaattattcgatggccagcaccgtgcgctgggtatttttgaatttgtacgcgattattccaatacggaagatacgatcagcttgttgcttaccgttggcctgccacttgagttacgccagcagtttttcgctgatattaataacaacgcgagcaaaccggcagcggcgatcagtatggcatataacaacaatgatccggtcaaccagctggcaatgcatctggcccgaaccgtcaccgggctggcgggcacagtggattttgaacacaacgtggtcccggcgaaaagctcacggctgatcagctttaaagcactgaacgatgcgacgaaaaaaatgctcaacctgcgggccaacagcattccctcgacgcaacagcgtgatatggcagaaaagctctggactgcctgggcacaggcgatgcgctggaatgatattgcccaggatgatatcgctgcggagtaccgtcaggaggcgctgggactgcatggcatcatgataaatgcgatcggtatggcaacggccaggatgttacggcacagaacacctgaaagcatcgagaaccttctggcctgtgcggaaaacggagacaacggttttcattatcgggagtcgtttgtacctgagtgctgggaagggaagtgtgttgatccggagactggcaccattaaaactgaccggcgggcgcttgaagcaacggctgaagcgctgcaaaagctgatagacccgttcgcagatgcgctgtggttgcgtgcttatctgccagttgaagaggcgagtgatacggcattactgaaatatgctgctgacatcgagagttataagcagcgcacagccgtgccgatgatcaatatcgtggagaagctgaaggcgctgggtgacggcgaaccgcagttcagagcgtcggtgctggcttcccgtgaggggctaagccgctatctggccggggctgaaggctga

SEQ ID NO: 195511 - DNA, 1515 bp, Klebsiella oxytoca; identical to SEQ ID NO: 52478

SEQ ID NO: 195512 - DNA, 786 bp, Klebsiella oxytoca; identical to SEQ ID NO: 16905

SEQ ID NO: 195513 - DNA, 534 bp, Klebsiella oxytoca
atggacacaacgcaggtcacattgatacacaaaattctagctgcggcagatgagcgaaatctgccgctctggatcggtgggggctgggcgatcgatgcacggctagggcgtgtaacacgcaagcacgatgatattgatctgacgtttcccggcgagaggcgcggcgagctcgaggcaatagttgaaatgctcggcgggcgcgtcatggaggagttggactatggattcttagcggagatcggggatgagttacttgactgcgaacctgcttggtgggcagacgaagcgtatgaaatcgcggaggctccgcagggctcgtgcccagaggcggctgagggcgtcatcgccgggcggccagtccgttgtaacagctgggaggcgatcatctgggattacttttactatgccgatgaagtaccaccagtggactggcctacaaagcacatagagtcctacaggctcgcatgcacctcactcggggcggaaaaggttgaggtcttgcgtgctgctttcaggtcgcgatatgcggcctaa

SEQ ID NO: 195514 - DNA, 597 bp, Klebsiella oxytoca; identical to SEQ ID NO: 119679

SEQ ID NO: 195515 - DNA, 249 bp, Klebsiella oxytoca; identical to SEQ ID NO: 95965

SEQ ID NO: 195516 - DNA, 546 bp, Klebsiella oxytoca; identical to SEQ ID NO: 95960

SEQ ID NO: 195517 - DNA, 585 bp, Klebsiella oxytoca; identical to SEQ ID NO: 30057

SEQ ID NO: 195518 - DNA, 159 bp, Klebsiella oxytoca; identical to SEQ ID NO: 95958

SEQ ID NO: 195519 - DNA, 333 bp, Klebsiella oxytoca; identical to SEQ ID NO: 26656

SEQ ID NO: 195520 - DNA, 159 bp, Klebsiella oxytoca
atgatgatctcatatcaggaacttgttcgcaccttccttagaaagagcatagttacgggaaaactgacgggcaaaattggcactcttggcctatcgctcagcgcctggttaatgcgcgcaccagtgttccagagcttcgacagcagcattttgtgctaa

SEQ ID NO: 195521 - DNA, 438 bp, Klebsiella oxytoca
atggcaatgaaagacggtgagctggtgatatgggatagtgttcacccttgttacaccgttttccatgagcaaactgaaacgttttcatcgctctggagtgaataccacgacgatttccggcagtttctacacatatattcgcaagatgtggcgtgttacggtgaaaacctggcctatttccctaaagggtttattgagaatatgtttttcgtctcagccaatccctgggtgagtttcaccagttttgatttaaacgtggccaatatggacaacttcttcgcccccgttttcaccatgggcaaatattatacgcaaggcgacaaggtgctgatgccgctggcgattcaggttcatcatgccgtttgtgatggcttccatgtcggcagaatgcttaatgaattacaacagtactgcgatgagtggcagggcggggcgtaa

SEQ ID NO: 195522 - DNA, 378 bp, Klebsiella oxytoca; identical to SEQ ID NO: 16790

SEQ ID NO: 195523 - DNA, 816 bp, Klebsiella oxytoca
atgagccatattcaacgggaaacgtcttgctcgaggccgcgattaaattccaacatggatgctgatttatatgggtataaatgggctcgcgataatgtcgggcaatcaggtgcgacaatctatcgattgtatgggaagcccgatgcgccagagttgtttctgaaacatggcaaaggtagcgttgccaatgatgttacagatgagatggtcagactaaactggctgacggaatttatgcctcttccgaccatcaagcattttatccgtactcctgatgatgcatggttactcaccactgcgatccccgggaaaacagcattccaggtattagaagaatatcctgattcaggtgaaaatattgttgatgcgctggcagtgttcctgcgccggttgcattcgattcctgtttgtaattgtccttttaacagcgatcgcgtatttcgtctcgctcaggcgcaatcacgaatgaataacggtttggttgatgcgagtgattttgatgacgagcgtaatggctggcctgttgaacaagtctggaaagaaatgcataagcttttgccattctcaccggattcagtcgtcactcatggtgatttctcacttgataaccttatttttgacgaggggaaattaataggttgtattgatgttggacgagtcggaatcgcagaccgataccaggatcttgccatcctatggaactgcctcggtgagttttctccttcattacagaaacggctttttcaaaaatatggtattgataatcctgatatgaataaattgcagtttcatttgatgctcgatgagtttttctaa

SEQ ID NO: 195524 - DNA, 276 bp, Klebsiella oxytoca; identical to SEQ ID NO: 5786

SEQ ID NO: 195525 - DNA, 378 bp, Klebsiella oxytoca; identical to SEQ ID NO: 146978

SEQ ID NO: 195526 - DNA, 1146 bp, Klebsiella oxytoca
atgaaattatttttggctcacgcaaaagaagatgaaaaggttacagagtcaatttatgagaaattaaaaaacaatggttatagtccttggatggatataagggatattcctgcgggtgtaaattgggacaacgaaattcaaaaaaactttagcagtgcaaatgttataattattattcttagcaaaattagctgtcaaaaaaatggttatatcaggcgtgaaatgaatgaagccattgataaattaaaatattacaaacctgatgacatatttgttatacccatccttattgatgattcacctgtcccaacattcatatcttcaaaaattcaatacatcgattataaacgtgaagatggctgggcgttgttagaaaaatcgttagcattagctgcaactcaacaaaacattgaaattgcgaaaggggtaacgtacggtgattttacattcacaagtgaaacatttaaggaagaatataacagcatacctggacatgaaattgatataacctatccgattgtttctaaccaaactcatcctcagtcagcaaagatcatatctaactatttcaaaggtcgggccacgcgcttagttttcgataacagaacttcaccttggccaagtaattttggttggaatgaagagtgtaaaagtacttataccagtgactatattgaaggatattacattgcatactgtaataaccatatcctaagtattctccatagtgtcaattggtatggtgcaggcgcagctcacccgaatagccatttcgatgttagcaatttcgtagtaaccgacggtgattattcctataaattttcattatatgatctcttcattgatgaaaaagggtacgatgctattaacaaaattaaagaaaggcttatatcggatgcgccccgtgtattttgggaaagaacgggagaaaaacctgaggaatctgatatggaatggttaattagagggataacggatagtaaactggatattttcaccattagtgaatcaggattaacttttcattttgctccatatgaaatccactgctacgccttaggtccgtgggagttattcatatccttcttcgatatcattgattatcttaagccagatggtatttactcattaattaaggtcgtataa

SEQ ID NO: 195527 - DNA, 294 bp, Klebsiella oxytoca
atgattaatgtccaagtttcattttactcattaagatttaaaaactacagacaatatagttgtgatgtcgaaaatgatgatttaatcaaggacattttgcttcaaatatgtaataatatgggaataagtttccttgactctatagatacctatagtaaagaagaattaggggctatactttatagctatgttgatgatgttgagtttgcttatttatcaaatggaattcagaataaagaggtaatttcattagaaaaacttaagaatgatttctcgaaaaatattaacgcttaa

SEQ ID NO: 195528 - DNA, 1986 bp, Klebsiella oxytoca
atgaaagccgtagtcttcgcttatcacgatatgggttgtgcaggtattcagtctctgctggatgccggttatgacatcgccgctatttttacccatccggataaccctggcgaaaaccatttttttggctccgtggcgcgtattgccgctgagcaaggcatcccggtatgggcgccggaagatgtgaatcatccgctgtggatcgaacgtatccgtgagattaaaccggacgtgctgttctcgttctactaccgcaacctgctgtgcgatgacattttgaatattgcgccgcagggggcttttaacctgcatggttcactgctgccaaaataccgcggccgcgcgccgctgaactgggtgctggtgaacggcgaaagcgaaaccggcgtgacgctgcaccgtatggttaaccgcgccgatgccggcaatatcgtggcgcagaaaagcgtcgcgatcggcgcggatgacgcggcgctggcgctgcaccgtaagctctgttccgcggcgtcggaacttttggctcaggcgctgcccgccatccgcgacggcaaaaccgaagagcgcgcccaggatgaaagcctggcgacttacgtcggtcgccgtacgccggaagacggtcgcctcgactgggaacgctcggcccagacgctgcacaacctcgtccgtgcggtctccgatccgtggccgggcgcgttcggctacgccggcgcgaacaagtttatcgtctggaaatcccgcgtgcgccacgatctggccgccgccaaagcggggacggtgatctccgttgcgccgctggtggtcgcctgccaggaaggggcgttagaaatcgttaccgggcagaccgagcgcggcgtttatatgcagggtacgcagctggcgcaggcgcttggcctggttgccggcgcggtgctgagcagcaaaccggtggtggcgattaagcgccgtacccgcgtgctgatcctcggggtgaacggctttatcggcaaccacctgaccgagcgtctgctgcaggacgacaactacgagatttacggcctggacattggctccgacgctatcagccgcttcctcgacaacccgcgcttccacttcgttgaaggcgatatcagcatccactccgagtggatcgagtaccacattaagaagtgcgacgtggtcctgccgctggtggcgattgccacgccaatcgaatatacccgcaacccgctgcgcgtgtttgagctggatttcgaagagaacctgaagattatccgcgactgcgtgaaatacgataagcgcatcatcttcccgtcgacctcggaagtgtacggcatgtgcaccgacaataacttcgatgaagatacctccaatctggtggtcgggccgattaacaaacagcgctggatctactcggtctccaagcagctgctggaccgcgtgatctgggcctacggcgataagaacggcctgaagtttaccctgttccgtccgtttaactggatggggccgcgcctcgataacctcaacgccgcgcgcatcggtagctctcgcgccatcacccagctgatcctgaacctggttgaaggttcgccgatcaagctgattgagggcggtaagcagaaacgctgttttaccgatatcagcgacggtatcgaagcgctgttccgcatcattgagaacaaagacggccgctgcgacgggcagatcatcaacatcggcaacccggataacgaagcgagtatcaaagagctggcggaaatgctgctggcctgctttgaacgccatccgctgcgcgaccgcttcccgccgtttgccgggttccgcgaagtggaaagcagcgattactacggtaaaggctaccaggacgtcgaacatcgtaagccgagcattcgcaacgcgaagcgctgcctgaactgggtgccaacggtggaaatggaagagaccgtggaacacaccctggacttcttcctgcgcacggttgagctgacggacagcggaaaatcatga

SEQ ID NO: 195529 - DNA, 1392 bp, Klebsiella oxytoca
atgtttatccttgaaacgctgaattttgttgttgatattctaaaagtaccctcggtgctggtcggtttaattgcgttaattggtctggtagcgcaaaagaaatctttctccgatgtcgtcaagggaaccattaaaacaattctgggttttattgttcttggcggcggtgcgacggtattagtcggttcgctgaatccgctggggggcatgtttgaacatgcttttaatattcagggcattattcctaataacgaggcgattgtttctattgcactggaaaaatacggtgcttcaaccgcgctgattatggcgttcgggatggtagcgaatattgtggtcgcccggtttacgcgtctgaagtatatcttcctgaccggtcaccacactttctatatggcctgtatgatcggcgtgattcttaccgtggcgggtttcgaaggcgtcgggctggtctttaccggctccctgatcctcgggctggtgatggcgttcttcccggcgctggcccagcgctatatgaagcgtattaccggtacggatgatatcgctttcggccatttcggcaccctgggctatgtgctgtcgggttggatcggtagcgtctgcggtaaaggatcgcgttcaactgaagagatgaacctgccgaaaaacctgagcttcctgcgcgacagctccatctccatttcgctgaccatgatgattatttatctgattatggcggtgagcgcggggcgcgagtacgtggaaagcacctttagcggaggccagaactacctggtttacgccatcattatggcgattaccttcgccgccggggtgttcatcatcctgcaaggggtacgtctgatcctcgcggaaatcgtgccggcctttaccggattttcagaaaagctggtgcccaacgcccgtccggcgctggactgcccggttgtttacccctacgcgcccaacgcggtgctgattggcttcctgtttagcttcctcggcggtctggtcgggctgttcctctgcgggcagtttaaatgggtgctgatcctgcccggcgtggtgccgcatttctttaccggcgcgaccgcaggcgtctttggcaacgccaccggcgggcggcgcggggcgatgattggcgcgtttgccaacggcctgctgatcaccttcctgccggtgctgctgctgccggtactgggggcgattggctttgccaacaccactttctcggatgcggatttcggcgccgtgggtatcgtgctgggtaacctggcccgctacctgtcgccgtttgcgattaccggccttgttgtggcgttgtttgtgctgctggtggcgtacaacgtttttgtgaaaaagaaacctgtgggcggcggcgcgcaggagaacagcggagcgaaatcatga

SEQ ID NO: 195530 - DNA, 906 bp, Klebsiella oxytoca
atgccactcagtcgtaatgattggattgaatcaaatatacccacaacgggagagctagatggtggtgtgaaatattataaacatggggctgggtgtctggtaagtcttaacacgggtaaagtggatttcgattttggtgaggaaggtgaaataggcggatttaatttgtggtggctcgctaaatttgcgggtgaaaatctaacaagttatggctttaaaaatacgaatgatcttgatgaatgtttgactaaagcattagacgcgggggtattaatttgcccagattatggtctttactatatagctaatgccccatatatctatgcgacagatatagacagccgggatcctcaggatatacttcctagtcgcaaccaagatcctatactggttctccaatcacattactttcaatcagctgagttgatgctggaaaattacaataaactcagtcgaaaacttgataaaattggtcgcctaagtcggcgcgaagagattgatatgcgaatttaccttactacctggcttggctttttaggagtggtttgtgagggagtacggaagttaaaaatacatattttactagggagtgaacgccctgagagttttaaaaaaatactgccaatttcagataatataggccaactgatgaaagaacattctgactctttacgaaaatttagaaataatgtttttcatcttcgtgaaaatactgaattggtacgtgatttttttgataaaagattcgatcgtatccaatgggcttttgagttacatataactatttcagaatttttttctcagtataaaactagttgtgaagtgcattatctcatgaatggacgtaaaggagagtgcgatttaataagaaataagagagtgttgcgcaaaagaaaatcgcgttaa

SEQ ID NO: 195531 - DNA, 216 bp, Klebsiella oxytoca
atgttgctggggggcgtcgaacttcggcagccagtcggcgttgctttcctccctgagggcgagattgttctacatgccctgatttgtgcggcccatcttgaacaggcccgccggatggaggacaccctgacggctatcacccgcgcggaggagcagaaagcggccatatcgaacgtgtggctcgccgggagctggcgcaggaatgtcacaacctga

SEQ ID NO: 195532 - DNA, 360 bp, Klebsiella oxytoca
gtggctcgccgggagctggcgcaggaatgtcacaacctgaccgaagtactggcctttgaacgtgaccaactgaaagccacctgcgatagaaccgcgcgggcattacggcaggcgcatcatgccgtactgtctgaatacgctaaggaagagctcgaccgcgcgctgaatgagactttcaggccactggtccgggcgatggtgctgaaagcggaggtgatggaaaacccgcccgccaataccaccggccatcagggctacatcgagccggagaaagaagtcatgcatcaggtggtcaccttcctgaccaggaaagtgagcgccttctccgtcacgcctgcggatgagcggtgctgtccctga

SEQ ID NO: 195533 - DNA, 204 bp, Klebsiella oxytoca
atgacagcagccccgcgctttcaggtcagcctcgcgctcgcggattttcttctggtagactttacgctggccgggcgtgctggcggcgtcctggtccatatgcagaagcgtgacgacctggaagccgatcagggacagcaccgctcatccgcaggcgtgacggagaaggcgctcactttcctggtcaggaaggtgaccacctga

SEQ ID NO: 195534 - DNA, 234 bp, Klebsiella oxytoca
atgattacctttacattacagcaggcctttgaggcctgtcagaagaacgaaaccgactggctgaaccgtaaagccgacctcgcggtcatagagccggaataccgggaacaggtgctggccgggaatgaacgtatccctttaagattgcaggaactacgtgagattatcgacatcaaaaaatgggagattaatcaggctgccgggcgctatatccgctcccatgaagcggtgtag

SEQ ID NO: 195535 - DNA, 210 bp, Klebsiella oxytoca
atggaaagattagcagttagttcatctaatctagcgtcaattggttatgatagtgcatctctcacactcgaagtagagtttaataatggtgcgatctatcagtattatgatgttactgaagatgtttatacagatttattaaatgcaagttctatcggttcatattttagtaacaacataaggaatgcttaccctacgcaaaaaatttag

SEQ ID NO: 195536 - DNA, 1794 bp, Klebsiella oxytoca
atgatgagtaaatcgactttaacctcaacttcaattggagtcataacagctatttccagctcatctgttacagttcggctttcacgtaaagttaactctgggttactggtgatagaaggaagaacacacaaagtcggacaagttggaagttttgtaagaatacctcaaggttataatgatttatatggcgtggtgggttccagcaatgaaagttctatcattgagaatgaggaaaaaatatcatcagataatagaactatcattgtagaattggttggtgaaagctcctgcggatttttcgacagaggtattagccaatacccatcggtgggtgatgatgttcatatggttttagattcggatttaaaaatagtatacggttctaaaagtcaaaatctcataacagtcggcaaactttctagttcagaaagcattgatgtaaatttagatattgataaattagtaacgagacattctgcggtagttggttctactggctcaggtaaatcaacgagtgtatctggtttgcttcgctctatttgtttgttaaatgataagagcgataattcgtctagaatattgctagttgatatgcatggcgaatactcaaaagcacttaaagatatatcaaaagtattctcaatagatcctttagatgatgaaaataaattacaaataccttattgggcactacctacagaaaaacttattgagttcctttgtggaaatataaatgagttaagtaagaatgcaatgattgagttcattactgaagaaaaaaagaaatcccttgagccaaataatataacttacattaatgaaagtaagataacttcttttacgccactaccttacaaccttaacaaactatggtataaattcatttttgacgacactgcgacttattgtgataaagaatttacaaatccagcttataaagatgatattcaaggtgatgcaaatactttaacagcgccaaaatttctcccgcctgcaacagcaaataatcctccattcaaaaaaggtaatcatgctttaaccaaacaattaaatttaatgaaagccagattgattgatagccaatattcatttttcttaactcctgaaaattacactcctgatgaaaatggcgtcattgaaaaagatctcaattcacttttagatgaatggctaaaccatgacaaaccaatttctattttagatctatcaggcatgccttcaaatcaattagatatgctcctaggttcgattatgagtattgtctttgaatcttcactgtggggacgaaatctaaaatcaggcttaaaaaataatccggttttatttgtccttgaagaagcacataggtatctttccaataatgacacagggttgactaaaaatttagttcaacgaattgcgaaagagggaaggaagtttggtgtgggcttgatgataattagccagagaccttcagagattgatgacacaatactttcgcaatgtggaactctatttgctttgaggctaacaaatgcaaatgaccgctcaaaggtaaaagcagcaatgtctgatgggcttagctcacttatcgactccttaccgatactaagaaccggagaagctattattattggcgaggctgctaaattaccttctagatgtaaatttaaattacctccggatgggttttatccagatagtcaagaccctgaagttagtaatgtttggagcaaacctagagatccagataaaaattattcaaaattaatagaagcatggcgtttaaataaaccactgaaagaggataattaa

SEQ ID NO: 195537 - DNA, 165 bp, Klebsiella oxytoca
atggacttggcgggtttggtctgccagcatatggaacgtcgcccacttcggctctaccattactcctccaatcagcaaatcaattatggtttaaccagaaagatattatccttgatggttggcaattttcttattgtcgttttgatcgttgccgcatttttttga

SEQ ID NO: 195538 - DNA, 624 bp, Klebsiella oxytoca
atgacgcagaaaaatgatggtattatctcaatgagtgctagtgctgctgttactgtaacagccaaaaaaagtcagtccttgattatgatattggcgatcacaatggctatcctattgattatagggtgttatctgctgtatgattttaaccctttattttgggtgccatttattccagccggtattttgctcattgcttgtattttcttagcccttgtaacacataaaaatacagatcttgcaggtgcgcacgctactgtaattgagtccggtgggccaagcggcttcaaaatagtcactgatccaagggttgatattgcatccaaaaatattgttccgcttatttctgttctagcgaacatgcatactttacccgatgcgagtgggttggttgatagaaagcttaatcctatctctaatacagagcaccaagcagtgcaagaagtagaaaggataaatttagaagctcaaaaagcatgcgctgacgcagttacaaaatttacctcatcacctgtttctgaaccactcctgagcccggttttttcagcctcagaaacagaactagaaaacctcactccacaaaaatttattcatgtagatcagaacgatagtgctgcttcataa

SEQ ID NO: 195539 - DNA, 1005 bp, Klebsiella oxytoca
atgggcgcggagattaatactttggaaactgattttaaaataaccctcgaaggtttcactactgagcaagaagcaaataatatcggtaatttcacgctggaagctattcgagccttaacaaaaaacctcaatcttgacatttcaaaattaaaatgcgtggttgtttcctataatttcagcgaagctcttcaaaatgtaacctccatttaccaacacaaatcccctagttcatttaccaatagcaaacagggcgcagccgtcgggcagttagtaacaaaaattggcagtgatgggttatgtgaagaatatacccttgtgctatctattgatttttttgttgagctttttaatgatggtagcttcctgaaattgaatgaagaagggtaccgcgcagtcatccatcgtattcaccatgagttggtgcacgtacatgaaaaaaacttactaacatgcttagcccaaaactttacggtcaacgagtatggcgacgcgctgcttatctcagccacgcgtgcatggtctgaatatcttgctaattacatgtcttcggggtcagcccctcaagataccatcgatatatttctagagaatcttgatactgttgtaattgaagtatctgacgagattgaaaatctcattctaaactataaaagagataatatttccctaaacgagatgtatctcgaagcaaaaaaacgcatcaagctaattattaactcctatgcttatgcgataggttacgtccattctctaaatatcaatattaatgaatacgcccccaaattagcccttacactatccaactcaaaaataagaaatcaattatcagagctaggtgttgcctttcagaattttcataaaaaattcaatgacaaactcattacaggctttgatgattatcgtgagataacattagtcattgatgaaatatacaagcagtttgggcttgctttagagtgccccgactggtctagtgacagtggactctacatacatgtaaattag

SEQ ID NO: 195540 - DNA, 747 bp, Klebsiella oxytoca
atgaaaaataacactttctcacaaagccagattcaggcaatggccgacattctgcacaatgacagctttgactatcaggcaacgtggttgcgggtcggtaaactcaatatcgaccgcagcatcaccaaatcgcgccagattggtgcaacccaactctttagccgtgaggcgctgcttgatgcgctgacaacaggtgataatcaggtctggtttgctcatacggttgagcatgcgcgcgtggcgctgatgtacatgaacaatctttcggcgcgcgtcggcgtccgtctggcaagcaacggatacagcctgcagctcgacagcggggcggttatcaattttgtcggcgaagaatcccactgcgccgcgctggcgggtaacgtctatcttgatgagttcggatggttcaataacccgctacgcgctgcaaaagtagcaacggctatcgcctgccacaaacgccaccgtctgacaatgttcacctcgccctcagataattatgacgctttccgggtgtggaatggcacgttacgcaggcaccgaccgtcaccgctaatcaataccggcgacagcgtattctgcacagatggtgtctggcgtcagtctgtcactctcgatgcagcatgccagcgcgggtgcaatctttttgcgcctgaggaaattaaacgcgaatacagcgacgatgattatcgtctgctgtttggctgcgactggtctttcgctgttgcgacgggtgaggtggcagcatga

SEQ ID NO: 195541 - DNA, 219 bp, Klebsiella oxytoca
atgtttcattgtccgaagtgccatcatgccgcacatgcgcgaacaagccgctatctaaccgaaaatacgaaagagcgctatcaccagtgccagaacatcaactgtagttgcacgtttatgacaatggaaacgatagagcgctttattgttactccgggagccattgatccggcaccgccgcacccgactgttggtggtcagcggccattgtggctctga

SEQ ID NO: 195542 - DNA, 633 bp, Klebsiella oxytoca
atgagtgagcaacgacctcctccgtcacgcccggcacagggaccggttggctggctgctgtcgctgtccggaaggttaatcgggttggttattggtgcgctggtgctgcgcgtagtactggaactggcagggctctatttctggtggccacaggagggaagcaggcatgtttttcaggtgatgagacaagagcgggcggaactggttagtgcattacagccgcatccgctaggcgatgacattgtgatgcagctggaaaaaggggcaactcacgtgtttatggtcaacaggctcctgcagaaaccgttcaccggtctgacttatacgctggtgagttttatgcagcgcctggtatggcttgccaccatgctccccctgctttgcctgtgtgcgataaccgggctgacggagggactggtgcagcgggatctgaggcggtttggctccgggctggagtcggtttttattcaccgctacatcatcagctatggaagttcagtcgctaccacgctttgggtgatttatctggcacagccattgttggtgcccgcgatgctggttttactgcccaccgccttatggtttgggataacggtatggatggccgcaggaaacttaaaacgttggctataa

SEQ ID NO: 195543 - DNA, 1188 bp, Klebsiella oxytoca
atgtccgcagaatttgtcgaaactgacaatgaagaaacttggtttgatgattatgctgatgaagcagatcaattccagatttcagaatatgatataacttctacacctaatgatttcaacgtcatgacattacatagttttattgaatcaggggcggtaaaaatacctggttttcaaagaaactttgtctgggatatggctcgctcgtctaaattaattgaatcactcatcttaggtttacctgtaccacagttatttctttatgaacaagcaagaaatagctttctagtaattgatggacagcaaagactcatgtccatttattattttattaaaaaaagattcccaagaaaagaaatgagagttcaacttagagaaatttttgatcgagaggggcaaattcccgaagaaattcttcatgatgatacatatttccaaaacttcaatcttaaattacaagaaaaaacccccggagttaagaatatattcaaaggtttaaattactccacccttggggaatataaaacacaatttgaccttcgtcctttgagaaatataattgttaaacaaaacacgcctgatggtgatgattcatcaatgtatgaaatatttaacagacttaataccggaggtattaatttaagacctcaagagatcaggacaagcatgtatcattctgatttttatgcaatgctttataaaatcaatatacttcccggtaccagaaaaattctggccactccagaaccagatttacacgttaaagatgttgagattattttacgcggttttgcaatgttaattgatttcgaaaactatgtgccttctatggtgaaatttttaaatcagttctctaaaaaaagcaaaactaatacaaaagaaaaaaatgaatatctgaaaaatttattcttgagctttattgatagttgttctgaacttcctgatgacgcctttgttaataaaagcaataagcgattcaatattgctctttatgaagcaatatttacagccgcatgcgaaccatcatttttaaatcatgagttaattcaaggtaagatacagttcaatagtatcgaagccattaaatccaatccagaatttacagcagcagctaatgagggaaccacgaagattgctaatgttacactaaggatatctatcgctaaacgtgatttaattattgaatag

SEQ ID NO: 195544 - DNA, 534 bp, Klebsiella oxytoca
atgtcaacaaatatagttgaaagactacatacagagtttggtgaactcactaggattcttagtaactctggggagatatcgttgctaaatgttgctgaagataactttagaaaatccctattattagctgcagccagctattttgaaaagaaaatgactgaacatgttttacagtttgcatatgaaattgctggggaaaatcatattttagctgcattgatacagcaaaaagcaataaatagacaataccatacatggttcagttgggatcaaacatctgcaaattcatttttttcattatttggaagctcattctcgaatattgcaaaagatgaagttcggagaaatacaacattagatgcttctatacgagcatttttatcattaggatccgagaggaatcggcttgttcatcaagatttcggtaatttcacgttagagaagacaacagaagaaatttttttactatttcaaagttcgatgttttttgtgaattggataccacaatttttacgtgaaaactgtcgatgctaa

SEQ ID NO: 195545 - DNA, 702 bp, Klebsiella oxytoca
atgtatcgaatcacacatatattatctttactcagtaattcgaagtctgcaccagtaaaagcttggagtaagggagagcgtatcgcaaagaagattcaatattggttcttgggccttgctgtattgttctttgctgtttgcgctgttctcgctattattcataattatatccccctgtcacaacccattaagtttatagcactttgcttgactttgttaacacaggtatgtgcattgctgtcattctttcctgatatcataattggtgtctatacattaattatgtggcggcagcatatgctagtatcactgacgcaggaaattgagaaagacgaaaaaaatgccaggcgtttaatggagtttaatgaagttgaacttcaatacgctaagtattggattgagctgaaaattgttaggaatgaatcaaggttgaagctattttttggtgataaaactgctgcatttgctctcttagggttatcatggccagttataaaagagttaggaggattagaatgggtatcatcaacatttagtcacttcttggcaccgggacatgttttagatactctcatatggatgtttttggcattattattagggctgtctttaggtggtattatgatgaagaatgttaatgaaaaatacaaataccaagtatcattgttagagttggctttaaaattaaaaataatgccatag

SEQ ID NO: 195546 - DNA, 309 bp, Klebsiella oxytoca
atgcgccatagctcaatatttctgttactgacttttcccatatggtcacaggcctacgccaccccggaatccacccagctcgcccttgcgctgaaacaactcaacggcgtgaaaacttcgctggaacgcgcccaaacccgcgccagcactgatccgcagtcgcgctacttcttcgactaccagcaggcgcagcaggatatctccaccgttgaaaagggcatccgcggctaccttagcccagcaagagcgcagccgcgcgccgtccagcccctgagcgccagctaccagcgggagaaccccgatgactga

SEQ ID NO: 195547 - DNA, 420 bp, Klebsiella oxytoca
atgggtgacgaagtcgatcctaacggtctgaaaggcagaatattaaatgctgagcaacttttctttatcaaagaagataaatatgttggtattgctgcacttaaacgaccgaaaaaatcttataaatcaggcgttttttataaagcaggtttttctgatgaagataagtatgagtacgaaataggctggatttatgtcattgaagaaaatagaaaaaatggatacggtggagtattaatggattccatacaccagtacatatctaataaagcatcaggtaaagcctgctttggaactgttcgagaaaataataccggtatgcaacgcttattcgctaagcatggcttctcaaaggctggccattcatacaacagtgtgagagggaattattccctcgtcctatatgtgcctcatgtgtaa

SEQ ID NO: 195548 - DNA, 324 bp, Klebsiella oxytoca
atgaatacaagtaaccattacaacgatattttttgccgtcgcctgaagcaggctcgtctggcaagtgggctttcccaaaaacgactggggatcgcagcgggtattgatgagttcgtcgccagtacgcgcatcaatcggtatgaaaaaggcgtacatgaaccgggaacggagattgtgcagaaactggccgaggttttacgggtgccgttggcttacttttatgctgaaaatgatgatttggcggagttgatgctagttttctgggcattatccgaatcagaacgtcttgatatcattaactttgcaaagaaaaagattatttga

SEQ ID NO: 195549 - DNA, 276 bp, Klebsiella oxytoca
atgactaaaaaagactggcaccccgccgacatcgttgccgccttacacaagcgcggtaccagtctggcgaaactgtcgcgggaagcgggactggcctcatcaacgctgtcgaatgccttgaaccgcccctggccgaaaggtgaatggctgattgccattgcgctggaaatgcatccatcagcgatctggccggagcgttacctcgacacgggaaataaacgccaacccaaaaaaccgcttcaccccatgacaacaaccgacaactccgggacataa

SEQ ID NO: 195550 - DNA, 1533 bp, Klebsiella oxytoca
atgtcaggatctattaccgaaaaaaggattgctgcacaatatttgcggatgtcgactgagcatcaaaaatattctccagagaaccaacgggagtatttagagaaatatgcgaaagaacataatattattatccagcatacctatgacgatgcggggcgaagtgggctaagcctggataatagacctggcctgcgtgctctgctacatgatgtcgaaagcggaataataaaagtatccttaatcctggtttatgacgtcagtcgctttggccgatttcaggatattgaagaggctgcgcattattcgtggcttttgaagcgcaacggagttcgtattatttattgtgccgaaccgttctctgaagatcagactgaactgttcatgttggggctttcttattcccgctatggcgctgctacctacagtaaaaacctctcggaaaaggtttttcttgggcaggctaaccttgtccggcgaggatatcatcaggggggaatgccaggatatggcatacggcgattactcatcgatgagcatgccaaaccaaaagggcaacttcttcccgggcaaagaaaaagtttgcagaccgaccgggtcatattgattccgggccctgatgacgaagttcaggtggtgaaccggatatacgacatgttcatcgatgatggcaaaccagagcttgttattgcctcagaactaaaccggaagcatatctccgcagaaaatggactacaatggactcgatgcaaaatccatcagatactgaccaatgaaaaatatattggtaacaatgtttataaccgaacctctggccgcctgaaaacccgcagcgtcaggaacccacaggaacagtgggttcgctgcgatggggcgtggcaacccgtggtatcaatagacaaatttgaggcagccaaaagcattattgagtccagggccgtacaatacagcgataatgaattgctggataagttacgtcatctgcttaaaattcggggaaggctttctgggatcatcattgatgaagaggaattattcccatcaagcagtatcttccgatcccggttcggggggctggtgagggcctacagccttatcggatacacccctcagcatgattactcttatcttgaaataaaaaaacagattgctgaacacaacctctctttcattgatactctggtgcaggatatttaccgctacggcggctggggctcgatacaggaagatggttctttatatatcaatgatgaattttccatttctactcatttgattcgatgtcagcgtctgtcgtccggtaaactgcgctggaagattaggttcaatatgttacatcgttacgattgtatgatattccctcggctggatagttccaataataccgtggtcgattattttattttccccgccatagatattttgcatagtgatttaacgcttcatgagaacaatggttttattctcgaactgtaccggtttgacgatttgtcatgtctggaacgtctggttaaacgaaccttgctggagttttaa

SEQ ID NO: 195551 - DNA, 708 bp, Klebsiella oxytoca
atgatgtacagacgggtgaaggacatcgactatcatctcgcgccaggtaccacccggcgtacaacggatatcgttatcgaaagagacggtcaggtcattgttcgcccgccagtacactttactcctgaacaggcggataccgttgtttttcagaaacgcatgtggatttatcgtaacctggctgagtggaaagatcttaatgccactacggtggcgcgtgaatgggtaaacggcgagacctttctctatctggggagcatgtatcgcttatctctggtttccgatcaacatctaccgttactcctgaaagatggacgcttctgccttaatcggcaacttattgaaaaaggcggcatagccgcagcgaaaggcgcgtttgaagacttttatataactaaaggccagcagcgcatcagagaacgcactctgttttttgcgcctaaagtcggagtgaaggcagaaacaatccgggtgaaggaaatgggatatcgctgggccagttgcggtcatagcggtacgctgaatttccactggaaatgtatgatggcccccgcgaagatcctggattacatcgtggtccacgagctatgtcattttcaccatcgtaaccatactgacgctttctggaatgaagtggataaggtgatgcctgactggagagagcgcaaagagtggctgcgtaaacatggcgctagcttagacctgtag

SEQ ID NO: 195552 - DNA, 3267 bp, Klebsiella oxytoca
atgtctgaatacacggaagttgaacagccctttctgcagcaactgcaatcactgggctgggcgattattgaccagggacaggacattccctccgatccggctaaaagtatgcgcagtagcttccgacagtggctgctgccgcagatttttactcacgcagtagcgcacttaaatgccggatcagacggaaaaacatggttaaccgacaaacagttacaggatctgcaagaacagatcctgcgacaacccaaccgtactttactggaagctaatgaggcgatccaaaagttactgtttaaaacacaggtggatattaataatgccaccggtgagtctgaccctatagttaaattaatcgatttcgaacacccggaaaataatcactttctggcgataaaccagttccggattgataccccgggttgcgtaaaacaatttatcattcccgatattgttttatttattaatggtattccgctgattgtcgtggagtgtaaaaaaggtggtccaacctgttctaatccaatggctgaagcatatattcagctcctgcgttatatgaataatcgtaaagcaacagcgctgcagggattaaaagagggggagccacgtttatttcacagcaatttatttgcgatcagaacaacaggcgttgaagcggattacggcacgattacttccggggaagagcatttttatccctggaagacacaatggccgcaggaagacaatgttgccagcgatatgaatgcacagcaacagctaatcaatggcatgttaaataaagcgaatctgttatccatcctgcgtacatgctctgtatttatggataccgatgctggcccgcgcatcaaggttgtctgccgttatcagcaatttcgtgctgctaataagatcttacaacgtttacgtgaaggtaaaactgcagaagaaaaaagtggtgtagtctggcatacccaagggtcgggcaaaagcctgacgatggtttttgttgcccgaatgctgcgtgtttcaaacgatcttcacgattataaaatcatattgatcaacgatcgtctcgatctggaggagcagctaacagcgacggcacaactgatcggtggacgagtcaatgttattgaaagcaacaatacgctacgaaaagaattagccaccaacacttccgatatcaatatggtgatggcgcataagttcctggtcgcgcaggaaagcctccccgtatccgttgctaaagcgctaggaacctaccagactattccaacgggcaaaacatttggcgtagtgaatacctcttcgcgaattgtgttaatgatcgatgaagcacaccgtactcagagttcagatctgggcagtaatatttttgaggccttccccaatgcggcccgcattgccttcaccggaacgccactgattacagaacgccacggtgagaaacgtaccgtcaaacgctttggcgaatatatcgataaatacaaattgatggatgccgttgaagatggcaccacgttgcagatcctttacgaaggcaggactgctgatgccgcgctgaacgataaacatggctttgaaacgcagtttgagaatctctttaaaggtcgaacggaagaagaattagacgctattaagaaaaagtatggcgccacaggcgacattctggaagctgagcaacgtattgccgctatcgcacgcgatatggtgaaacactatctggagcatatttttcctaatggctttaaagctcaggttgtctgccattccaaactggcggcagtccgttaccagaaggctatccatcaggcattaaaagagaaagtggatgagcttgaatctgcagacgtacctgaccacgcattaattaatcggatcaagttcctcaaagctgcggtcgtgatatccagtgatggtaccaacgaagcggcatttattaccgagacacgtaaacaagcccgtgcctggaatgcggtagaaaatttctgtaagccatttgcatttgatgatcctgataaaccttatacaggaatcgccttcctggttgtttgtgacatgttattaaccggttttgatgcaccgattgagcaggtcatgtatctggataaaaaaatccgcgagcatacgttattacaggcaattgcccgtactaacagggtaaaaaaaggtaagcagcgaggctttgttgtggattatataggccttactcaccatcttaccgaggccttaaccctctatgcagccagcgacgagcgccaggagctggccgaaggattaaaaaatatcaattcagaggtcccggtgctgcaggagcgctatcagcgcttgttgagtttattctcgtatcaccaggttaatggcatccatgatttccttgagggacgattacccgacatagcagcagaagtggttgtagtgaacgacgctgtccgtttgctgaaagacgagaagctgcgagcggattttgatgtgtacctgaaaaaattcctcagcagtctggatatcatcctgccgcatagtgcgggccagatttaccgtatcccggcaaagcgtctgggatatatccagcaagtgaccaaagagcgttataaagacgatacgctggatctgggagacgccggacagaaggtacgcgatctgattaatcagcacctcatcagtctggggattaaccctacggttcctcctgttgaattactctcagataacttcattgaacagctaaatcagcatacaaacggcaatgatgaggcgaaagccagcgaaatggagcatgcaattcgtaagcattgcacggttcaccatgatgaagatccagctttttataagagcctttcggaaaaagtggaacaattgatcgacctgtatcaggatcaatggaagaagctggcggaagagttagagaaactgcgtaacgttgcgattaccgggcgccaggatggggaagaggggatgagccgggaggccactacgttttatgaacatattgctcatgaagcgttcccgggcggagagatacccgtgtcagtaaaacccaaaattaaagcgctgatggaagcaattgttgaacttctgcaacaaagcatcggcagcatcgattactggcataacagcagcaaacaaaagaaaacgcgcagtgagatcaaaacggctctgacgctaaccggagttcctgaattaaaacaggcaagagaacgaattgcggtagaaattatgaaactggcaaaaaaccgacatagtgcgttactccagaactcagcggagagcaaaaaaccatga

SEQ ID NO: 195553 - DNA, 1302 bp, Klebsiella oxytoca
atgagtaatcataagatggatctcaaaagaggggcctatactcatttaggccaacttgctgagatcactatggggcaatctcctgagtcttccagttacaatactagccaaaaagggcttccttttcttcaggggtgtgctgagtttgggcgtatatctccaaccgcgaagatatattgtaaccctccgttacgtgtttctaagcctggatccattttaattagtgttagggcccctgtagggacccaaaactggggggatgatagttattgtattggccgaggtttaagtgcaattaaggctcgacaaggtatcgctgacactaaattcttaagctatgctctttcacataatgttgcatttttgcatcgccgtagtcagggttccacatttttagccattggtgcaaatgagttacgtactttccctatacctagttatgatttaaatacacagtgtaagataagcattattttgcagtctgttgaccatgctattgataaaacagaggcattaataaaaaaatataataagataaaaaatggtatgatgtatgatttatttacacgaggccttaataaagacggtagcctacgtgaaagatatgagtcttctccagaactgtatcaagaaactgttgttgggttgattccaaaagaatggtctctgcaacccttaccatcgatttcgacttatcaacatggacgacccttcccttcatcagattatacggatgagggtgtttttttacttcggcctggaaatttggatcagaatggttttattcgttttgacgaagcgcatagcataaaaataccttattattgggagagcttagaaccaaactatattgtaaggtatggtgatatattaatgaacttaactgctcaatcattagatgatgaatttttgggaagagtttgtattaatatggaaaaagtaaagtctatgctcaatcaaaggattgcgagattctcaactaataaaattgatcatgaatttctctattggcttttaagatcaaggcaatttaggaaacaaatagatagaacctcacaaggaactaaagttcaacatctttataatcgtgatttgaatcgcgtgatacttggtgttcctagttgtactgaggagcaaagaaaaattgcagatgcgcttaggaccatttcagagaaaataaaaattgaagaggaatatcttcaaaaattattaaaagataaggtagggttaatgcaagatcttcttactggaaaggtatcagtaaaggtgaataaaaaagatacagaggcctcccatgtctga

SEQ ID NO: 195554 - DNA, 2541 bp, Klebsiella oxytoca
atgaaattaacccttacccagcttgaaacattgctgctccgcgcttgtgatgacctgcgtggcagcatggatgccagtgaatacaaagaatacatttttggtatgttgttcctcaagcgtgccagcgacctgttcgatcagcgtcaggctgaactacgcaagcagtttaaagaacaggggatgtccaaactggacatcgagctggcgcttgaagatcccgataactactcaggaaagtatttctatgtacctccgcgtgcacgctggaacgaagagtgggaagaaattgtagaagagaaggatggcactaaaaaagcggtcattcgaccggccctgaagcatgtgaaagttggggttggcagtgcgttaaataaagcgctggaagcgatcgaagaagccaatatcgatgttttacaggacgtactgaaaggcattaacttcaaccgcaagattggccagcgtactctggatgacgataccctggctgattttgtacagaacttcgagaaaattccgcttaaagatgaggattttgagttccccgatttgctcggggcggcatatgaatggttgattaaattttttgctgactccgcgggtaaaaaggctggagagttttataccccggcggaagtcgtgcggatctgtgttgagatctgcgatcctgaagagggcatgagtgtttatgacccgaccgttggctcgggcggtatgttgattcagatgcgtgactacctgcgtgaaaaaggcggtgatgcggatgaaatcgcgctctacggtcaggaaaagataggcaccacctggtctatctgcaaaatgaacatgctgctgcatggaatttcgcacgctgatattcgtcaggaagacaccctgcgtgaaccacagcatctggatgaaaagggtgaattaagacgttttgaccgcgtggtggctaacccgccattcagccagaactatatcaagaaagacattaaacaccccggacgttttgccgtttggttgccagaaaaaggcaagaaagcggacctgatgtttgttcagcatatgttgtctgtgctgaaacatgatgggcgtatggcgaccgttatgcctcatggagtgttgttccgtagcggtgatgaacgcgaagcgcgtaaatactttatcgatcacggttatctggaagccattattggtttacccagcaacttgttctacggtacggggataccagcctgtattttagtgatgaataaagaaggtgctgcgaaacgtaagtcagttctgtttatcaatgccgatcgtgaatatagcgaagataaagcacagaatcatctgcgtccggaagatattgataagattatcaacgcatatcgtaaggggaaaaacatcccgggttatgcgcgcgttgttccaactgatgagattatcaaagaagattacaactgtaacattcgtcgttacgtggataatgcgccgccgccggaaccccatgatgtacgtgcgcatttacatggcggtattccgctcgcggaaatcgaaagcctgggccatttctggcaaaactatgtgggtttacgtgccgatacttttgctccccgtgatgcagaatatatgaatttttccccgtctctggcggagaagcgtgatattgctgagtttgttaaccaacacgctggtgtattaaaagctaatcaggcgtttatggcgcaactggaagcgtggtgggagcagaatctcccgattgtggaagcgttagcccctgacgctgccaatcagcaggcccggccacgtaatgtttatgtaatgcgtagccagttgatggacagcattcatgacgcatttgcgcagcaaaacttgttaacttccttccaagtgcgcggcgcttttgccagctatgtgaattacctgaaggcggacttcaaatctattgctgccagtggctggggagctgaactgatcccggatgaggatattctgcaaagccagttccctgaggtactggaagagcaggctaatgcacaggcccgtttagccgagctgcaggcgttatttgccgcggcggaagacgaggactttgaagataccgatgatactggtgtgatgacctctgagcaggtgaaagagctaaaagcaaagttgaaagatgctaaaggcatggtgaaactgtgcaaacgcgatccgggactggggagtagcgaagagtaccaagaaaaagtcacacaaatcgaagcacagttgaaacgccataaggtgctggaagatgaagctaaagaactgaaaaaggttattaaggcaattgtgagtaagcgtgatgaattggttttaagcgctcgtgaaaaaatctcacaggatgaggctcgtgtggttattgttgcccgacttaagcagctattactaaatacctataatcgctatttacacgcagagcaacgtgcctgtatcactgcaattgaaaatctgtggaataaatatgcggtgacagctaaagaaatagaagttgcaagaaataaagcgacagaaaagttgaaaatgttcttggaggagttgggatatgagtaa

SEQ ID NO: 195555 - DNA, 873 bp, Klebsiella oxytoca
atgatatctctcgaaacactgcaatcggccatctccaacgtttctgtgtggcgtcagggtgacgtatgcgcgccgcataaaccgctgctgctgttgtacgtactgtcgcagtacaaagcaggccatccacgcctgtttaactacggcttggagatccacgaaccgcttactcgcctgctgaaagagtttggccccaagcgacgcaccgactatcccaatatgccgttctggcggctgcgaacagacggcttctgggagatcgctcacgcagaaggttgcaaaccgcgcaagggcaatactcagccgacaaagaaagaactgattgataaccaggtggcgggcggcttcgatgaagcggcttaccagcaattgctggcacatccagagatgatcgaccaactggctcagaagatcctcaccgatcgcttcccggaaagtattcagcggatcctggccaaccaactgggattcgattttatcgatcgctccaggaaccgcgatccgcgtttcagggatatcgttcttcgcgcttaccactcacggtgcgcgttctgtggttacgatctcagactcgatggcgcgctggttggtattgaagcggcgcatattcactggaaagcgtacggtggcccgtgcgtggtaaacaatggcctggcgctctgtacgttgcaccacgatgcgtttgatatgggggcattcgggctggatgagagtatgaccatccgcatctccggcggcgtcagtcgtagcccggtggtagaccatctgttctggcaccgggacggccagcagttattcctcccttatgacaaaacgcagtggcctgctgaacagtatgttggctggcaccgtaaacagattttcaaagcctga

SEQ ID NO: 195556 - DNA, 3864 bp, Klebsiella oxytoca
atgactcaactgccgaatgatagtcaaagccaggaaattggtagattggcacaacgtgcactttcaacaaaaataccgcgagcatggatagaaaccccaatgtccggtgattctgattatggcattgattatcaaattcaattaaaaaatccacaggagcaagttgaatttagtttttatcttcaattgaaaggaacaactaacccttcatttaactctgatggtaccttaagcttcgcatttagatgctcaacattaaatttttaccactctcaagaaccgttagtgatggttgcagttgtaaaccttaaagataatatggatgaggtatataattgccctatatattatctatggctcgacgatgaatggtttaaaatttacgaagagaagctaaaaacacaggagtccattactctccgaattccaacaggtcagttattaacaacaaagttagatgtttatgatttctatagaaatagattccaagagcgaatggcactaactgatttgagccatgaaataaaaccgcatactgaagacatcattgaaactatcagtcatattaaaaatacaattacagataagccattttttttaaaggcgatagaacatagcggtgatgaaccttggattgagaatccagaagggtactaccctactgagctgaaacgaattgaaatccatcaaaacaacaatagattaagctctgccagaagaataatagaagatttagaacgtaatttggactcaatggattctcacgaaatagcagagttatggtatcaaaaagctaatttaatgttgcttttagataagtcagaggagtctcttgggttatataaagatgcaaggaatctatctgggaaaataagatacgtagtggcttatctcgaggcgatattaagatttcaaccatctcagcaagctcggaatatacttgccagtctcgaagcatatcccaataacgataaaaggattgtctttcttaaagctaagtgcatggctctaatcggttgcgcgaaagaagcaattgttctgatatgtgataatcatcctgattatattgccgcaaagttgatagtttatactattatagatgacaaagttcaattagatagtttgattgatacgatagatattgaatcattaaaatctgttcgagaaaaactctttattcacttcttggccggaagaagagcttatcttaaagctaataatgaagttatacaatatgatgaaataattccaatttctggcttacctggtgctgatttaactctgatgcaaaaatcctataggcattacagacaagcttgggatttaacagaggaacttggataccctcaggactttactctcttactagatattagtccattagtatttacttacttcaacaatatgcaagagctttttaggcattttgataatattctcaaagaaagacctgagcattctgaagttattcatgtttattctaggttggtttttaataagcaagattataaaaaagctataattttattgagaaataaaaaatgtgaacttgaattggatgaccaggtattactttttttatcatattataatattaaaaaatatccagaagcatttgatgtatttaaagatatagctgatgaagtcttgaattcaaaaataaataataaatctagcttgttttatgtcgcttctagggttgcaaaggaattgtttgaagttgatgcttccgaatattatatgtctcgcgttaaaatgtttcctgatgcagacgctgtaatagcactatcggagttcatagatagtacagagaaagataagtcaaatataggtctaagcctagatatgttgtatcgaaaatacattgagctaggtagaccactttttctggctgagcagttaataaataacttacaggtgaatacaagcgaagatgctgataagtttatagatgttgcaaccacaattaccaaacatcacgaacttaatgaatatgataattttcattatgccaactcattaataactaaatgtgattacgaaagagcattagtgataataaacaaatccttgcaaaaggagcatattgatcctaattggcatttgcttaaggcgttagctcttcataacaatggagagcccggcttagccattgactgcattggtaaagtgttgcaaaactcacagctgtctcatgatactcttaaaatgtacatccagctttgtatacagtttggaatggcaaatgaagttgaaaaaacaattattgaggtaatatctaaaagtaatgatgtctctataaaagttaggttcttgattcaattatttaatatttatagtaaggatgaagagaacaaagataaaagattgccggttctacgtcaaatcggaaagcatgtaaatcaggatgattgtgatgaagagggtagttttttaatgctaatgttaacatcccaacggactgacgatgaactagagttcgctgaatggcaacaacgcttgattaattatacaacaaaattccccgattcagctcgattaaaacgagctgaaataaatcctgatgcaccagcagaagaacttcttgaaactttgaataaattagcaggagttacccctgaaaaaattcagtggtgggaaaacaacaaactgcagattcgtaatggttcattaagagtaccattcgccatgcgtggatatttcttgaaggatacgcgtgatatctttactacatggtcgttatctaagttcacatcagaggaaagtcttgagttcaaaattcgccatgccggttttagtccgcaacctgattttgacactcttgttgatgatgcttctactttcatatttgaagaaacaaccttgttgattttgtctgaattgaatattttagaccagttttttagtaagttgaaacgatttgctcttctaagtacttctttcaaaaatattagtacacatgctcacagctatatgaagtctgatacttcaaatgttgctgaaaaaataatgtcagcaattaataatcatcgaaataaacttaagttattagattgtcatggcaagaatatcattgatgattatacaagtgcagtaatagataaaggctatgttttattgtcagatgatattgatatgcaaagttttgttcttgctgctacaactaaaaaaatatctgcaaatagtgttaatgtgatattatttcttatggggcgtgatattttaacacaaggtggtgcttacgatctcatagctaaattatgtgatttaggtatttatcaaccaaacatgagcattcagctattatcagatatctattattactattttttacaatgtggtggtgataatattttcagtacgaattttactaaagtatacgatagtatattctcgtcattgcacactacaaccaatgcagcatctgttcttattcacatgctagttaatgcttctgcttttgaaaaaccattgccaacccctaatgttttgcaaattttgttacgcacgcttatagagcgtaatccattcacatcactagacaggttcgtaactatttggttcattcaacaatgtacttttagtttgagtgaaaatgctgaagatatcagcgtgcactcaagtgaattgagtgttaaaatatttggattgtataaagaagtcatgtgtgacattgatcaggcttatgacgatgaagataaaataatatcatcaattattgattcactaaaaagtgttgataaagaaaaacgttctcaaatcttcactgcggtaaaaagatgttttaagcctcttacgcactctgctcttacactacaaagcaaataccaatctatgaaatttaatgatcaatatttcttttga

SEQ ID NO: 195557 - DNA, 933 bp, Klebsiella oxytoca
atgggggaagtattcccggctggcggcgtaaacgccttagccgggctacacagcccgcaggccgcacacccccgtagccctgctaagcgcggcgcgagccggggagaagccgcgtcgacgcataaatcccggggtatccccgggttgcggcgtaaacgccttacccgggctacagcccgcagaccgcacacacccgtagcccggctaagcgcagcgcgagccggggagaaaccgcatcgatgtatgaatcccggggtatccccgggttgcggcgtaaacgccttacccgggctacacagcccgcagaccgcacaaccccgtagcccggctaagcgcagcgcgagccggggggaaaccgcgtcgatgtataaatcccggagtatccccgggttgcggcgtaaacgccttacccgggctaccgcccgcagaccgcacaaccccgtagcccggctaagcgcagcgcgagccggggggaaaccgcgtcgatatatatatcccggggtatccccgggttgcggcgtaaacgccttacccgggctaccgcccgcagactgcacaccccgtagcccggctaagcgcagcgcgagccggggggcaaccgcgtcgatgtataaatcccggagtatccccgggttgcggcgtaaacgccttacccgggctaccgcccgcagaccgcacaaccccgtagcccggctaagcgcagcgcgagccggggggaaaccgcgtcgatatatatatcccggggtatccccgggttgcggcgtaaacgccttacccgggctaccgcccgcagactgcacaccccgtagcccggctaagcgcagcgcgagccggggggcaaccgcgtcgatgtataaatcccggggtatccccgggttgcggcgtaaacgccttagccgggctacacagcccgcagaccgcacaaccctgtag

SEQ ID NO: 195558 - DNA, 1056 bp, Klebsiella oxytoca
atgaaaaattttgattccaggacttatagtatcaatgattttatggagtggaatgaaagcgatcagttggttttatcgcctaaatttcaacgaaaagaagtatggagcgaaaaagcaaagtcatacctaatcgatactataattagagggaaacccatacctaaggttttcattagacagatactcaatgctatgagcaggaaaaccacacgtgaagtggtggatggtcaacagaggctcagagctattatatcatttatgaatgatggttttgttataagcaaaactcataataaaaaatttggtggtctttacttctcacagttatcaagcgtggatcctgacatccaaaatgaattattaaattatgaaatatctgtggatttattaactaacatgtccgatggcgacgttttggatatatttgcgcgattaaattcctatgctgtaccgttaaatgaacaagaaaaaatacacgctagacactttagcttatttaagctaatggttgaagaaacagcacatgaattgcatgatttctgggtgggaaataaaatcatctccaaccctaagatcctaagaatggaagatgtagcgctttgctcagaactttatatcgcaatgcttgatggtattcaaactaaaaaagccgtatccaaatactatgaaaaatatgaaaaagatgatattgacgaaactcaatttctagatttgaaaacacaattcttcaacgtaattgacttaacatgtgaaatcttccaagataatttaaaaaatagtaatttcaaacgaattcatgttttttactccttatttctaacattgtatcaccttttatatggattgaaagatctaccacagccaccacagatagatttatctagaatcaaacgaattgagaataatctttctcatgtagattctctatttgacgatgctactgaagttaatagcgatgaagatattcagtttattaatgattgtcgaagagctacaacagataaagctgtaaggattagacgcagcctgtatttagctaatataatcaataggtag

SEQ ID NO: 195559 - DNA, 615 bp, Klebsiella oxytoca
atggaactcaatgcttgctatgatgaactcacaaagggttttgcttttgttaatcgcactattacgctagcaaatactcgatttaataacactgaagactctgatgtcaataattttattatcgaatcttcattcctaaaaatgtttattttttgggaagagttcttagagaaaagtttcttaagctatctaaattcagaaactttattacaatcacccctacctatactttatgtgtcaccagttgatgcagaacatgcaggcaagatacttatcggaactcaaaaatacgtagattgggctaatcatgaaattgtaaaaaggctagctaatttatacatggaaaatggtacgccgtaccaaacagcattagattctatttcattagatttatcagatttaaaaaacatccgaaatagagctgcgcatagttcttcgaccacagaacaaaaataccttgcagttcaacgccgagttctaaaaaaaccgaactccaacttaaatattagtaattttctaatgcatagccatccaacaatagcaggaaaaaacattctcgaatattatcaagaaacattgaccgccgcagcgcataatatagcaaactgcacttga

SEQ ID NO: 195560 - DNA, 141 bp, Klebsiella oxytoca
atgacatggcccaatgtaacgattaatcagctgaatcagcgccagggaaagattaatgaggttgaacgcaccgttttattcgtcggcacctacgactttgggcccctttcactgacggatgcgctggaaaccgatgaataa

SEQ ID NO: 195561 - DNA, 168 bp, Klebsiella oxytoca
atgcgtgatctgatccttcaactcagcaaaagttcgatttattcaacaaagcctaccggcggctataactaccacggcaagcatgagtttgtgacgcttgaaggcatggagaaggcggtgcaggtgattgtacgtattgcggagctgacggcgaaacgaggcgcatga

SEQ ID NO: 195562 - DNA, 2271 bp, Klebsiella oxytoca
atgtgtactcatcagatgctcaccgatacaaagctaaaaaaagcgcttggaaagaaacgtgacgaaattgaagtgctgtccgactcccatggtctaaacgtcaggatcagcaaggctggaaaaatcaccttcttctatcgctaccgctggcaaggtaaaccagtaaaaatcaatgtcggtgattatcctgcaatgagtatcgcccaggcaagagaacgccgacagcaattcagagcatggcttactgagggaaatgaccctcgcgagcaagccaagctggagcggatgagtcgacaggatgccctgtcagcagaggaagcttttaattactggatagagaggcactgtattgctaacaacctgactaatacgacctattaccagtcagtgtttgcaaagcacatatcagcgcagatgaagggggttaacctggtagcacaggatgatggcggggtagtgcgtatcattgagaagtccagcccgtggctgggcggcagtattaccgcatcatcacttcctgtttccgtattcggggatagtccggttttcaccgatggtaccgcatccagcggcggcagcccggcgatcaccgccaatgtcacccttgcttatggcagtgctggcggtgcggcattttccggcgttcctgaagggacacagcggctgtcgctggcgcaccggggaaatgaataccgtattgcctcagcagatggtacgaccgcgacggtacagcgcatgattaacggaggcattgatcctacctggcctgggttctcacccaggacgatgattgattacaaggcgaccgggattaacgacaacaatagctggatggggccgtttctcgcctgcccggataatgaggtggtcaatgcatttgaagtgaatttttcattcccttccggcatttgcggctttgacaacaaaggtaagaagcgcgtcaggcactgtgaatgggaaatccagtatcgggtgtatggttccggtaccgggtggataagccggcagggtgtttacgaaatgaagaacataaatgccctggggttcactgagcgctttgaactggctacccctggtctggttgaggtgcggtgccgccggcgcaatgagcaggggagtaataatgcgcgtgattcgatgtactggcaggcgctgcgtgggaggctactggcgcgaccttcttcttatgccggtgtcaccctcatgggggcaacggtcgagacaggcggaaaacttgcggcgcagtcagatcgacgtgtaaacgttgtgtccacgcgtatttatgataccggcgccccgcggcgcatctccagcgcgctgtttcatgttggtaattctcttggcctggcaatggacaccgaagccattaacaccctcgaggcaacctactggactccgaaaaatgagtatttcgacttcgcgacaggcgacagtgtctccgcgctggaaatgctgcagaagatcaccacggcggggaaatcgtacttcctgctgagtgacgggctcgcatctgtaggcagggaagggattaagaactggtccggcattatcagtccgcatgaaatgaccgaagagttacagaccaccttctcggcgccgtccgccgatgattacgatggtgtggatgtcacttatatcaatggcacgacgtggtcagaagaaacggtgcaatgccggactcctgataaccccacaccgaggaaaattgagagttataccctcgatggggtgcttgacccgaaccgcgcctatcaaatcggcatgcgccgcctgatgaaatacctctatcagcggctggggcataacacgacaacagaactggatgcgctggtctatcagtatggcgatcgcattctgctgacggatgacattccgggaaataaaacggtaagtagcctggttatggatatggtcacatctggcggtcaaacggtatttaccgtctccgagccgctggactggtcctttgaaaacccgcgcgcaattctgcgttaccaggatggttcggcctccgggttgctggtggccaccttcgttggtgattatcagttatccgttccgtggcaggctgcttttgatgaaatccagctaaatgatccgagcatcgaaccgccgcggctggtgttctgcagctcaacgcgcagtgtttatgacgccatttttgaggagattgccccgcaggcggacggaacctgccaggtgacgacaagacaatacagcgacattttctaccagtacgacgacgctaactaccccggcagcgtctcttaa

SEQ ID NO: 195563 - DNA, 2961 bp, Klebsiella oxytoca
atggcctatgttccacccgtggggcaaaccactgaccccgatatttttctggataacgtcaagctggccgatcggttggttaacgggcccgaatccactattcccgatcgagggggcgttcccctggactcctggcgccagatgatggcgaaaaatgatgaggtgcgccgcaatatcatcccgctgagccgccagtacatgacacttgaagcggcccaggccgatatcgcgaatatccccgaggggtcaacgacctatgtgagaagcccaggaactatagccctggcatttgaagtgattaataatgggggagttcttgaaccaacatacagagcaatgccgtcttccgcgctggttgatgagatcgacaaacgaacccggtcattacaggaatcacctgattcgctgtttgatattgttaccagcaacggtattcgccctttccgtatcagaagtactgacggtgtcactgaatttgaatctgttgcaaggctgatcacaggcgattacggactgagcttcaatggaagcgccattgacaacaacgcgccggatggctggttattcctgatttattcccgtaacggtctggtgattgccggggttaaggaagacgggactaaagttggctggggcggtagtgacagcggcggcggacaggctggcgggattacccccggtgatacggcggtgggttatgacgatattcgtaactacactggcgacgccacggttcgtgatgttgtgggagagcgcatcagtggccggttcgttgtcgatgcttccgatacgacttcacccgatgataacggcggcgtgctggttggtacggatgggcgccgctggatccgccagtgtgcctttgtctcttatgacatgttcggcgcgtcccgcatccccgagtcggtctatcagaattatgccacgctgtctgcgcagggtaatgagtcagcggcgcaggcattgctggctgatatcgagccggcggatcaggccattgcccgttgccatgcctttgcggcaaagcatgctatcccggttgttcagaatgtcgggcggttcctgtgggtgagcggcgaaattgtggtgaggacgtctgcttatcttagcggttctacaatcgtcacctgcaatcgcagcggaacggatgaaacccgctgggggaaagtggatggtgtggatgatggcgcccctgacccgatgtatatgttccgcatccagggcaaggctcgcgttaacttcaccgcggctgaactgaacgaactcaattcctcttattcgtcctatctgaagcgcgggagcatggatatcccgatgccgaagttaagccagtaccggggcgggttgtttggttttatttcttcatccgtcgagctgtaccgcggcggggataaaacgaacgtccgtaaccaggtccatttccgggacttcacccgcatcggtcgtaatggcgcggtttctgatgtactggtgaaaaatatcccggcgggcaccatcacggaagcctggatccagccgaaagaaaatgcctggcttaactttgagcctccggcattctttgaggcaggcaacggtcgcaaattcgtgaatattcaggttgagcgctcgcaggtcaacattgaaaatctggtgatggataactgggcgactggcgatatcgagtcccgcgtggcgatcggttcgtatggtgtgacagatattcactgccgtaacgcagctgctgaatgtattccttccacttccggcggcgcgtatgtgatttgcttccgcaacagcatcgatattcacgtcagcggatattacggtctgtacggctggggattccaggggcatcacgggttaaagcgggtattcatcaccgaatcggtcatgaatcggtttgactttcactcgttcggctatgacgtctacatcaaccggacgaagttcaagggacggcagatattcctgcagggcggtggccagttcgcacttcgtgactgtgacttcaatatcacgcagtacagtctggagcaatccgggcatatcgaggaccgtctgaacttctttatcaatatgagggaggattacgccggggactgcgagtgcaacctggctatcgacggtctggtggtgcgctttgaccgcaatatcaccagcgcctgggcatctgacgtgctgtcgtttgatattgtccgcatgaacagcgggacttcggttgattatggtgtgtcgaccaaaaccccgcatgttatttccgggaaagatatcgtcttcgacctggatggtgtgccggcttcgttaccggataacttcgcgttcaccttctgccggccgttccgtaacctctacaactccgcccagaaaacatatctgccggatatggtgaaagtccagggtatgaccgctattaacgttcctgacggtaagaatgcggtgatggcggtgtttcgctgcggagccgacatggcacagaacccgttcgccagccggactaaactccgcccgaacgggacgaacgctgaaatcatcgcagaggatgttatcagcatcatcaataacccggttattgcacaaaacgcgtgtccgaccgtctatatgccaggtgacgcaagcgcatgggataccgttgtcggcggcacgacgtaccgcaccagcgaatactcataccgcccgaaagtgacactgcgcaactgctatccgtccattatcaacgccacgggcgtcaaagcggaattcgatatttccggggggttactggcgcgctacagcgtcggggacaccggcaaccgctgccgggtaacaggcgcggatattcagctcattcctgactcaacaggggctctttatttcgatgcttcaagtgtcagggcgacgggctgcgactggttcgacccgatgaacggagcgacctacgtcggcatcctgaacggtaccggcaatgaaaaccgtggcactacagaacattcacccaatatttaa

SEQ ID NO: 195564 - DNA, 729 bp, Klebsiella oxytoca
atggctggcacacgcatcctctgtaaggacattatctctgtcaccgactggaaccacgaatacgtgaccatcaaatcaaaactggaaagcaaatcaccattaccgacgctcgccagtttcgacctgctgaatccgctggataacagcgggcatggctataccgtcaaaccaaacggcggtcaaatccgcgactggggactgcattaccctaacggtgcaaaaccgtcagagaccaacctggtgaagacgggtcagggtgccgtatcgttcattgtggcatttaagctggatgccattaaccgctatatcaacatcatcagcaaccgtttgaatagcgctggctttaacttctattacagcggcggcttctacatgtcctatatctacccgagcggaacgccgggaactattgccgccggaggggtgatcaccgctgaagtcggcaaatggtatgtagctgtgggtgtatttgacccagtcaataaaacggccagtgtcagaattagtgatgccggacttcagtatggaactattggcagcggattccctggtaacacttcgctcgatgctgcagtcagtatcggtggtgaccctggcggtctaaccacctcatcgatgcatggtgatattgccttcaacgcctactatgacggcgcattcactgcagatcagcgtgatgcaatggtgagcgtcggtactgacattctcaatgagagagggcttctctaa

SEQ ID NO: 195565 - DNA, 753 bp, Klebsiella oxytoca
atgtcaataacttctatttatatcgacggaaaattgcccgttattcctggtatgaaaacgctggatgactttactgtgaaaaactggttccctgattttccgacaacagatggtgtaccatacgcaggctattatttcggtccgcagactcatgacattaccttaaactcattcgataatacgatccctctaagcgtagtcgggtccgttaacaacgattcaggattcgtcactgtaggtactgataactatttaaacactcacgaaaaggcgcccgttgctgtaacagtagctgcatgctttatcaggccgaccacacccgccgcaaattcctggtttctggctgattttgcaggttctggtctcggctccactggctgggccatcggcattggcgcaaatggacgtctcagaatagcagcacaggtagcagaacagaccaatgcggcagctgctgaacttgacttcccggtttccgttcccgtcggtagcttatgtgcgatcaccgcgtttatccgacaagggacaatcactatcaccgtttatgatccctctctacaaaactatgtttccagcgctacaccgcttccaggtacccgtgtggcagggattaatgatattttaattggtcgtaaaattgacaacaatacgtcgaccgctacaacaaatattcgtgcagttgtgttgataaacggttctatgacaacaacccagcatgtagcggttcaacagtatttgcttgcaatgacttga

SEQ ID NO: 195566 - DNA, 1728 bp, Klebsiella oxytoca
atggctgcagatctgaatccgccgctgggtacgacgacacctgaaatattcatggataacgtcaagcgggccgatcggttagtgaacggtccggctggaacggttaacgatcgcggcggggaaccgctcgatacatggcgccagatgatggcgaagaatgatgaaatccggcagaacatcattccgctgaataagcagtaccagacgctggcagcggcgcaggccgatatcgccaacatcccggaaggcagcacgacttatgtgcgtagccccgatgataaacgtcttgctattgagtacgagaatgtgtctggagtattaacaccaaccggccggacaatgctgtctgagcagggcgttgatgacaaaattaacgccagacttatccctggaaactatcggccagaaatggttccattatttcacgataaaaatgatcatgttcctttgtggttggttaatagtctcttagatgcggcggggttcgggcctcagctcagtgaagctgtggcagcaatacctaaccttctggttagcaagatgatcaaccagctcgattataacacttacttgtttcctctgatttatgacaaggatggtaatgttcccttctggttggataatggaaaaatagacgcagcaggattcgggccaactcttcaggcaattattagtgctgccggtggtgctgacccaaagtatatcgaaggggatatattcaaattccttttcaaaaaaggccaggttgttaattccgctgcatccagtgtcaatgtagcgttcacaggagactcgtggacggaaaaaaatactatccctaaatcgctgatcagcatgctgggtggtgtgtataaagatcctggatggattagcgcttcaacccgagctgatgccgtaatggcagggattacgcttacctctactgggttcaccatctacgatggcgacaacgagcacaacaatgcgccaccgacttacggctgcggtcctgacgggaacgcaatgtataacacaggcactgtaggtacgatgacctggtctggcgtgaaagcaaccgatctctctctgttttactacgacggcaccggaagctttaatctcattgttgatggcgtgaccatcgcaacgattaacggaacaaacacaggacagggtaaaaagtatgacctatccggactggcatccgcatcccatactgtgcggatcacaacggttgggaatggtgtggtttcaatctttggtatgtatggtaaggattccggagtggcatttggtgtgacgatttctcgtatgggaaatggtgcatcaacggcaggagactacttgaactggacgaactggataaaacctaccgctcagtatctggatatcgatctgttatttatcatcctcgggacaaatgacttcaggaagagcaagggactggatcagtatcgtgagggtatcacggagatcattacccagtaccagcaagcgatacccggcgtatgtatttgcctgatttctccagcgcagtcaaatgcgacaggggttcctgcgttgtctgattatgataatgaaatgcgcgatatcgctattgaaacgaactccagctatatcagtggctataaaatcttcccaaaaacctacagcaattctaacggtgcctgggaagatactttacatctgagcaatttaggcgcgtatgtcctgaccaaaaccattaaaaacaatttttttgaggaataa

SEQ ID NO: 195567 - DNA, 1104 bp, Klebsiella oxytoca
atgtctaatgatgatgatgatgttgcaccctacgtttctgaagcacttgaactcagtcaggatgtgcaagcactaatgaataatggtcttgattttctggataaagcgcgagaagagttagaagcctcaaagcccaagttctccgttgtcagtttttggactgctgtcgagattttactgaaggtacccttggcgtacgaacattggtcgttggtctgcagcccaaaaaagccaataaaaaagcaggcctacttggctggtgattttcagtcgctgacatatgaagaaactcgtgaaagacttagggatgtgcttgaacaacctttagacagagaaacagacggcgcttttgataaagtcagaaagcaccgcaaccgcgtagttcatttctaccacccaactttcaccgaggccgaacagaatcaaatccttaaagaacaagctgacgcttggtttgctttgaatcggttactaagggatgaatggaaggttctcttcggtgccaaacataattggaagctagctttgggtgaaacacgtctgataagggggaacgagttttacgccaaagtgcgacttaagcaggttagttctgaactcaaacaactcgctgaaaaaaatgtttacatcagtatatgcagtgaatgccatcaacattcgatggtaacagagacggaagtgagcgggaatgaaaacactacgcttgaaattatcaggtgtaaagtttgttcaaatgttgtacggcaaattaatttgacttgtccggattgtgaacaaactcaattattcccagagggagatgacaattttgaatgcgaaaaatgcggttgcaatgtgggtagatatgaacttcttgatggagaagaattctatagcatagatgaacaaatgatttccgcattcccagctggatgcaccaactgcatgtcacctgaaagcgtatgcaaatttggtgagggctatctttgcacgaagtgtttcttctattataacgagctccatgtatgcaattgctgcgatcatctgagtgattatgtaccaaaatttagccatatccgaggatgtgaattttgcgatggtgaccaacgttatattgatgactga

SEQ ID NO: 195568 - DNA, 747 bp, Klebsiella oxytoca
atgccgataccagctgttttcattgattcagacttgccggaaaccccgggaatgaaagatattgacgattttatcgtaaaaaactggtttacagacttccctgctgtcgacggaacaaaactgggtgggtattacttcggaaatcccgtaagtaatctggcgatgaactcatttaacaatgcagcacctgcgacattgaatggatcattcgataactcacagggttatattaacgttgatgttaataactatctcgacacaacacttaaagcgcctgttgccctaaaagttctggcggtcatcaaacgacctgcgaatccctctgttgcgacttattttatttctgatttttccggcactggtaccactggcgttggttttggtctcggcattgccacggacgggaagctgagaatggttggtcagaacgacgctaccactgcggttgcatcggtggatttcccttcttcagttgctgttggtgacctgtgcgcgatagctgcacacgttatccagggcgcggtttatgttgcaatctacaatcctgctactgaatcctatgtagcaggaaataccactctgtcaggaacacgctcagcaggtaccaaaaacatccttattggcaggaaaactgataacaatacctcaaccgcttcaacggcaatcaagtctgcagtgttgataaacggcgagatcacaggagctcagcagcttgcggcaatgcaatacatgctggccatggattag

SEQ ID NO: 195569 - DNA, 420 bp, Klebsiella oxytoca
atggcaaaagactatttgcactggcaggactatattaccccgattgttactcactttgacctcgatttattttttatgattcttggtaccaacgatttcaggaaaagcgcgggtatcgctgagtttgtcaatgggctacaggtggttatcgataaatacaaggcggccacgccgggaatttgtatttgcctggtttctgcggcgcagagcaatgcaacaggaacgcctgccttatctgaatatgatgaagccatgcgtacgctggccatcgagaataacgttaattttatcagcctctaccagttgtttccaaagacgtacgataactccggtggcgcatgggctgacgcattgcacctgtcagaccgtggcgcatatgtactggcgcgtaaaatcaaaaacgaatttttccaggagtaa

SEQ ID NO: 195570 - DNA, 771 bp, Klebsiella oxytoca
atgagttcagataacacatgggaccttatttctgagtatgcaaaacataatgataaaattgaactatgggggcgttacggcgggcgcttttacttagcgcttaggcaagttatttttaaagattataaaaacaatgcatcggaaggtgattggtggtgtaggctggatggtgatgaattttatattgatgaccctaggcttttcttggctggtcttgatgataaaaccgaccatgtttataatgcatcttttcaatactactacacggaagatgattatagggaggaactatctgccgacaacgttgtgcttccaacagagcgtttaaaatggtataaatgtaatcattcagagataaggtttatcaaacataaaaaatttacttgttggccacaaaatagtgagtggccatgtgatctagttcgaccaactaaatccagaattcggcttaaacattatcaatatcgaagtttacagcaaatatcttcacgcttacttttaagaaatgcttctgattctggctcttcttttacacatgaaaagctttctattaaggaatggtactctagacgtaaatttacaatgcccgataatccagaattagcaaattatcgtgtagtccagaaaactgaattagataacagtaaagattttattatagatgatgcagtactttatcctattaagatggtaagcgttaaaaaatatttaagatcatttatttcctatttatatatgaagtttttaaatcgctttttgttcaagatttag

SEQ ID NO: 195571 - DNA, 915 bp, Klebsiella oxytoca
atgtttaaaaatatagttactctagttttaactctatattccataaatagtttttcggcacaagaaatttggttttctcctaataaatcaaatgatgttgccaatcctacttctataacttcatgggaaaattcaagaaaaaaaatatctgtatattcattttactatcaagtaatccttcaatccacaccagagaaccttaaaaggaaactgaccttcctacgccaaaatggaataaaaatagcaattgagtttcctggtctaacatgggttgaaaatggtgtaggttacagaatcgaagggtttcaaaaagaaggcttcagcaaaaaaatcattgcaaagttccaaagcatttccgagaaacccgattacataattttagatgagccgttctactttggacatgtaaagaaaggtagtaattatccatcgtacgatcagctcacacttgcagaaaaaattaaagaaaacattgatccattatataaagtatttcctgaaatcaaagttggggaggttgaacctataaataaagtttatcatgaaagttcagacttctcacaatggcccaatacattctacgaagtcaccggaaagaatattgcgttcattcacgctgatgtaacttggggaaaagagtggagaaaacctctcaagttccttgcaaatatggcggataaaaacaaatttagatatggtgtaatttttaattcaagtgatgctaaagcatccgaagataaatggatgaatagcgttagagacaatattacaaaatatgtaaattcagatataccggcagcccaaaatataatttttcaaagttggaataaaaaccctcaaattatttttgaagatgcaaaccccaatgcatttagcagcgctattttatactattcaaataaaatgaaatactaa

SEQ ID NO: 195572 - DNA, 1263 bp, Klebsiella oxytoca
ttgaatcgtaagataatttttaattccttatggatgatgtcagaaaagatcgtatccatatttggcttgatttttgttacatcatttgttgcaaaatatgttggtcctgatatatttggtaatattgcactcgctctatctatattccagcttattcagctagcatctcaattagggtctgatgtcttaatctttaaaagattgagtcgaaacaagaagtctggtatcaatctcattaatgtcaccagtcgtatcaggatgattgtatatatggcattatcagtccctgtactaatattcaattatttttacatggattctaatagcttcttttacgtagttgcagcatttatcgcttgttttatacaagctatggatgtttactctatctattatgatgccactttaaactcaaaaataaacacgttcgtcaatatttttggtttaatagtgtctttgttatttagatggtacatagcttttatgatgcttaatccactatggttatgtttaccaattatggtggctcccttagtatctatgtctattcgtctattttatttttcacgttcaacaagtagtcaggttatatctaaaaagtttaaaaagaaatatgttaaatatatgttgggggctggctcaagcctcgtcatatcttctttatccgttgcgatttatactcgattgtctcttttaacattgggggcaattgatgggaaagccgcggttggtatatattctgtagctgcctcattagccacgtcatggtcttttatattaaattcattaataacatctacattgccctctattttttctgaattagatgaaaataaagcgataaagaaaacagccaagttgaatttgattgtcgttctggtctctgtacctgtaatcttgggagtcttcattttagggtctttttttattaattatttctatggggttgcttatttagcatcttatacaccattaaatatattaacattttcaacgatgcttggtgcgttaggtacagtttctgctcgatatattgcaaagcatgccggctattcttttctgtcaaagaaaatgttacttgttgctctttttagccttattgtcaatataatatttatataccaatatggtataattggagctgcagttgctaatgtattaactcaactattatctctcacactgtttaattatttttttaaacgtggacttatattgcggttgcatatggctactctcttattttggcgaggacggtattga

SEQ ID NO: 195573 - DNA, 999 bp, Klebsiella oxytoca
atgcagagaaatataattgttgatgcgatgaggatattagggttgttattaataatattagctcatgtccagccaccatctatagtttttcaattgagaactttcgatgttcctatgatggtttttgtatcaggtatggcatattactgctcaggtaaagttggggttaaattcataccgtattcaatttcaaggtttacaagattagtatttcctgtttgggtttttcttttgatttttttcgcatgtatttttatatttaagccattgtattttttagaccttctcactcttaaaaatatggtttcaacctttcttttgggcggctttggatatgtttggattattaaggtttttttaataatcgctatttgttctccattgtatgtacgttttgtacagaataaaaatggatatagtgtcgcttttattacattagcgatgttgctttttagtttcattatttttcaaatatctctgagttttcacaatcgttttcttgctcattttctctcagatttgttctttcctgccattgtttatggtgcagtgttcatattgggttataaagttttatcttttaatttaaaggaaagtaaatttatatttgttctttatctgataacttttgtgatatgttttgtttctgcttattttatttttgggaagtttgtagggccacaatattttaagtacccgccatcgatcttctatatttcatattcattagttgctatctttttagtaaagtggttttttgagctgactataaatacttgcaatcttccttttgtatttaagtttatatcatcaaataccatctggatttatttgtggcatatacctattgtggaatattttcaccgatacaatgtggacgttaatttcatatttaaatatgccatcgctgtcgtactcccagtggccatcacattgattcaggttttttgggttaaaaaaactggaagtgcaacgctaaataaaatttttactggatga

SEQ ID NO: 195574 - DNA, 996 bp, Klebsiella oxytoca
atgtttccagtcggcattgacgtaagtaaaaacaccctggatctttgcatgctttatgacggtatcaaaggacgcataaaaacccgtaacatccaaaataacagacattcagttgaaaatattcttcgctggctcaggctccagcactgcggtccggaagatattcatgtggtgatggaggctaccggggtttatcacgaacggctggctactgagttacatgatgctggtttctatgtctctctggccaaccctcaccgtagcagagagtttgcacgcggcatgggaataatgacaaaaacggataaggtggatgcgtatatgctggcctgctacgcattccttaagaaccctcaccgctgggagccgccggcccccgaaatcagatatctcggtgcactcctgcgacggcgggatgttctactgggtgatgccctgcgtgaggagaacaggctggaaaaatacctgtccacagacacacctgcagatattatcagttcctgcatgcatatggcgcagctgctgcgcgaggaggtaagcaatatcgagcggcagattaaagcgcatatcaaagccagccctgcactgaggcgtgattatacacttctgacctcaattaaatctgttggcccccagctgggaatgcatatgctggtcgtgcttcgcagccatgacttttcatcagctgagcaggctgccgcatttctgggtgtggtgccgatcgagaaacgttcaggcacatcggttcggagccggccccggatgtcgaaaatcggtccgcctcagttgagagcgaagctttacatgtctgcgctgtgcggaaaaatctacaataagcggatgcgtaatatttacgacgagatgtgcctgcggggtaaacctaaaatggtggccattggtgcgctgatgcggaaactggtgcactggtgttatggcgtcctgaagaccggaatcgtttttaatgatgaaggcctgaaacaagtactgtctacctga

SEQ ID NO: 195575 - DNA, 288 bp, Klebsiella oxytoca; identical to SEQ ID NO: 107950

SEQ ID NO: 195576 - DNA, 321 bp, Klebsiella oxytoca
atgctgcgggaatgcctgtggatagccgtacattaccagggtaccgaagcggtactcacccgacagttccggctgctgaccgtgttactgtatctgggcggttattttccgaaagggaatgccggtggtatgctcccggagaaatgtttcattttactgaacgccccggaattaagctcccttctggcagacgatacggcccctgatgttctggtggcgtcctgccgcaccctcttctactgcagacagatatctccgctaaggtgttaccgccatacccgctgtctgagcgaacatctgtatcaactgatggatatctga

SEQ ID NO: 195577 - DNA, 375 bp, Klebsiella oxytoca
atgcaaatacaatccctgtcccctcaaagggcggcctcgtcacgtctgtcgtcagtcgaaagctggcgaaaattgctggagtatctgctgaaacaacactacggtctgatgatgaacgacacaccgtttggcgacgacagtgtgatccagaagaacattgatgcgggaatctcactgtgtgatgcggtgaattttatcgtggaaaagtacggtctggtgcgtactgaccgtcacggcttcagtgtgacagagcagtctccgttcatcgacagcatcgatatgctccgcgcccggaaggctaccgggctgatgacccgcaagggctatcaaaccgttactgacatcaccagcggcagatccagaggagggaaataa

SEQ ID NO: 195578 - DNA, 234 bp, Klebsiella oxytoca
atgcttgtccttgagcctccaaaggaggatgaaaaaaatttagccggaatatttccttcaggggacctaatttatacccgtttggatgtagttgagcatacatttaccgctcttatgatctgcaagaatgaagaaaaagtaattgagaaaaatattcaaccacttttgcaagcatttgattatgtcatcgttgtggatacaggttcaactgactctactttcaatctactttag

SEQ ID NO: 195579 - DNA, 132 bp, Klebsiella oxytoca
atgaccagcttcggtgagtctgcgccggcggagcagctgtatgaagagttcggcttcaccgtgcatggcaccgttgccaaagcggcagcgctggtattaatttggccgttaatatatttcacatatatgtaa

SEQ ID NO: 195580 - DNA, 585 bp, Klebsiella oxytoca
atgaactcatttaacaattccgcacctgcgacactgaatggttcattcgataactcacctggttatattaacgttgatgttaataactatctcgacacaacactgaaagcgcctgttgccctaaaagtgctggcggtcatcaaacgacctgcgaatccttctgtggcaaattattttatttctgacttttccggcgcgggagctgcagggctcggatttgggcttggcattgccactgacggtaaattgcggatggttggtcaaaacgacgctaccacagcggtggcatcggtggatttcccttcttcaattgcggtcggtgacctgtgcgcgatagcggcacacgttattcagggagcggtatatgttgcaatctacaatcctgcaactgcgacgtacgtcgcaggaaataccgctatgtcaggtactcgttcagcaggtacaaagaacattcttattggcaggaaaacagataataatacgtcaaccgcttcaacggcaatcaagtctgcagtgctgataaacggcgagatcacaggagctcagcaacttgcagcaatgcaatacatgctggccatggattaa

SEQ ID NO: 195581 - DNA, 1668 bp, Klebsiella oxytoca
gtgaataataaaagtctcataacctccctttctctttatattctgttaaccgcatcgacattggcgaatgtatcgattagcaataccaatcaggtggaacaggataaggcacgtcaaagcgcattggcaccagcacagcaggaatattcggcatcaggtacaggatcgcaaaaatataaactcgcctttccacttgaagcaacctgccgatatatcaaccatgttgaaattatttccgctgaccacaagttgacccgcggtctgttaggtaatatcgctcgccaggcagaaaaaaagtgcctgggtattgaaggcatacgtctactcaccacaaccttgcaaaatgaactcattgcccggggatatatcacttcgcttattgatgtaccttcacaatccctgaatgatggcattctgagcatcacgttgagctatggctatatcggcaatattagctgggcttccggcaatagcgcgacaaccagcctgtggaatgccataccggctaaaacaggggatattctgaagctaaccgaactggaacaggggatggctaacttgcagcgtttacccggctcatcggcgcagatgaaaatcatgccgggtaagaaccatgcggaaagcgatatccaaatctcccggcatctggcacgaaactggcaagtaggcgcatggctggatgatgcaggaagccgtagcagcgggcgttaccaggccggtggcgcgctttatctttatgacctgacgacgctaaatgacattttctatttatccatggggggcgatgtcgagtttaatcaacataacgatggcaaccaaaataaaagcctctattattctattccctttggattttggtcactcaatctttacggttcacaaagtgaatatcgtcagcagttcaatggcagatactccaccattgaatataaaagcaaaaatgattataccagcgcaaccttaacgcgtctaatttcgcacactcgccagcaaaaaacaaccattgatgcgcgaatagcaaaaagtacctcacattattattttggtggcagcgaactgagcgttatgcgcaaacagaatcctgcctgggatattacggcacatcatcagcgatattttacccatacaatcgtagatgccagcctgggcgtacagcgtagccttccctggctcagttcaatgccaactccggaggaaaaagccggtctgtacagtaagctttcgcgcattattcatgccgaccttcaagccttaatgaagtttgaatcaacgggggataaattcagctatgctccgcatattaatatacaaattagccccgatatcttatccgcagacaatcaatttaatataggcaatcgttggacggtacgaggttttgacggtgaaagaaccctttcaggaaatcaaggctggtactggcgcaatgatttcatctgggatatgcccgccccagaacgacagctgtacttaggcatagacgttggacgcattacaggaacagagcagtacggaaatggcaaagtcatgtctggcgccacggtgggaatacgcggaagcataatttcaactcagtatgatttattcatcggaaccccactgataaagccaaacggttttcatacagaccctgcaaacctgggattttcattacaatggaggtattaa

SEQ ID NO: 195582 - DNA, 594 bp, Klebsiella oxytoca
atggatactttagtctttgcaagcctgatggggttgtattactggtttgcccgcttacgccttggctacaccttctccgccatgctgttacaacctgttgtaatcgccgtttttgtcggcctgctgttgggcaatatggaaacggcgatgattattggcgcaggtatgcagctggtttacctcggcgtgacctcaacgcccgggggtaacgtgccgtcagatccggcgctggccgcctgtatctcgattcctatcgccgtaaaagccgggatggacccgaacctggccatcgcgctggccatcccgtttggcgtgatcggcgtattccttgaccagctcagacgcacgctgaacgccgcgtgggtgcatatggcggataaacacgcggaaacggccaacatgggcggaattctgccggcgctgggctttgccatcaccatcatggtgatcggtaagaagagcctgctgccgtggtttatcggcggattctttgcggtgctgtacctgaaggtggacattatggcgatggcaatctttggtacctgcgtggccttcctgattaaaggcctggcgaaaaatgaaggagcagcatga

SEQ ID NO: 195583 - DNA, 504 bp, Klebsiella oxytoca
atgataggtctaggtccaactaaactcatttcacccttcaacacattaaataactgtggtaattcgtccaaacttgttctacgaaggaaatttcctattttggttatacgtggatcattctttagtttgaaagttgcatcccattcctctttagcaagaggatcattatttagtaattcttctaaaacttcctttgagttaatgaccatcgaacggaactttagacatttaaaggacttaccatctttgccaattctttcatgcccatatatcgcggggccaccatctcctttcactttacggctaatatatagcaaagctggtgataatattataataattgctaatgaacctactatatcaaatatacgtttaagaatgcgtgaggaccatttagcaaggttttgctgtacacggaaaatcattacttcatggctaaagataaacgacatatctgtgctatccagcggcatccctcgtaatgttggaatcacagagacataa

SEQ ID NO: 195584 - DNA, 2163 bp, Klebsiella oxytoca
atgtctccagttacaaataaatctttatctaaagatgcagacgaaattgatttaggacggttgattggtgaacttattgatcacaggaagctaattatttccatcactgcattatttacattaattgcactgatatatgcactttttgctacgccagtctatcaggccgactcgttaattcaagtggagcaaaaacagggcaacgcaatcttaagtaatttaagtcaaatgattccaggaagtcagccaagctccgcacctgaaatcactttacttcaatctcgcatgatattgggtaaaacagtcactgatttgaatcttcaggcgaaagcaacccaagattactttccagtttttgggagaggatgggctcgtttgataggagaaaaaccaggaacaatatcaataacgagattatatcttccagtgtcaggagatgatgcgccagaaataaaacttactgtagaggataaaaataattacagtattgattataatggagaagtgtttaaaggccgggttggcgagcttttgaatgataaaggcatttcactgaatgttgataatattgatgcaacaccaaaaacaacgtttactattgtatatatcagcaagttgaaggcaatatcagatttacaaaactctttttcagtggttgagcaagcgaaagatactggaatgctaacgctttctcttatgggagataatccaattctcatagagaaaatagtagatagtattagcaataattaccttgcgcaaaacatatcacggcaagctgcacaagatgcaaaaagcctggagtttttaaatgtacaattaccaaaagttaggggtgaccttgatgccgcagaggataaacttaatcaatatagacgtcaaaaagactcggttgacttatccttagaagctaagtcagtacttgagcaaatagtcaatgtagataatcaacttaatgaattaacatttcgtgagtctgaaatatcacaactatatactaaggaacatccaacttataaggctttgatggaaaaaaggaaaacgttgcaggacgaaaaatcaaagctaaatcagcgtgtttcagctatgcctaaaactcagcaagagatattaagactcagcagggatgttgattctgggcaggcggtctatatgcaactcctgaatagacagcaagagctaagtattgcgaaatcgagtgctattggtaatgtaagaattatcgacaccgcagttactgggccaaaaccagttaaaccgaagaaaataataattctgcttgttgggattatattaggttctttagtgtccgtcggactggttcttttaagagtatttttacgccgaggtttagagagcccagagcaacttgaagaaataggtatcaacgtttatgcaagtattcctgtctccgagactttcgctaaaaaaatggttcagaataatcgatggcggaaaaaatctcacaatgaagtcgaaggatttctggcaattgaaaatcctgcagatcttgcgatagaatctatccgtgggttacgtacaagcttacattttgcaatgatggaagccagaaataatgtcttgatgatttctggagctagtccaaatgcgggtaaaacttttgtaagtagtaaccttgcagccgtgattgctcaggcaggcaaaaaagttatattgattgatacagatatgcgaaagggttatacacataaactcttcaatgtcacgaatgataatggcttatccgatctattatcaggaaaaattgattctgccaaagcaataaaaaccattgcacctgtaggatttgactttatatctaggggcatcgtgccacctaaccctgcagagttactgatgcaccgtagattcggtgagttaattaattgggcaagtaataattatgacattgttgtacttgatacgccgccaatccttgcagtaacagatgctgcaataataggtcattatgcaggcacaacactcctcgtagcgaggttcgaacagaatacagctaaagaaattgaagttagctgtaagcgttttgagcaaagtggtgtgatagtgaaaggttgtatcctcaatggggtagtgaagaaagcaagtagctattatggctatggctataatcactatggttattcatatactgacgataaataa

SEQ ID NO: 195585 - DNA, 717 bp, Klebsiella oxytoca
atgataaaaataaccactttctctttttgtgggctgcttttgctctggacgacggccagagcagaaatcacggaacagcaaatcgaagctgactgcgcaaaaatctcgacctgggccagccagggcgagcaattctataaagagaaaaactacgccaaagcgcgcgctgcttttaaacagcaggccgcatggagcgaaagctgcgctcttgacgacagcgccatcgccacggcctacaacaacgtggcgttaacctgggtacgtgaaggggagtggcgcaaagcccgcgcctggctgatgataaggccaaacgacagtaagtcggtttacaatctgggacttatcaaagataagcttgctgccatgccgctgcctgtttcagccgctggagaatactggcgctatgccggacgcgcctcgtggaacgtaattatcgtaaaagagttgccaaagccatcgcagtatcaggttgatttccaaggctattatttcggcctgatggggatctacgctggccccaacatgggggagttctccgaagcggtcacgctggcaaacaataatgccgtcgtggcgcttcgggaagggaattatattcactgcgatatctcgctggcgttctcctctgaagctatcgaggctgagaccgatacgcctatgaactgcggttttggcatgaacgtcaacgccgacgggcgctatctgcgtgttaattaa

SEQ ID NO: 195586 - DNA, 279 bp, Klebsiella oxytoca
atgaaacgaagaacgcgtattaactacacgccagatcagaaagcgattatctgggacagatataagcaaggtgattccctgcaagatatcgccagaatgttcgacagatatcattcttctattatgcccactatccaccagactggtggatatcacccccttgtccgtaagcgacatccgttagctctttcactcgatgaaagagaggaaatatccagagcgctggtagaaaaaatcaccccagagcgttttaaccaatgtgttgcatccatcggttaa

SEQ ID NO: 195587 - DNA, 486 bp, Klebsiella oxytoca
atggtgacacgcagcggtgaatggatgacgcttgattttccctcctgggaaactgagccagtcataccacccgccttattgctggaagcgcttggcatcacagagtgcaaagaagtgcgtatggcacgcgactacatggtcgtgatggagaatcaacagcaggtagaagctgtacgcccgaatatcaatgcaatgctccccctgggaaaaatggtgtgtattaccgctgcgggcgaaggggaatatgattttgtcagccgttttttctgccctggggatgctgtagcagaagaccctgttacaggttcaacgcatagtatgctcattccttattggtctgaaaaattgaagaaaacacaaatgctggcgcatcagggagcggagcgtggcggggatttacgctgtcagctagagggcgatcgcgttttaatcagcggacaagcagcaacttatctgattggcaaagtactgttgcgccaggaatag

SEQ ID NO: 195588 - DNA, 312 bp, Klebsiella oxytoca
atgcaacaaattgatttttacatgattgatgcctttaccaccaccacgtttgatggcaatgcggctgcggtatgtccacttaccgaatggttgcctgatgagacattattaaaatgtcgcagcaacataaccagtctgaaacagcattttttgtcgcaaatgataatggctttgagttgcgttggtttaccactctgggggaaattaacttatgcgggcatgccacgcttgctgctgcacacgtcatatttgaacatcttgactactcaggcacaacaatccattttgctactcgatttgtcggcccattaa

SEQ ID NO: 195589 - DNA, 357 bp, Klebsiella oxytoca
atgaactatcactcagaatccggtgccataccggagaatcccccctgccagcattgggggctaaagagtacgatcacaccctgttttggagctcggctggtgcaagaaggagaccgcctgcattttcttgctgatcgggccggatttaacggtgctttctgcgacgatgacgcgctatacctggatcaggcctttccgttgattctcaaacaactggagctgacactcaccagcggagaactctccccccgccatcagcactgtgtcaccctctatcacaacggactcacctgcgaagccgatacgcttggtagttgtggctacgtatacatcgccatttatcccactcaacgttaa

SEQ ID NO: 195590 - DNA, 174 bp, Klebsiella oxytoca; identical to SEQ ID NO: 107918

SEQ ID NO: 195591 - DNA, 474 bp, Klebsiella oxytoca
atggcggcattaaaaccggaggttaaagcattcataattcaatctgttgcgtgttacgaagccccatcacaagtagccgatgccgtcctaaaagaatttggggtaaaaataacccggcagcaggtggatcaaaacgatccaacgaaggttagcgggaaaggactcgccaaaaagtgggtagaccttttcaatgccacccgagaccgattccttaatgagatttcagatataccgatcgcaaacaaagcctaccgtctccgcgttctcaatcgcatggccgtgagcgctgagagtatgaggaactacggtatgaccgcacagcttcttgagcaggccgccaaagacgtaggagatgcttacagtaacaagttgaaggtggaaagtaccgggaaggatggcggaccaattaaaacagaatcggtagcaatgaccccgcaggaagcagccgacgcctacaaaaagctgatgggctaa

SEQ ID NO: 195592 - DNA, 360 bp, Klebsiella oxytoca
atgaaaattacaggtgtcgactttgaaaaaagctctgtcgaagaaggtatggcagagcgttatctcattattgataaagtgaccaacttcaattttggcgaagttttcgagaaagaacttcattctcatccgagtatgcataaacgaaaggcgtttgttcaaggtagctacatcatcgttacttgcccgcttgatgaattacagtctcaaattaagcttttaaacgaaatctgcgcgcgagtagacaaaaaaattcgtgagtatgttgaagatgctacgcgcagacatgaagaagcccagcaggcagagaatatgaagagggatattgctcatgacgtctataaagggctgaagttttaa

SEQ ID NO: 195593 - DNA, 462 bp, Klebsiella oxytoca
atgagccgattaactgccattatcatcgccgtggttatctgtctggtcgtctgccttggctggctggttatgcattaccacagcaacgccaccgagttcaaaagtcagcgcgataaagccactgaacaactcagcatggcgaaagacaccattaccgacatgcagaaccggcagcgtgacgttgcagcgctggatgccaaatacaccggagaactggcagatgctaaagccactatcgatcagcttgagcatgatgttgcttctggcaagcgtcggctgcagctcaacgcaaaatgtcccacgaacggagcgaccagcgccggcggcgtgggtgatgcttccggcccccgacttactgactccgctgaacgggattatttcaccctcagagagcgaatcaacaccatcaccgggcaagtgaattatttgcaggaatacatcagtaagcagtgtttgaggtga

SEQ ID NO: 195594 - DNA, 180 bp, Klebsiella oxytoca
atgtccagagatgaaatgattgccaaggcatatctcgataaggattttctaaactggtttgaatgttactttggctatggtccaaaagatgaagtcccatgcaatcaccctgtacttgttgctaccgctctggcctgggtagagtctcgaaaattcataagtgagcagagcaatggctaa

SEQ ID NO: 195595 - DNA, 243 bp, Klebsiella oxytoca
atgatggaaattattcagggaacttgtagctgtggagagcccatcagcattgaactaagtgccaaaatgagttgtagaacggatggaaaaaggccgttctatccggatgagaacaaagaaccggaagtcataggaaacttcgtttattcgcatgagggagtgacagtattccggtgcaggaaatgtaacggctgggttgcggatacagtttctgaggcgacgttagaggtgcgagatgagtaa

SEQ ID NO: 195596 - DNA, 351 bp, Klebsiella oxytoca
atgactgatatcaccgaactggcgcagcgtatgaaagcggcggcagagagcgttattaaaaattacgactgtgaatggttcgagactggccgtcagatttgcaccgttcacaagtcaaaggtcaatcttattagtttggctaaccctgccaacgtcctagcgctggtagaggcgctggagaaggcgcagcagcggattactcagctggagtcccgcaccgtcaccgtgaaaccgatgcggccggggcatatcacagtcggcggagagaagcttggaatatacatgcgtgatgaagttgacgaatttctagcggcgctgaccgccgctggcatcaagtgggaggctgagtga

SEQ ID NO: 195597 - DNA, 447 bp, Klebsiella oxytoca
atgactatcacactacaggcagtaaacgagctcattcagtcgctggagagtgcgggcgagctgtcgatcaaagagacaagggttatggcgctggcgaaagcttaccagcagctggctgcggagaatgcgttcattctccagttgatgcatgagcaggccggttgtttcaatgccgccctgatcgaagggttccatgatttggttatggaatcaggaagtgagggactgattgatgtttatcagcgtcgtttgcagcctgcaatccaatgcgtgccgccaacccccgccaccgatcgcatcgtagccgggattaaggctgatggggtggaggagtttgtatccaacaccgtgcataagatttttgatgaaagcgaggcagtgtcagctttggcttacctgtccctggctaattcacacgtgaagcagcttcgcgagggggccaaatga

SEQ ID NO: 195598 - DNA, 870 bp, Klebsiella oxytoca
atggcccgttcaagaaacataaagcctggttttttcacaaacgatgaactggctgagtgctctccatatgcccgtctactttttgccgggttatggactatagccgacaaagaagggcgcttggatgatcgcccaaaaaaggttaaagcgcttgtcctaccattcgacaacgttgactgcgatgaacttcttcagcaactacatcagcgtaaattcatcaaccgctaccaggttaatggcgatggatttatccagatctcaaactggaagaagcaccagaatccccactgcaaagaagctgctagtgaaataccagaaccagtagagaacaatgacagcaccggacatgaacagtgcaaggatgataaagaggaagataagaaggatgttgaatcacctcaagtcattgaaaataatggagcaccagaaaagcaccatgcaagcacagtacaagaaccagcagagaacaatttaaatcctgctgattcccttaacctgattcctgattccctcatccctcatactgattccctaattaacacccaagccgctgatgcgacttgcgaaggggctgaggctgatgttcatgaaatctcaagccgctatgcattcgaaggaaatattgttcggttaaatcacaaggactacgaagcctggaagcgcctctatccgaacattgacctgaagtatgagctggaaaagctggatattgaatttagccatgataagccaaaaaaatggtttatcgctgccagccaaaagctcagctaccagaacaagaattctgcatccagacctgttaagcaggccgttaacgccccgcagcagcactggaacagccgcgaagcatgggagaatgaattcttatga

SEQ ID NO: 195599 - DNA, 216 bp, Klebsiella oxytoca
atgaacaacattgccaacgaacgtaaaaagcttggcatcactcaatccgagttagctggggcatgtggatggaatcagtcccgcttggctaactatgaatcaggcattcgcgctcccgatctggagtcatgccgccgcctggttgagacgatgaataagctgggaagtaagacctcgttagacgtcttgttcccacctaagaagacagcagcatag

SEQ ID NO: 195600 - DNA, 255 bp, Klebsiella oxytoca
atgacttccccaaccggcctaagtgtaccggaaggcatgctggttttgtttgatacgggaaaagaagccaaaaatggcagcctggtgattgctaagatcaccgacgcaaacgaagcaacttttaagaagctggttatagatggcggcaacaaatatttgaaaggacttaatcctgcctaccctctaattccgatcgatggcaactgcaaaatcatcggagttgccgtacagatgatgttcaaattcccctcttaa

SEQ ID NO: 195601 - DNA, 282 bp, Klebsiella oxytoca
atgaccaatttaatcgcatcaaacagcgtcacacggcgttatctgaaacgtggtgagctgatggctaagcgtcgggcagaagctgctcagaacgaagcacggaaagcagaatgcatgtcacgtgtagagcgggccacctcattgggtagccttcgcgataaaccagctcaggaagagattgcagagcgtaaaaaccgcatctggtacaaacagccaggcgagcgcggcgttacttgcagcggccggcagaagatgaagggtaaatcgataccgttgatttga

SEQ ID NO: 195602 - DNA, 636 bp, Klebsiella oxytoca
atgcagaaagaacaaatcgtgacttacaaaggattcaacaaagatttgcaatgccgtggttatcaattcgaaataggcaaaacctacgagcacaaaggaaaggttgaggcgtgtggttctggcttccatgcttgcgaatgcccatttgatgtatttggttattactcgccagcaaacagtcgtttcgctgaaaccgtatctttcggcaccactgatcgcgaaggcggtggagatactaagattgccagcgccagcataaccatcaaagcagaacttaccctcccccagttcattcagcgcggtattgaatggatttggagcaagattgataagtctcttgagcagcagatcatgcccggcaaccgctcagcggccagcaacaccggcgactactcagcggccagcaacaccggcgactactcagcggcagaagtttctggatcacattcagtggctgcagcatttggcatcgagagcaaagcgagagcctcagaaaatagcgccatcgttctttgctaccgcaacgatgaaggcgagctaatccacatacgggccagcaaggttggcgagaacggcatcaaggcagacacatggtacgtacttaacgaatcgggtgaatttgaggaggcggaatga

SEQ ID NO: 195603 - DNA, 192 bp, Klebsiella oxytoca
atggaatggataaagtgtagtgaaaaaaaaccagcacttggaattgatgtgcagatttactgctctgataccaaggagcagtttgttggcttccgcatagggaaatactttcaatacgcttttgttgatggcaaacgcgccgtctgtgagcctacccactggatgccactccctcccccaccaaccgaataa

SEQ ID NO: 195604 - DNA, 1005 bp, Klebsiella oxytoca
atgagcgaaataacggatttagtcgtcatcgagaaaaagaacgcgatggcggttttcaccaataacgaccagctcgacccgcttatcgaactaattgaaaaagaggctcgcagcctggtgccggacgtgaccacaaaaaaaggccgcgacgctatcgcatccatggctcataaggtggcgcgttccaaaacgtacatcgacaacgcaggtaaggaacttgtcgctgagttgaaggccctgccaaagaaaatagacgaaagtcgccgcatagctcgcgaacgtctcgatgcactgaaagatgaagtgcgtctcccccttactgaatgggaagcagagcaagacaggttgaaaaaggaggaagaggaaaggatagccgccgaagcctacagcaagatgcgcgatgaagcagacaggatgaacgcagattttgacgtagcaagggcagcagctctgaaaatcaagttcgaagccgatcacgaactggctctgctgatgaatgacgcattcgaccgtgaacaggcagagaaagcagccgaagccgaacgccagcgcatcgaccatgatgaagagattaagctccaggcggcagaaaaggccaagcgtgaagctgaagagaaagcagccgcagaactcgcagcaataaagcagcgcgaagctgatgcaattgcagctaaggcgcaggcggaactactggctaaacaggctgaggaacgtgctgagaagcaacgacttgaagctctggcacaggcggagcgcgagaaacaggctgctatcgaagaagagcgccagaaagcggtagcagcggaagccgccagactcgcagaagagaagcgcattgcagacgaaactgcgcgtcgagagaaggatgttaagcatcgtaaagcaatcggcaccgatattgtgaatgcccttctcgccaataccagcattaatcgcgagcaagcgattgaggttctcgctgcgctgaaagatggacttatcccgcacagcaaaatcagttactga

SEQ ID NO: 195605 - DNA, 159 bp, Klebsiella oxytoca
atggagaaatgggatgacgacgctttcattcaggcaatgagtgaagccattccagagcagcaaatgacacacgaactggctgcgcaggaagcgatggccgattaccggacggaacagcaagcggagaggatgggaatttcatgggaacagcaactctaa

SEQ ID NO: 195606 - DNA, 681 bp, Klebsiella oxytoca
atgggaacagcaactctaattcttggcgagtctggcacgggtaaatctgccagcctccgcaacgtaaatcctgatgacgcaatcctgattaaagcagttggtaagcctcttcctttttgctcaaataactggaaggtatgggatgcaacagccaaaaaaggaagtgttgtcgtatctgatgactggcatcacatccagaccataatcaaaagagcgccagcttacggtaagaaaatcatcatcgtcgatgacttccagtacgtgatgagcaacgagtttatgcgccgctcagaagaaaagtcattcgataagttcacagaaatcgggcgtcatgcgtgggaggtgattaagtccgctcaggatgcgcctgatgaccttcgcgtctactttctggcccacacagaagaaacgcaaatgggccgcacgaagatgaagacgattggcaagatgctggacgaaaaaatcaccgtcgagggcatgttcaccatcgtacttcgcacaatgacgcgcgacgacagattcttttttaccaccaaaaataacgggtcagacaccgttaaatcccctatgggaatgtttgaaaccaacgaaattgataatgacctcgcctttgtagacgcaaccatctgtgaatactacggcttcaccaatattcaccaaattaaggattcagccgcatga

SEQ ID NO: 195607 - DNA, 585 bp, Klebsiella oxytoca
atgagcaacgtaatttttacctataacgaagaatcagcactgtcagccggaatgggtggcttcattaatgaaaatggcgcgtacattttcaccattacagaggccgagctaaagcagggcattgacggcagcaaggctcaatggattgagttttctggcgaggctgatgacgggcgcaaggtgcagtatctgagtgtttactccgttaaaaaagacggtcagcccaacacgttcggcgtcaacatgattaacgcgatgatgggctgcgctggcattaactcacttactcagcacatggcatctgctggaaaatatgttgcacctgagtttgcaggtaagcgtattggcctggttcttcaaaaggtcctccgcagcaaacgagacggcagcgacacctacggaatggaaattcgcatcccgttcattgccgaaacccggcagacgcttcaggagcgaaaagacggcgtgaggccggaggcggtggataaggtcgcatcatcattaaaggaccgcgacaaccgcaataagggcggctcacaacaagcggataacggtcattacgactacggcaatcaggacttctaa

SEQ ID NO: 195608 - DNA, 285 bp, Klebsiella oxytoca
atgtcatcacctctaaccggggcgggatacctgcgccctccagtccgttccggcacaaaagaagaggtgctggcgcggtgctttgaagctattgccaataacgattaccagacgccggccatggaagatcggctacatctgagacacgaaaaggatgtctggtacgacaatctggaagccagcatcaggcccggcttcgtaccggttggcccgatgctaccgacacgcgaggacgagcgattcaggcgttacagattcaggcaaggggcggttagcaatgactga

SEQ ID NO: 195609 - DNA, 528 bp, Klebsiella oxytoca
atgactgattacggaggctcaacgacaccgaaaaatgaaagggattgctggcaaacgccgatcgaaatatttaacgctctcgaccttgagtttggtttctggctggatgccgcagcctctgagactaatgcgctatgcgctcactatctcactgaaatggatgactcgttgagtagtgagtgggcgtcttatggggctatctggtgtaaccctccctattccgatatcggcccatgggtggaaaaagccgctgagcaatgcaggaagcaaacccaaccggtggtaatgctgttgcccgctgatatttcaacaggctggtttagttctgcgttagaaagcgccgacgagctgcgcatgattaccggcggccgcattcagtttgtacccgcatctattactggcaagcgccagagcaatcccaaaggttccgtcttattcatctggagaccgttcattaaacctcgccacattatcacgtccgtttcgctggatgagttaaagcggatcggtactctggaggcagcatga

SEQ ID NO: 195610 - DNA, 222 bp, Klebsiella oxytoca
atgaccgcagaaattattgaccaggccagcgagctagaagaacttctccgcaataacgctatacaggcccaccgcattaaccacaacgcagtatcagcaacagagtgtgaagagtgcggagaaaagctgagtgatgcacgccggaaagcctatccgggctgcacgatgtgcgttagttgcgcagaagagattgaatttcggaagaagcaagggaggatgtga

SEQ ID NO: 195611 - DNA, 129 bp, Klebsiella oxytoca
atggaaaagagccacccgcttcaggtgcaactgaaatattgggaggtcggttatcctccgttctgtggtctgattatcgagatgattatttccaacccgagcaagttgatatcgtcagagaggctctga

SEQ ID NO: 195612 - DNA, 225 bp, Klebsiella oxytoca
atgtacttaacgcttcaggagtggaatgcccggcagccaatcccgcgcagccttgaaactgtccggcgatgggtgcgggagtgcctgatatatccggccccgaagaaggttggtcgtgattatgtgtttcatgagaaagcaaggcgcgttgaaagaccagctaaagccaactcaataatcaagagagtaaacgatgggaagaagaaggagctacgaaaggcgtga

SEQ ID NO: 195613 - DNA, 1071 bp, Klebsiella oxytoca
atgggaagaagaaggagctacgaaaggcgtgatttgccgcctaacctctatgtccgcaaaaatggttattactcataccgtgacccgcgctcagggaaagagttcgggttaggccgcgacaggagggtggcaattacggaagcaatacaggccaatcttgagtttttcaaaggagaggaaagacagccgttatccactcgcatagctggcattgacagcatcacttttcatcaatggctggttcgatatgaggtcattattgctggtagagggctgaaggagaaaacgctcagggattacgccagcaaaataagaacactccgcgagaaaattgatgatttaccgctaccgcaaatcactacgcgatttatagcttcacttctgaatgactatgcagatgaaggaaaagcacccatggcgaggcttctgcgctccacgctgagcgacattttccgcgaggcaatagtagaggggcatatcagtgaaaaccccgtcacagctacgcgtacagctaaatacacggtaaagcgctcacgactgacgtttgatgaatatcaggtaataagaaaggccgcagacaaatttccgtcatgggttggagtggctatggatttggcgctggtaacaggtcaaaggctgggcgacctggtggaaatgaggtggccgaatatcagtaatggactgttgcacatcgagcaaggaaagaccggttcaaaggtcgctattccgctcaaaataaaactggctgcagctaatttatgcctgtctgatataatagagcgctgcgtgaaaagccactcaacaaaccaactactcacctctcaaaagggagagtcagtatcagcaaaatcgctgtccagatacttcctactggcgagagaggaaagcggattgaagtttgatggcgtcccgccctctttccatgagataagaagcctgtcagcaaggatgtacgataagcaggaaggtaaggacttttcccgaagattgctgggccataagtcagatacaatggcttctcagtaccggaatgaccgaggaagggagtgggatgtcatagatgtggggtaa

SEQ ID NO: 195614 - DNA, 1230 bp, Klebsiella oxytoca
atgaaaactctgtgcttgccagtgttatctgtttgcttactcttttcatttaacgcatatagccaggaatggaaaaatgagtgtgtgggctattatcaattagcgttgccagataatcttgaaatagcattgtatcaggttgaagattttgttaatcccagagagcaacccgaaaacgatggggatataaaaacaaggttatatgcaagcccagaagtaaagttcgaaaggaatacttttgttcggaatgatagctctgttcaggcgcaatttactgaattctattacgggcaatataaattgggcatttcatcacagagtcgcacatccattaattgggtagagtatcgaaacaaagtaatcgctaacagagattttggtgtgaaggttgccaggcaatatgaagatcgtaatctagaattatttaacgatcctgttacgccaggatcagaatttaaaagaaagcataattatatcattaaagattatactgatgcttttgtgctatatgaaaacagaacttatagcctttttgtgaaaaaagatgaacgtttatatcatttctggaagaaatatcagaaggacacaggtgataaaacacaaacggcagagaaacaactgcaagagagtgaacctgaaattctttcattacttaacagattccagtctcgcaaactctatcaggttcccacagcgcaaggtttttgtataccctatggttttatcgccggggattctggccatgaactgcgtaatatggcggtcacttaccgtctgaaaaatcacccggatgtgaccatattttttcaggatttaggcatggagcctggaccaaggtttcagcgtcctgaaaatgaaagtgctaaggattttgttacttatttgtggaacagaaaataccagtggtcatctgtttcgaaagagttaatcagcccgaaatggcgcccaattaagatggacgggcgtgacgggcttgggacttttgtgaaggcaacttttcgtgatgtcccagtatatgactataaggatcaagtaattaatcgcctgaattatattaactatggttatgttgcttatgtgcagggcaatcataatgtcagaagtatggaacctgatttattgctctatgttatgcaagacagtagtcaggttaaaaaacaaccaccgatggataaagatgacctagaaaaacttgctgaacatattgtcagttcgattaagagacggtaa

SEQ ID NO: 195615 - DNA, 2415 bp, Klebsiella oxytoca
atggcagtgcaaaaacttgatgatggcatgaatcgggggagtgtgtattttgatgacaaaagcgacaagagctatacagccacgttaactcacaaccattgggtacattacaccagtggccaggagcgtcagtcagaaaactttgccgagtataccgaaggtaatgcggtgcaggctttcctggggggaaaggcctattttactgcgttactgactgcctttaaacaggcccaaaaatgtgtttacatcacaggctggcaggttaactgggatgcccaactagcggaaggggttcgcctggtggatgcattactggaagccgtacaggcttcaccggaactgcaggtgtacattatgccgtggaataatccctcacaggtggaaacctattcggcggcaacagagcgggtgtttgcggcgatgaattgttatctgaagcgcaaggccttttatgttcagtgtgcggattctaaatccggaatgatgttttcgcatcaccagaaatgcgtgattgttgatgaagaagttgcgtttgtcggcggtattgacctggcctacggacgctatgatgaccattatggtttgcaggcaaatgcagacggacgacaggggatgaatatgtacaattcgtgcatcccgcctgtttcgcggcaaagcagttacaaccccatggaggaatatgtcatcccggcagggggattccggcgggataaccagcaggatgaacggcaaaaagctgagcgtcggcaggctgacagtgtacagcacattatcaataacgtgctcagccatcagcactggcagtcatccgccacgtcaaaggacagtacctatctggacccgacggtccagccccggatgccctggcaggactaccaaatgcaaattgaagggccagcggtttatgacctggtgcgtaactttgtgtttcgctggaacagttatagtcacccctatccggatcattcgctgaaaacctctgttcctgaactggaggttccggcagcaccgccacggaaaaaaggcagttgccaggtgcaggtgctgcgcagtgcctcactcgacatgcgtaaagatgagcataaacgtatgccggacagcgcaccaaaggccaggctcaaacaggatgatatcctacgcagtatccacctgcttatcagcaaggcggagcactatatttatattgagaatcagttctttgtctcggcgtttgggcggtcatcgattagtgccgggagtgggctaagtccggtggcggatagcattaatccgtcagtagcagcttgggcaacccggctcctggctgatgacacgacaccgcaaaatccggtggcagaatggctgggagaccgggttaaacgggcagtctttagtcatatgcagcaggcgttccatgtgtatattgtactgccggtgtatccagaggggcggcttgatgatccggccattgtggcgcaaattcatttaacccgacagtccttagtctttggttcgcagagcctgcttaaccgtattcgccgtagcttatgggtaaaacaacaacttgagctacagacggtcccgcgcagggagtggtggcagaaaattactgagctggaagagcagtgcggcgataagtataaaaccattccactggaagcatgcaatgagtatgtgacgatgctgaatctgcgcgaccacgctgaactaaacggcagggcggtaacagagcagatatatgtccacagtaaactgatgattgtcgatgaccgctatgttctggtgggaagtgcgaatatcaatgaccggagtctgcaaggtgaccgggactccgagctggcggtactgatatccgatacagcctattgttatacggacctggatgggacgggcgttgctgccccgacccgaaactttgcgcgcgaattgagacaaagtgcatggcgtaaatggctgggcagcgcagcgggagcgtgtgcagatgtgctggataaaccggcactcaggacgggatgggaaaaaattcagatgctggcgaaaaaaaatgccgaaaattacgaagcagtattcaactttattccaggagataattatcaactggatggaggtaacgattatcctgatagcactgaaagtaaaatcaggtcttctgtctggccagtaatttcggttaattctacagcggcagagtctgataaggaaaatatgccgttttcagaaacattctgggctactaatagaacagtccagcatagtaataaactgaacggcgttaagggatattttactatgttacccgttcactggactgagggagagaataacctgattccttataatatacgacttatagccaataataatggcttaaatagtaatgactttcagattgctggtatttttgaaaataatgacagaagtggagtgttgctatga

SEQ ID NO: 195616 - DNA, 1389 bp, Klebsiella oxytoca
atgtctggaggtcttgttactgcggcttacattattgccgcgctgttgtttatttttagccttgcaggcttatcgaagcatgagacgtcgcgagcagggatcgttttcggcatcgccgggatggcaattgcgctggcggcgactatcctcggtccccaggcagccaatcttgcatggatcctggtagcgatgatggcaggtggtggcatcggtatctttctcgcgcagcgggtggaaatgaccgaaatgccggagctggtggcgattctgcacagctttgtcggcctcgcggctgtgctggtgggtattaatagctaccttgaccacgcgccgctcgatgacacggccatgaaggttatccatcttgtggaggtctttttggggatcttcattggagccataacctttaccggttcggtagtggcgttcggtaagctgcgcgggatctttgcgtcaaaaccgctaatgttgccaggccgacacggtatgaatctcgcggctctgctggtctcttttaccttaatgatcgtattcgtgtgcagcaataacctgctgtggcagagtctggcattaagtgttatgacgctaattgcactggcgtttggctggcatcttgttgcttcaatcggcggcgcagatatgccggtggttgtctcaatgctcaactcctattccggctgggcagcggcggcggcaggttttatgctcagtaacgacctgctaatcgtgaccggtgcgctggttggctcttcaggggccatcctttcttacattatgtgtaaggccatgaatcgcgcgtttatcagcgtcatcgccggcggctttggcagcgagggtgcggcatctgacggtagtgccccacagggcgaacatcgtgaatgcagcgctgcggaggtagcggaagcgctgaaaaacgcccgttcagtcattattacccccggctacgggctggcagtagcccaggcgcaatatcctgtacaggaattgaccagtcggctgattgcgctaggcgtaaaggtacgattcggtatccatccagtagccgggcgtttaccgggacatatgaacgtgctgctggcggaagcaaaagtctcctacgatatagtgctggagatggaagagattaatgacgacttcagtgctaccgacgtggtgctggtcatcggcgccaatgacaccgttaaccctgctgcacaggaagatcccggaagccccatcgcaggcatgccggtactggaagtgtggaaagcacagcaggtggtggtgttcaaacgttcgatgaatactggctacgcaggcgtacagaaccccctgttctttaaagaaaacaccaccatgctgtttggtgatgcaaaagcgagcgtagaggcgatacttgcgcagctctaa

SEQ ID NO: 195617 - DNA, 1527 bp, Klebsiella oxytoca
atgaatatttcgattccccgggaacagctggcgggtgagacgcgggtcgccgccacacccgctaccgttgaacagatgctgaagctgggctttacgatctccatcgcccgcggcgcgggtgcagcggcaaatattactgatgatgcatggcagaccgcaggtgcaacgctgtgttcgcaggatgaggtctggcagagcgatattatcctgaaagttaatgcgcctcttgcggatgaaattcctcttttgcgcccaggctgcacgttaatcagtttcatctggcctgcacagaaccccgagctaatggcgaaactcgccgcccgcggggtgacggtgatggcaatggatgccgtaccgcgcatttctcgtgcccagtcgctggacgccttaagctcaatggctaatattgccggatacagggcagtagtggaagctgctcaccagtttggtcgtttctttactggacagatcactgctgccggtaaagttccaccggcgaaagtgctggtcattggcgcaggcgttgccgggctgtcggcaattggcgccgccagcagcctcggcgccattgtacgcgccttcgatacccgcccggaagtcaaagaacagatccaaagcatgggcgcggagtttctggaacttaattttgaagaacagagcggcagcggggatggttatgcccgtcagatgtctgccgagtttattgaggcagaaatggccctgttcgccgctcaggccagagaggtcgatattattatcactaccgcactcattcccgggaaacctgcgccgcggcttatcacccgcgagatggtcgccagcatgaaacccggcagcgttatcgtcgaccttgccgctcagaccggcggcaactgtgagctgacggtacagggcaaatgtatcaccagcgatgatggcgtaaagatcatcggctataccgacctgccagcacggctggcggcccagtcatcccagctttacggcaccaatttggtcaatctgctgaagcttttgtgtaaagaaaaagacggcaatatcgtcatcgattttaatgatgtcgttatccgcggcgtaactgtggttcgggagggggaaatcacctggcctgcgccgccaattcaggtttcggcccagccgcagcagcctaagaccgtaccaaccgagacggtaaaaaacgcacccgcttcaccgtggcgtccatacctttttctggcgctggttattgcactatttggctggcttgcgcatcgcgcaccggcggacttccttgcccattttaccgtctttgccctctcgtgcgtggtgggctattacgtggtgtggaacgtcaatcactccctgcatacgccgttgatgtcggtcaccaatgcggtatcggggatcattatcgtcggcgcggtcctgcaaatcggccttggaggctggatctccgtactggcttttatcgccgtttttatcgccagcattaatatcttcggcggtttttacgttacccgtcgcatgctgaaaatgttccgcagaaactaa

SEQ ID NO: 195618 - DNA, 861 bp, Klebsiella oxytoca
atgtctgtagaaaaccgcgttattctgaccgtcgcctgcaccggggcctggccacagaagagcgacaccccgtatattccgctcacaccgcaggagcaggccgatgaaatcgtccgctgctgcgaggccggagcctccattgctcacattcatgtgcgtgatgaggaaagtcaggcttcgatggatttcgatcaattcgccgagaccgtgcgcctggtacgcgcgcgttgcgatatcgtcattaatctgacgacctccggcggacttggactgagcgacgaaattcgcatgaagccattccagttattgcggcccgaaatgggctctttcgatgccggaactatgaactgggcccactcaacaatattcgaaaatagcccgcgctttctggagaaactcgctgtcagcatgaacgagtgccaggtgaagccggagtttgaaatcttcgatgccgggatgatttacaacgtcctgtactacatgaagaaagggctgatcgaggggaatccacactttcagtttgtcctcggtgcaccgggaggaatgacggcggaagtgcgtaacctgatgttcttgctcgatacctgcaaacagcatttaggagataatttcacctggtcggcgttgggcattggtcgcggtcacctgccgattgtcctcgccgcgctggcgctggggggtaacgttcgggttggcatggaagacaacattctctatcgcaaaggtgaactggcgcaatccaatacctggttcgttgagcgcgttaagcggctggcggcggaagtggataaaaccatcgccacgccggatgagacccgcgccatgcttggcctgatacgacagcagctagttagcgcctga

SEQ ID NO: 195619 - DNA, 1185 bp, Klebsiella oxytoca
atgagtacaaaagatgttgtcattgtcagcgccgcccgtacgcccatcggctgctttggcggcgcgctaaaggatctctcggctatccaactgggcgagcatgcaatcaccgccgctatcgctcgcgccgctatcaaaccggacgatgttgacgaagtgattatgggcaacgtactgggggcagggctaggtcagaacgtcgctcgtcaggtcgctatcgccgccgggatcccggtagaaaaaagcgcctttaacgtcagcaaagtatgcggttccgggctcaaggcgaccattctaggcgcacaggccatcgcgctgggcgatgcggaaatcgtggtggctggtgggacggaaagtatgagcaacgccatgtacttatccgccgcggcccgctggggacagcgcatgggcgacagtgcgctgattgacagcctgattagcgacggtctgaccgatgccttttccggtgagcatatggggatcaccgccgaaaacctggcgcaaaaataccagctcacccgggaagagctggacgcctatgcggcggaaagccagcaacgcactgaatgggcgcagaaaaacggtcgtttcgacaacgaaatcgtgccgatcaaaatcgtcacgcgcaaagaagagcgttacgtcaaagccgatgaattcccccgccacggaaccacgcgagaaaccctcgcccggctacgcccggcgtttcggccagacggcgtggtgaccgcaggcaacgcttccggcattaacgacggcgccgccgcgctggtcctgatgagccgtgaaaaagccgccgccctccagcttcagccgctggcgacgatccgcgcctggggcagcggcggcgtcgatcccaatatcatgggctacgggccggtacccgcaacccgtcgggccttatcccgcgcgggcttacaggtggatgacctcgacgtcattgaggccaacgaagccttcgcctcccagtgcctgagcgtgatgaaagggctggggctggatccgcagaaaaccaacgtcaacggcggcgcaattgccctcggtcaccctatcggcgcttccggcgcacgcattctggtctcgctggttcatgaaatgcagcgccgccacgctcgttatggtctcgctacgctctgtatcggcggcgggatgggactggccatggtggttgaaaaagaataa

SEQ ID NO: 195620 - DNA, 939 bp, Klebsiella oxytoca
atgggtaagaaagtttttgtcgatttaacgcatccatttagcgccgacactccgcgctggccttacttcgataagccgctgatcgacagtgcgcatactatggcaaaaggcggcgtgttaacccagcgtatttcctgcaccatgcacaccggtacccactgcgatgccccgcgtcatgtgatggaaatagaattcgacggtaaaagagcgcgctatacgcatgaaatgccggtcgatgcttatactggtgaggcggtatgcctggaaattaacgtcgggcgctgggaattaattcagccacatcatctggaagatgcctgtctccgtgcaaatatcaaaccggaagagttagccggaatggtggtatgcctgaataccggtatgcatcgtaaatttgatgactcaaaagagtattatcactactcctgcggtactggcgtggaagccggaaaatggtttgttaaaaataaagttaaatgcgtcgcgatggatatgcaggcattagatcacccgctacatactgcgatggggaataacggcgccacgcgtatgaatttacttggcgcatccggacgcccgcttaccgaagaatatactgaacagttcggtgaagaagcctatgcagaatttgataaagagctgtatatcaaactccacggccaagccgcctatgatgaaaagttcggcgatctggaggctattggctgctggggcacctgggaaccctgccataagcagatgctcggccacggtattgtcggcgttgaaaacctcggcggcaatctggataaagtttccggcaagcgcttccgtttcttctgtttcccactgcgctggtatttaggcgatggctcgatggtgcgctgcgtggcggaaattgatgaagatgatatgaataatgtcccggaaagaacctatagctacggaggctgcatttaa

SEQ ID NO: 195621 - DNA, 927 bp, Klebsiella oxytoca
atgaacaatccactcacccgggtcaccgtgctcggcggcggcctgatgggcagcggtatcgcgcagatctttgccgcccgcggtgtggaggtgacgatttatgatatcgacgctggcgcctggaccgcgccggacaccatccgcagcaacctgcagcggatgcaggcggaagacgccaccatcgaagaggttattagccgcgtcgttttttgcgaccgcctggcggagagcgttaagggggcgcaaatcgtcttcgaatgcgtgcctgaacagctggcgcttaagcagcggctgttttgcgagctggactcactttgtccaccggaaacgattctcgcctccaatacgtcggtcatcagcatcagcgagatcgcccgcgatgtgacccacaaacagcgcgtactgggcacccatttctggaatccggcctttctgatcccgctggtggaggtcattcgcacacgctggaccgacgatgcgctattcgaacgcacatttgacatcctcgcctgggcaggaaaacgcccggtacgggttaataaagatgtgccggggttcctggtaaaccggctacagcacgccctatggcgcgaagcgatttaccttgtggagcagggcatcgccgacgcgcgcaccgtagacgaaggcatccgatatggctttggtatccgactgccggccctcggccctctggaaaacgccgatatggtagggacggacctgactctggcgattcatgaatatatttttccgcatctgaataacgcgacaactccctcgcctctgctacgccgactggtgagcgaaggcaagctgggcttcaaatccggtggcggatttcagacctgggacgacgcatcaattaacgaaagccgtgagcgactgctgagctatctgcagcgcgtcactcagcaacctgaggagtaa

SEQ ID NO: 195622 - DNA, 789 bp, Klebsiella oxytoca
atggacacaacatgggataaaaaagtcaaagcgctgttcaaccttgaaggcaaagttgcggttatcaccggcggtgcgggcgcgctcggtgaaggtgtagcccgtggcctggcgaattacggcgttaaagtcgcggtaaccggccgtaccattgccaccctggaaaaaaccgttcagcaggtgcaggaagcgggcggcgaggcccttgctatcgctggtgacatgaccgacgaagtggcggttaaaaacctggcggataaagtggtcgcggcctgggggaaagttgactttctgatcaatattgccggcatcgccattcgtcaccccgctgaagagttcgacattaatgatttccgcaaagtgatggatatcaacattaccggcaccttcattccctgcaaagtgtttggcgagctgtttatccgccagggcttcgggaaaatcgtcaatacctcatcggtgcgcgcctttgccggtcatcccggcggctacgcggcttacggtacatcgaaaggggccatcaacttattaaccaaacagctggctaccgagtgggcgaaatacaatatcaacgttaacgccgtcgcgccgactatcttctggacgccgctgacccaggaagtactggaagacgaaaagctgaaaaagatcttcctcgatcgcattccgatgggtcgggctgccgtagtggaagatatggttggtagcgtcgtttacctctgctccccagccgctaactttatcaccggccaggttatttacatcgacggcggctgcaccgcgggttaa

SEQ ID NO: 195623 - DNA, 342 bp, Klebsiella oxytoca
atgaaagtgataccgattagtgaagctagcccttacaacccaccactgcatcacgccatggtggcgctgaagctttgcgacggcgcgttatgcaacgcacaacagttctggtgcggactgtcgcattttttacccggaggcggcgccgagtgggcttatgacgattcgccgacggaaaaactctacgtggtactggacggcgctatcaccattcgtaccagagaggaaacgcgtgttgtcagcaaaggggaagccgttttcctcgcgccgtttgaggggcgagaagtggttaaccacaccaattatccgaccagtatgctggtcatcgccagcaatacgtaa

SEQ ID NO: 195624 - DNA, 657 bp, Klebsiella oxytoca
atggataaaaacgccatgagagaacgcattgcgcgccgggttgcaaaagagcttcacaaaggggacctggtgaatctggggattggcctgccgacgcaggtcgccaactacgtcgccgacgatcttggcgtcatcttccagtctgaaaatggcctggtggggctcggccccacgccggatagcgacagtatcgacgccgatttaactaacgccggcggtcaaccggtcaccgctgtacccggcgcggcgtttttcgatagcgccctgtcattcgccatcatccgcggcggccacgttgacgttaccgtgctgggggcgctggaagtggatcaggagggcaatctcgccaactggatcatccccggcaagatggtgcccggaatgggcggggcgatggacctcgtgaacggcgcccgacgggtgattatcgccatggagcactgcgataaaagaggccagtctaaaattttgccccgctgccagcttccgctgacagcagtcggccaggtcaatctgatcgtgacggaaaaagcggtcattgaagtcaataacggcctgatgttgcgcgaaatcgccgcggataccagcgtggaggaagtggttgcgcaaaccgccgcaccgctacgcatctctgaaacattaatccagttttcctaa

SEQ ID NO: 195625 - DNA, 669 bp, Klebsiella oxytoca
atgctggaaaaagagattatttcgccgcaacgcgttgccgccatggtggaagaaggaatgaccattatgattggcggatttatggcggtaggaacgccagaaaaaattatcgatgcgctggtggaaaaaggcgtgggtaatttaacaattatcgctaatgacactggttttatcgatcgagggatcggcaaattggtagtcaataaacaggtacacaagattatttcctcccatattggcctgaacccggaaaccggacgccagatgtcctgtggtgagcttgaagcggaactggttccccagggaacgctggttgagcgtatccgcgctggaggcgccggactaggcggtgtactcacccgcaccgggcttggcacggtcgtggaggatggcaaacagcagatcattattgacggtcagccctggttgctggaacaccccctgcaggcagatatcgctctgattcactgctccattgccgataccgccggtaatgcgatgttcaataaaaccaccaaaaactttaacccagtgatggctactgccgcgcgcctggtcatcgccgagtgcgaatccatcgtaccaatggattgcgccgccgccgaccgttacaacacgcccggcatttttatcgactacctggttaagggggaagatcaccatggataa

SEQ ID NO: 195626 - DNA, 1383 bp, Klebsiella oxytoca
atgaagcatcgccccttattacataaatcggttgataagggggtaattaaatttattaactgggtgagaattatgcaaaataccaataacattgccgataaaacggctaatcattccagcacccggagtaatttcggcggctggggctggagcatggtcggcttcagtatgttgatgtactacaacttcgccgcctggaccgctgacggcctgaacgttatcgtccaaagctttgtcgatctccacggctgggacttcgccacgcttctctctttctcaacgcccgccggatggattggcgttatcggcgcgctggtgatcgctgaaatgatcaagcgcaaaggggcaaaaatcgtcgctattcttggcctgctggcgctgggattgacgatgatctggtttggccgcgtcacctcttacgccgaatacgctattggcctggcgctgatgaatctgctggctactggctgctgtttcaacgtccccgccactttactgaatagctggtttccaaggaaaaaaggcctcgcgctcggctgggcgaccatgggaatgtcgttctgtaccgcgacgctgatccccattatgtttttcctctttgaccgcttcggcgtacccggcgcttatgccgtcgtcggcgggacgttaatcacccttggcatcatctccatattctggatccgcaataccccggaagaaatgggtttgtacccggacaatgaaccgatttctcgtgaacagcaggcggcaaaccttgcggcccagaccgactatcagagcccctttacctaccgcgtactgttccgcgaccgcgaaatgtggctgatttccgtcggcttcggcctgctgtggctggtggatattggcgtcgtcagccagttgatcccgcgactgatttctgttggctatgataaagaaaccgccgtctggatgttcacctccgccgcgctgatttgcgctattttcagctacttctggggttgggtagatgtgaaagttggcacccgaaaagccagtatcgcttacgcctttttctttgctgtgacccacgcttgtctgctggtacgcggtaacgactacttcacctacttcacactattaatggttggcgccagtatcgctggtatcaaagagctatgtacatcgatggttgggacagtgtatggccgctacgacttttccgccgctaaccgtctggtttcaactattgcctgtttattccgggttagctgttttgcagttgttgccgtcagtctgaaatataccggtgattatgatggagcttatatctcttttatcgccctggatattattgcggccctgttaattttcatgattaacgataaatgcaaaggcaaaacagattctgttgtcaccgtgtaa

SEQ ID NO: 195627 - DNA, 999 bp, Klebsiella oxytoca
atgtactgtgaagattatcgttatgatgagtcaccccccaccttgtcgcaggatgtcgctctttccgatccgcatatcatgaccagaatgatgttcttcgtaaacctggtcactactggttccatttcatctgcggcagagcgtatgggaatatccatttcttctggctcacgatggctgtctgacctggaaaaagagatcggctgtcctctttatcggcgcaacaacaaagccatgccgctgaccgatgccggtgattatttatatcggaatttctgtctgatcggcgagaaggtcggccagctaaaaaatgagctgactcatttttccacccagcgtcggggaacgattcgcatctgctgtacaccggtgtatgccgaacaatatctgatgcccatcgtcgccaactatctggccggaaaccgtcaggtaaatatcgccgtccatgtctccgccttcggcattcagagctggaaagatcacgatatcatcatcggcgccgtcaatgccttaagccaccagcaggaccaggaactccctctggtgaaacgtaatctgatcgctgaacctttcgtgaccgttgcctcaccgcagtatttgctgatgaacggcatgccacagcacccatccgagctggtgcaccatcgctgcctgttcgccagctcgctgaccggcagcaacgactgggcctatgagatcaataacgaacgtcactttttcaaaattcccaaatctcttgaggtgtgtgacagcaccctgttacgaaaatcggtgctttcaggggccggaatagcctacctgccggaatatgttgtgcagcgagatattcgcaatggcaaactgacctgcttgtttaaagagatgaaaacatcacaatggttgttaaacctctattatccagcccgtagtcagataaccgaatgcgtatcctcttttaaacattttttgattgagcaacacactgttacctttgagcaaatacgggcggcgaatcattaa

SEQ ID NO: 195628 - DNA, 684 bp, Klebsiella oxytoca
atgttcgccgaagaagccatcatgatgattcccggctggaacgcatttccacaggcactccagcaggctttactgcgtcagtcgcgcgttcgcagcgaaaaagccggcagtattgtctttcatcagggagccgaagtagaggcaattgcctggacgctgaaaggtcatctctttgctaatgttcatcatgcaaacggcaaccagacgctgctcacccacgtgcctgtaggacgtatgatcttgtttaactttgtctggaagcacacccccttagaccgcaacttcatcgccatgaccgatgtcgaattacttattctcccccgggccagcgcgacgcagttgctagctcaatttgatgaattcaaaatgcaagtaatagattcactcaccgagaggcttaacgatctggatcgggtgctgtacacccataaagtggcctcaagggaagcctgcgtggcggcttttctggtggattgtgaagaaggccaaaagggaccgcgtcgcgagcgtcacattccctttacgatgcagtttatggccgaatgcctgcgcctctctcgtccttttgttgccaaaacgctcaggcatttcgctgaccgccagatggtggcgctcaactacggcaatatcgaagtgctcgatcttgatggactgaggcaggtcgccagccgtgagattatgtga

SEQ ID NO: 195629 - DNA, 957 bp, Klebsiella oxytoca
atgaaaatcagaacgctatctcttaccttagcctttacctcttctcttgctttttcttgccagctttttgccgccgaagggctgacgccgttacagcccggtgcgaccaccggtacccatactggcgcatttccgcccgatgggctgtatatgtcaatgacatccacctatgaaaccggcgtcgtgcgaaacggtagcggcgacacggcgaaaatcgccggagggaaaaataagctctcaaacgtcgggctggtgatggccgccacctgggttcccggctgggaatttctcggtgcccgctatgcggcgatggtcgtacagccctataagtttattcaggtaaaaaataccggccagcacaccaccgaccataccagcggcctgctggggaccagtattacccccctcgctctttcctgggatttacacaacaatttccacgttggcgccgggttagccgtctatttaccggatggcaaaacggcctatacccgcaatgcggcaaccgggcgtaaagagacctccggggataacgtctcatgggaatattggtcgtttgaacccaatatcgccatcagctatctgaccgacgattgggggattacgcttaataatatttttgacttcaatacgaaaaataacgaaaccgactaccgctctggtagcacctggtatctggatgttactgccacccatcgtatcaacaatagcctcaccgccgggcttatcggtaactggactaagcaggtgactgacgacaagattaacggtagaacggtacagggggtagagggtatttattctgccggcaaacgcgtcgaacatatcaaagctggtccgatgatgagctatagcgtcagcggtgtcaccgttaccggccgactattgtttaatttgcacagcgaaaatgatgccggaatgacctttttccatatcggggtttcgatgccgctttag

SEQ ID NO: 195630 - DNA, 405 bp, Klebsiella oxytoca
atgtcattctcaccggacagcaagctaaccatgaaagcgctggaaatggcgtgggaaacccgaggcaaaccagcgggagtgatgttccatagtgaccagggtagccactacacaagcaggccgttccggcagttattgtggcgttaccggatcaggcaaagtatgagccgacgcggaaactgctgggataacagctcgatggaacgcttcttcagaagtctgaaaaacgagtgggtgccagtgacaggctatataaactttagccaagcagctcatgcgatcacaaactatatcgtcgggtattacagctcgctaaggccgcatgactataacggtgggttacctccaaacgagtcggaaaaccgatactggaaaaactctaaagccgtggccagttttagttga

SEQ ID NO: 195631 - DNA, 1053 bp, Klebsiella oxytoca
atgaaaagcgccgtccgtcgcgctggctttcggccgctgacctgcggccgctggcacattctgctgcgccctgcggcggtaaaaatcgccgctgtcgcgctgctcgtcatcctgctgctggcgctgtttggcctgacccgcggcagcttcccgatgccctccggtaccctgttccgtgcgctgctgggggcggacatcgtgggcgaacagcagcgatttatcctctttgatatccgcctgccgcggctgtttatggcgctgctgtgcggggcgatgctcggtctggccggcgcggcgatgcagagcattacccgcaacggtctggcggatcccgggcttatcggggtgaaggagggggccagtattgtcgttctggcgctggtgctgttcttcccggcggcgggcctggtctggcggccgctggcgggaatgctcggcggcgtgctggtggcgctgctggttctggcgctggcccgcgactgttcgcgcccgcgctttattctcatcggcatcggcgtgtcgtggacgctggcggcggcggtgggcatttttatgaccaccgccgacgtgcgcgatgttcaaacggcgatgatctggctggcgggcagcctgcacgcggcgacctggccgctgttggccgtcgccttctgctgggcgctgcccggggcgctgatcctttttttgaccgccagggccgccgatgcggcgctgctcggcgaccgcactgccattggtctcggcgtacgcctgcagcagctaaccctgctgcgctttttcgcgccggtgctgctgacctccgccagcgtttcctgcgtcggaagcctcggcttcgttggcctgatggcgccgcatatggcgcggtttctgctgcgcggcggccaggtggcgctgctctgtggcagcgcgttggttggcgcgctgctggtgttagccaccgatacaattggccgactggctttcgcgccgctgcagatccctgcagggatcgttattgcgctggtcggctgtccgttttttatcgttctgctctggcgtcgccgtgacgccctgtaa

SEQ ID NO: 195632 - DNA, 897 bp, Klebsiella oxytoca
atggacagatttatcagcatgcagatttttatcgcggcagtggaagaaggaagttttgcggcggctgcaagacgctttaagctttcagcggcaatggcaggaaggcatgtcagttctattgaatccaatttaaatgcacgacttattcagcgttcaacacgccgtctgagcctgacggatgtggggcagcgatattatgaacgttgcaaagttattcttgaggctgtggaagatgcgaacagagaagcgagtgatgttcaggcaacaccgcgcgggttacttcgcattgcggcgccggttgctttcggtgcaatgcatcttggtgcgatcgtgtcacgctatctggaactatttccggaggtcagtctggatgttgtgcttgaagacaaatacgcagacctgcttgaaaatcgaattgatgttgccatcagggttgggcgtcttgacgatccgtcgctggttacccggcggctggcgccctgcaagatggttttgtgtgcatcaccagagtatctgaaaaaacacggcatgccagagacgccggaagatatttcccgcgcgccgcgtctggcgttcagccaggcggtttcagcgggagactggacaatttacgaccctgaaggcagcttgcaccgtatcgaaagtgcatgccgaatcacgtccaataatattcagttgcttctggaatccgccctggccggaacaggcataatatatggtcccagttttgttttttgtgagcatataaaaaaggacagactgattgagctgctgccagcgtacaagaaaacggaacttaccattcaggcagtgtatcccagtgcgatccgcattcctttcaaggttcgcagctttgtagattttattgctgaagctttaagagatacacagctgtaa

SEQ ID NO: 195633 - DNA, 1164 bp, Klebsiella oxytoca
atgaaaattaacgtgaacaatataggtatcaatgtacagttacagggcagcggtgaacttgcgctggtatttttgcactattatggcggctcatcccgtacatgggagagcgtgacgggtcagttaccagaccactaccgcacggttgccatcgatcatcgtggctggggcttgtcagacgcccccgaatccggatacaggattgaagaccttgcaagggatgctgaaggcgttatttcagcacttgagcttaaacgctacattctggttggccattcaatgggggggaaagttgcccaattaatggcatcgcgccggcccgaagggcttgagggtctggttctcattgcgccctccccaccttcccctatgctgctttcctcagaggaacgcaacagattatccagcgcatataacaaccgcgaatcagtcgaatttgttatcgataatgtcctgacggcgcggccgcttagccccgcgcttcgagagcaggtcatcgaggacagtttaagagcgtcagaaggggccaaagcaggctggcccggtgtagcaatcagcgaagacatcacccgggaagtcgcctccattaatgttccggtaagagtcatctcaggagagttggaccgagtcgataccccggaaactttgcaaagagagttgctaccccgtgttcctcacgcagcgatgtatattattcccggtacgggacacctttcaccacttgaatcacccggtgagattgccagtagcatatctgcctttgctgcatcgattgaaaagagtgccgcggtttatcgctcccctgatgaaaccatcgccgcctttgatgaagcatttaacgcgagaaaaattgataacttaatgtccgttttcagtaaccgcgccaccatgaaaatggctgatggtgctgtcattgaaagtaatcctgaagcactacggatggctttaatcacgctcacagcatcacggccggttatcaggaaccagatacgtactctcatctctgcgggtgatctcgttctcgctctcattaactggtcgctgacgacgacttcagatgacggcactcaacgagttgagcacggtatcgccacgcaggtaatggagcagggtgcggacaagggctggcggatacgcatttcaaacccatcaggggttgtctga

SEQ ID NO: 195634 - DNA, 1236 bp, Klebsiella oxytoca
atgcgacaactattgcaacatcggcatctggtgatggccctggggctgctctattttagtcagggcatcccgatcggcattgccatggatgcgttgccgaccctgctgcgccatgatggtgtgagcttgtatgcactgacgtttttgccgctggtggggctgccctgggtggtaaagtttctttgggcgccgctggtggataatcattggtcgccacgcttagggcgtcgccgcagttggattattccgctgcagtgcgtggtgacgctgtgtctgatcctgctcagtgtggtcggcatttccgcagcggcggccggtctgtgcgttgcgctgctggccgtcgcgtcgctagccagcgctacgcaagatatcgccaccgacggcatggcggcagaacacgtcagcgatgagttgctgtcgcgcgtcaatgccattcaaatagccggggtgatgagcggcttcttcgtcggtggggggggcatgatgatgctgagtactcgggtaggcgtgcagggtgcgctgctggcgatggcgatcttccctgccgtcagcctgctggcgattggccgcctccgacaacacgccgatctaccgcccgaacgcgccgattcgcgtccggccaacctgctgcgcacgctgcgccgtcacggggcggtgaggttgttgacgctcacgctgctgtcggcggtgactgcggtatccggcctcgggttgtctaagctgtttttaaccgataacggttggacaccggctcaggtcggccagatcagcatggccggcggtatggtgacgctggtgctcgggtgcggtggcggagcctggctggtgagccggctcggggtgtggaaggcgttcgcggttggccttggttgcgcgttgggtgccgcgttatgctggctagcgatggccaactggggcttacaatccggcggcgtgatcgccgcggtgattggaggtgcgctggcttccggcgtgacctcggtcgctatcatgactgccggcatgcagtttgccgcacagggcgatcaggcgggtaccgacatgaccatggtgcaaagctcgcgcgatataggggaaatggtcagcaatatgctgatggtgggaatgaccgccagcctgggctactgttcttccttcgcgttggctgccgcgctggctgtgctgctgctgggcatcaatctggccagcgaccggtactctgcggcggtgcagcggcaagaagagtggaggcgataa

SEQ ID NO: 195635 - DNA, 1413 bp, Klebsiella oxytoca
atgaacgccgtcgcgcgacgggctttggcggcgctgcatcggggctgcggcgcgttgttcggctgcgcgctgttcgtgatcctgttcaccggctgctggagcttggccggcgacagcttcacgctgtggtggaacggcgtgacgatgagcggtgagcaacggccgttggcgcagctgctggacgacgcgaaagcctacggcgaagacggcgcggcgccttacgtcatgcttccgagcgcgcgttatccggtaattcgcttttgccgcgccccggaggactgcgcgctcgcgctgagcgccgtcagcgggcggccgatcagcctgacggcgccgaccacgctgttggtgacgctgcacaagaacctgtttctcggctttcccggtcgggtgtttctcagcctgttcggcattgcgttcactgtgttgctgatcagcgggattgcgctgcatggccgacggctgcgccagctgttgcagctgcggcggcgtcaggggctgcgggtgctgctgttcgatctgcacaatctgttggggctgtggtgctatccgtggctggtgatgttcgctttgaccggcgcattatccggcctcggcgcgctcggtacggtgctgctggctgaccgcgtcagtcccggtgcaccgcagcgagtgatggcgcagctgatgggcggtgcgcaacctgcaccgccattgtcagacgctgggcgtactctcgcgcagacaatggtggcgctgcggcaccagacgccggaatttacgccgcaaatcctgcagcgcgcgccggatggtgcattgctggtggtgggcggtgtcacccgcggtattcccagtagcgcgctgttcgagcaatttcgtttcggcagcagcgagcagccggcgctgatgcggcgtagcgctgctcgtcaggggccatggacgcgcgcgttcatcgccgttcagccgttgcactatggccaatacgcctggttgccgcagggggaggcggctgtgagcgcgatgcattttttgacagggtttggcgcggcgacgctggcgctgagcgggttgggattgtggtgcctacgggagccgcagcaccgtgccgcgcgctttatcaccggcgtctgctgcggtctgacggtggcgggaagtctgctgttggccgcccggccactggcgtcgttccctgccgcctggttgttttgggggatgtggggcacggtggcgctgttggcgtggcgagtttggttggggtggatattgttcggcagtggaatggtcggcggcacggcgctgctggtagcggcgctcggccatatactcagcgtcggccccggcctgtactggctggacagcgctttattgttggtcagcgcggccctgttcgccgccggctccttgttatggcaatcgcgcggcgcctggccgcactaa

SEQ ID NO: 195636 - DNA, 249 bp, Klebsiella oxytoca
atgaatatgcgcgtatgggcggcgtgcctcggcagcgccatggggggcgttaccctggcgctgctgttggtgcacggctatccctcggccgacccgctcgatcggctttacggcgcgctgtttctggcgttgtttggcggcatcgcgttgctgacgtatagcctgctggcgcaggactggcgtcgcacgctgctgcgcgcctggttgtggtggccgctgccgctggcgctgttggaggcgtggcgatga

SEQ ID NO: 195637 - DNA, 2139 bp, Klebsiella oxytoca
atgcgactcattcacctctcaccagtggcggccgcgacgcgccgcggcgcgttgctgtatgcgctgtgcggcaccggggcgctggcgcaggatgcgccggccaaaacggacgtaaaagaagataccctcaccgtgaccgccagcgcggcggcgcgggatgactatgtggctcccggcgtcaccacgctggggaaaatctcgctgaaaccgcgtgaagtggcccagtcggtcagcgtgatcgatcgccagcagatggagcagcagaatctcacatcgctggatgcggtgatgacacgcgccaccggcgtcaccagcgcccccttcgtgttgctgaccaccgcgtggtatgcgcgcggcttcaagatcgattcgttcgaactggacggcgtgccgacgctgctgggcaataccgccagctcgccgcaggacatggcggtgtatgaacgggtggagatcctgcgaggctccaacggcctgctgcacgggctcggtaacccggcggccacggtcaacatggtgcgcaagcacggattggcgcaaaaccgcgctcagtttaccgccagcgccgggagctggaatcagtatcgcggcgaagcagacgtgggcggcccgctgaacgcgtcgggcagcgtgcgcggccgggcggtgatggcatgggaagatcgcgattatttctatcgcgtctcggatcagaaaacccgtttactgtatgccaccgtcgacgccgatctgatgccggataccctgctgcgcgtcggcgcgcagtaccaaaccatcgattccgtcaccaatatggccggggtgccgatggggaaagacggcagcgatctgcacttgccgcgcagcacctatctggacgtggactgggatcgcttcaaatgggacaccacgcggctgttcgccgcggtggagcaccggctgaacgacgactggcaggccaagctgagcggcgactatctgcacgccaagtctcgtctgctgtatgccggcgcctggggaaacgtcgatccggccaccggcgatggcgcggcgctgatgggcggcgcctatcgctttcgcaatcagcagctggggctggacgccagcctgaacggcaagttcgacgcctgggggttgcgtcatgagctgatcgtcggcgccagctacacccatgccgaagaagagcagttcaatgcgccgttcgatccggcgtttcaggtgccggtgaacgtctaccgctgggatccgcacggcgtgccgaagccggcgatcggctcttacagctcgccggggtcgaccaaaaccgttcagcgcggggtgtacgggatgggccgcattaaactggcagggccgctgacgctggtggccggcgcgcgcgaaagctggtggcaactgcgttcgcccagcgacactctggaagagaacgtgcgtctgaccccctatagcggcctgatctgggatttcgccaaagactggtcgtggtatgccagctacgccacggtgtttcagccgcagagcggcaaaacctggagcgggcagatgcttaagccggtggagggccgcacgctggaaagcggggtgaaggcgtcgctgatgaatggcgcactcaacctctcggcagcggcgttccgcatcgatctggagaacaacccgcaggtggatcccgatcacccgggcggcggtttcgatacctggtatatcagcggcggcaaggcgcgcagtgaaggcttcgagctggaagggcgcggatacctcacgccatggtgggacgtcacgctcggctacacctataccgacacgcgctacatccgcgacgccggcaaccaggggcgcgcctacaacagcctgacgccgcgtcatatgctgcggctgtggggcgattacgacctgccgtgggatcagcgcaagtggagcatcggtggcggcatccaggcgcagagcgcgttcagcagcgccaatggcgcggcgacgctacgccagggtggctatgcgctggtcaacgtacgactggggtatctcatcgacgagacctggtcggcggcacttaacgtcaacaatctgttcgatcgtcgctactacaccgggcttttctcgccgcagtggaacaaccgttacggtgaaccacgcaacctgatgttcaccgtcaaggccgaattttga

SEQ ID NO: 195638 - DNA, 261 bp, Klebsiella oxytoca
atgttaaaaattctcaaaaccccggaaggaaaaaagtttctgattaccgtggcatgtgtgtttatcattgcggtatgtgtggtatctaaagcagccttccagggcgtggaagatcagtacaatctgcctatggagacctgggacacatccctgtttatcattcagggcgcatgggtggccatttacagtcttatgttcgcgatagtaggctcactcccctttggtttttatttcctgggccccatgggtgaaaaaggttaa

SEQ ID NO: 195639 - DNA, 1899 bp, Klebsiella oxytoca
atgtccccaaaacaacctcgtcagtctgtgccagcaagtgatggtgccgattacctgaaaaccattcccgggttttcacagatacgtgccggtggcacgaatggcgctcctgttttccgcggaatgttcggctcacgcctgcgtatcctggccaataatggcgaagtgctgggtgcctgtccggccggaatggatgcccccacctcttatatttcccccgagagttttgacctgctaaccataactaaaggcccacaaacggtcctctggggaccgggtaatgctgctggagcaatccgtttcgatcgagagcagccgagatttgataaacctggcgtgctgggaaatgccagcctgcttgctgcctcgaacaatcgctgggatgagaatgccgatatcagtctgggtagtgaagatggatatgtgcgtctgatgggtaacaaatctcgttccgatgactacaaggatggcaatggcaatcgaataccatcgaaatgggataaatggaatggagatatggctctgggctggacgcctgatgcagaaactctgattgaattaactgcagggcaaggagatggggaatctcggtatgctgggcgcagcatggatagttcacagctcaaacgagaaagtctgggcgcccggttcgaaaaatcgaatatcggagagatattccagaaatttgaagcaaatgtctattacaactacgccaaccacattatggataacttttcactgcgctcatctaacagtggtatgtcaggaggtatggcagacaggagcatgggggacacaaaaaacgctgacatggtgatgggcatgaatatgccaatagcgatgtcgatggaagtcgacagacgtactgttggtggtcgtatgatgggcacatgggagtggacggatgtggagctgaaaagcggcgctgatactcagctaaatacccatcgtaataaaacggataatggctgggtcaaagatgcccgtttccacgattatggtcttttcagtgaacttacctggaattcaactgattcaagcaaagtcgtgggcggcgttcgccttgaccgcgtcctcgtggataatttttctgatacaggttcctcagagcgaacagacacccttccggccggatttgctcgtttcgagcataacctcgcagaaatgccgctaatgctctatgccggggttggatatacggaaagattcccggactactgggagctgttttcccccacctacggacctgacagaaccaaagatgcgtttgataaagtcaaaactgaaaaaacgactcagcttgatattggcgcacactatgtcgacaaacgtactaacgcctggatttcagcttatataggtcgcgtaaacgattttatccttttccgttacgatcccaacaatgcatatatcagtcaggtcgataatatcaatgccactatcatgggaggtgaagccggtgtcagctataaactgactgacaactggaaaactgatgcaagtctgacctattcctggggcaggaacacgaaggatggtgccccccttccgcaaatgcctccccttgaagcccgactggggctagcatgggaaagcggtaactggagcactaccgggctggtacgtctggtgagcagtcagcacagagtagcgattaacgaaggtaatgtggtgggtaaagattttgacagcagcgccggttttgctgtggtttccgccaatgccgcttaccgagtgaataagtactttaaagtggacattggggtcgataatcttctggacaaggagtacagcgagcatctcaacaaggcaggtaatagtagctttggctattcatccaattccactgttaacgaacccggaagaacattctgggggaaaattaatgtgacattctga

SEQ ID NO: 195640 - DNA, 678 bp, Klebsiella oxytoca
gtgctgacccagaacggcgtcccgatgagccgttaccgtgcggggcgtctgatgaaatatctgaacctgagcagttgccagcctggaaaacatcagtacaaaaatgcccgtcaggagcatacctgcctgccgaatctgcttgagcgccagttcgctgtgcccgagccagatcgggtatggtgcggagatattatgtatatctgggcaggaaatcgctggtgctatctggcgatcgttatggatctttttgcccgcagggttatcggctggagtctgtcagcgcatgccaataccgcactgataagcaacgctctgcggatggcttatgagacgcgtggtcaaccgcatgatgtcatgttccatagcgatcagggaagccagtataccggtctgaaatatcaacaacttctctggcgttacagaataaaacaaagcgtcagtcggcggggaaactgctgggacaatagtcccatggaacgcttcttccgcagtctgaaaacagaatgggtaccggtgaatggttacgcaggcaaggacgaagcccgacagcaaattaatggttacatattgaactactacaacagcgtcagacctcaccattataacggtgggttgactccggaagagtctgagaacagataccatttttactgtaaaaccgtggccaatattacttga

SEQ ID NO: 195641 - DNA, 183 bp, Klebsiella oxytoca
atgcaggcaacctttaccatacaggacttacgtattattcgtgatctggtacgggacggtcacaggtggagtgttctgcctgattatcactgtctggatgacctgaaaagcgtcagtcacgaaggcagagactgtcccggaaaatcacctttatcttgcctggaacaagagtatttcgaataa

SEQ ID NO: 195642 - DNA, 597 bp, Klebsiella oxytoca
atgatgacacagaaaaatgaaagttcgtcccagataacgccggcgcagagcaacttttttgaagaaaaagcgtttcgttcacggatggttctggttttcgggaacattactgatactctagcgtcagagactgttcgtaggttactgatactggacgccgaatccagtgcacctattacaatgattgtatcatctccaggtgggcatcttgaatctggtgatgctatccacgatgtagcgcgttttgtttcctcgccagtcaatatggttggtacaggatgggtgggcagtgccgccactcacctatatcttggtgcccctcgggaaaggcgattctgtcttcctcagacacgttttctaattcaccagccgagtggtggaaccggtggtcctgccagtgatatagcccttcaggccgcagagattgttaaggctcgtgaacgtgtcgcccgtgtcattgcacgtgaaagtggacagcctattgagcgcgtacttcaagatattgagcgcgatttgtggatgcccgcatcagaggctgtcgattacggtctggtttctcgtatcataacccgacgtgaagaactgccgatcgcctga

SEQ ID NO: 195643 - DNA, 993 bp, Klebsiella oxytoca
atgaaaaagacgctacaggtcgccactgttcagttcacacatcacgctaatgataagcaatacaacctgtccgtaatggaaacatttatccttcaggctgcacaggaaggaactaaaatattggcttttcctgaaatgtgcatcacaggctactggcacgtcactgatctcacggctgatgaggtggtatctctggctgagtccgttgatggcagcccatcactggagcgtataactcaattcgccagcacctttgatatggcaattggcgctggattcattgagctcgggtgcgacggaaaattgtataattcatatgctgtttgtatgccagatggtcaacggcatgttcatcgcaaactacatgcttttgagcatcccgttattgaaagaggtaactgttataccgtttttgatactccctggaatgtacgtgtgggaatactgatctgttgggataataaccttgtcgaaaatgcgcgcgcaacggcattgctaggggcggatattttgatagccccccaccagacagggggaacgaactcccgcagcccacatggtatgaaaccgatccctgtatctctctgggagaaaaggtatcaggatcctgaagcgctggtagctgcatttcagggaagcagcggacgcgagtggttaatgcgctggttaccagcaagagcacatgataacgggatgtttattctgtttagcaacggtgtagggctggacaacggtgaggttcgcactggtaatgcgatgattctggatccgtatggaagggttcttgaagagactctttcttttgaaaatgcgctagtgtcagcttgtcttgatttagaacttttagcaatgtccactggacggagatggattcatggtcgtcgtcctgaattatacgatattttaagccaaccacagggctatgagcgcgattcacgaagtgcgcgtttctcacaggaaatccctcaatttgcagataggaaaagccaataa

SEQ ID NO: 195644 - DNA, 858 bp, Klebsiella oxytoca
atggatatcaggttattacgatcttttgtaacactggcagagcaagggcgatatcacgcagcggcggacatcctttgtgtgacgcagcccgcgctgacaaagcagatccaggcgctggaacagttaactggactgagcctgtttcagcgaggccggcaaggggcaacgctgactgtcgccggggaactgctctatcctctcgccggtgagttacttcaccagcatgaagaatttagaaattatgttgataaggtgaagagtgggagcgtgggaagacttgcgctgggattcggtatttcctcctttcagctggcaccatcgttagtaagaacttttcgccagcattttccggaagttaatgtgtcgcttaacgacattccttccgaagaacagtacgctatgttactcagcgagcagctgaacgcaggttttgtgcgtctgccggccccagcgccgctacaaacacgcgtacttctgaatgagatgcttgtgcttgctgtgccgacaacctctgtgagtgaagggatggatattcaatcttttcttcatcgttatccgctgttgcaaatcagccctaagcgagggagaggattgtcggatcaaacggtacgttttttacaggcaaacaaccttcatgagagaaacgtcgccaccgctgatgatattcatgttatgctggcgttagtggcggcgggaaatggtgtggcattgctgccttcaggtgcccgtcatataatgcctgcaaatgtatcgcactttccagtatcgggggaacacgccaggtggcagattggcattgcttggaatccattattgcagaataagttacgcgataattttatcgccatgatcccttaa

SEQ ID NO: 195645 - DNA, 966 bp, Klebsiella oxytoca
atgtccaaaactatagtaaaccctcgttggcagaaatcagacccacgatatttgtactcactggttgtaaggcgctattttgcagaaatgaaaactaaagttgaaattgcagaagagcttggggtatcacgctttaaagtcgctcgtctcattgatgatgctattgagcagggatatattaagtttgtcttccccaagcagcgggaactcgatgaagagatggccagtaacctctgcaaaaaatatcaacttaaagatgctgttgtcctgcctgcttcagagacctggtccacccaggagcagttgaacgtcaaactaggagggatcacggcgaattatctaagtgaaacgctccgcgaggggatgaaatttggtatggcctggggaagggtattgtccagcacagtcagccagcttgtgtctttaccccctctagaggttgtccaactctccggtgtacatccgggcatcgagtttagtcaggggcccgtggatctgattcataaaattgccgccatctctcatggaaaagcacatcccatgtacgttcctatgtgggtcgatgatgaaagtctggcaaaaaaactatcgggtgatcaggcagtgctggacactcagaaattttatccggaaatggacgttgtgattacgggaatcggtgcgtggaaaacgggttcatcaagtctgtgcgatatcttcccgaattcctggcgggattcgctgatcagccaggatattaccgccgatgtctgcgtgacgctggttaacagcaaaggggaaataattgacagtcccatgagccgcctggggtttggtattacgactgagcaactgaggacaacgaaaacactgatcggtgtggcggggggagaagagaagtatgaaggtatagttgcctctttaaaatccgggcttctgaacgtgttaattactgattttgatacggccatcaggcttctgaactga

SEQ ID NO: 195646 - DNA, 330 bp, Klebsiella oxytoca
atgaaaaattacactatcgttttgaacgaattagcgtcgattgcagaaaatatcaatgagcaggaattcaacgccatagtggattccattataacagcaaactccacacttgcgggtctggctgacctggtgttgatcattccggcgaatgacagcacccatcctatgggctcactctttgagcaggctagcctgctgacatacgacagaatggtgatggcattaatggaaaatctcaatgagacgagccacacgatgaaaacacgtcacgccgacattgaagaacaccggcgcggagtatattgtatggctatcagttcagaagcctga

SEQ ID NO: 195647 - DNA, 459 bp, Klebsiella oxytoca
atgaaacttgaaattcttgttaatgacgttgaagaaaagatcactgactggcaggctgcgattacgtatgccgggaagaaactgctggagaaggactatatcacgccagagtacattcaggcctgtctggtacgtgaaaaaacttatccgacgggtttaatgatggccaatggtcagggtattgcgatccctcatgcagactacaccttggtaaagaccaacagcatcagtatcgttcgttttgacaaaggtgtgatctttggccagatggaagatgccgacctgaccgttgaatgcagcatcatattcaacctggcatttgccacgagcgatcagcatatgtcagtactgcgtcgtctgttcacacttttccaggagctgtcattcatagagtcgtgtcgtaacctgaaaacagacgaagttggaaaatacgttgaagagatgctttcagcatcctaa

SEQ ID NO: 195648 - DNA, 450 bp, Klebsiella oxytoca
gtgagcacaactactgtcaatgtggcggatgtcaccacctgcaagaattacgatgaagtcctgcagcatatccacgtgacccaaactgccgctggtattgttaaagaaacctatctgaatgctcttcgtgagcgtgaagcggattaccctaccggtatactgctggatggttactctgtcgctatcccacactgcgacagtcagcatgctattaagccagctgtatatattattcgtctgccagaggctattgaagttaatgaagctgatggtgatggcaagttgtgggtcaatctggtgattaatttagttgtcactcacccagccgaccaactgcagcttctgaaggctctgtttaaccatcttcagatggcagatttctaccatcagatgctggaacttcctgctgaggaagcaaaagctatgttcatcaacacaataattaaataa

SEQ ID NO: 195649 - DNA, 561 bp, Klebsiella oxytoca
atgagcgttcaacaaaacactttcgatattttgagcgagctgcaacaaaatgccctcaaaattgacgacgcgcaggcagaacagtttgttaaccagataaagaaagccaatcatatcttcctgcagggcgcggggagaagtggtatcgcgatccgcggttttgccaaccggctgctccatctcggattttcagtgagcatggtgggtgagatttcctctccgcatacaaaaccgggcgacctggtcattattggttccggtagcggtgagaccggcagcctcgtcagtctggcgaaaaaagcggcctcttccggtgttaatgtcgcgctggtgaccatgaaggcagaatccactattggtcagctggccacgagtgtgctcgtcttacccggcacagtgaaagaggataatgaccgtcaggaaggcactttttcacagccgatgggttctgcttttgaacaactgtgttttatcacttacgacgctattgtgcttaagctgatggctgagctgggtgaaaccagtgacagtatgtttaaaagacacgctgatctcgaataa

SEQ ID NO: 195650 - DNA, 624 bp, Klebsiella oxytoca
atgaataatgaatgttcttctggtggcattggtcatctggcatggtgtgcactggtggcacttggtctccggaagagcgagcaactggttgtgtcagaaacggaagagaacctgtttctgatacgctggctcgcaacggcccgcagacaaaagcgattttccccgcatctcactggccatatcgactggctgctttcacaggggcgtcggttgggcccccgtgcacgtctgacacaaaaattgcaatatttgtggctcttgagtaacggggaactcagtgaaatgccagacatactccggctgacgtacgcaattgaagtcatcaaggctggaggctggcaatattgggtggtcgatgaaaagaagtggttaactggcactttcagcaaccatatccattccgtttgctttatcaggaccgagatcgagcaagggtttgataataatggcaaacagatccgcccactccgggtgaaagcaaagggacatctggtgaagcttatgtcgcttctggaatgttttggatggagccttcaggagatgaatactctggcgaatgttacggatccccgaggtccgaggatgttcctgttgtcatccccgggagcacccctgttaaattaa

SEQ ID NO: 195651 - DNA, 783 bp, Klebsiella oxytoca
atgagtgaaaaaaattacctgtgtcagcgtatcctccttaccaacgacgatggcatttcggcgccgggtctggagatactcagaacgatcgccgcagaacttgcaccggaagtctggatcgttgccccagcggaagagaaaagcggagcttcccagagtgtcagccttcaccgaactataatctgtgtgcagtcagggcaacatgaatatgccgtaaccggttcaccggcagattgtgttgccctcgcctgtgcagaactgatgcgtgactgtctgcccgatttattgctttcaggaattaatcgaggcggtaatctgggaaatgaaacggtattttctggcaccgttggtgctgcgatgactggtttgcttttcagcataccgtccattgcgctcagtcagaatacggatgcacagggaaccgcagtgtgggaaacggccagaaagacaggcgctgaaacagtgcgcactctgttcagagccggatggccatccgatgcctgtctgagtgttaatttcccggcgatcccccccgagaaagcggggcctctgatggtgacgactcaggggacaggatgtctgaacggtttcgtcgttaataaactcggggatgaaggaacaggccggtttacttgcaacgttgatctacgtcattccgggtgtgagtctgatttatcggacgaaacaactgccatcgccgcaggatatattgccgttacgccactgaaatacaatcgcactcatatggctggcctggaaaggcttcaacacgctcttcgataa

SEQ ID NO: 195652 - DNA, 441 bp, Klebsiella oxytoca
atggcgaatatcaccacagaagcggcttcagcattcagacaaaacctcaccagcctggcccggcgtttacgccgggagtcacagaatacgccacatacctggtccaccatgctgctcctcagcgcgattgatcatgccgaagatggcattacccctggtgaacttgcccggagtgaagatttccggacgtctaatctggccaccatgctgaaagggctggaagcgcgcgggctcattgttcgtatcaaggattcagacgatcgccgtcgggtgagggtgtatctgacggagacggcccggcagctactgtcggagaacaggcgtaagcgtgatgagtggttgtttaaagcaatgattgatggcctgaaacaggaagaagtcgatgtgcttctgaaagccggggaaataatgaaaaccatcgcggactcaggcataaaatag

SEQ ID NO: 195653 - DNA, 1635 bp, Klebsiella oxytoca
atggcaagttactttattggtgtagatgtgggtaccggtagcgccagggctggcatttttgacctcacaggtcgtatggttggactggcaacgcgtgatattgagatgtatcggccgaaagccgattttgttgaacaatcgtcagataacatctggcagtgtgtctgcaatgcggttcgtgatgcgatgagtcaggctgatattaatcctatccaggtaaaaggtatcggatttgatgctacatgctctcttgttgttctggataaagacggtcatcctctgacggtcagcccttcaggacgtagtgaacagaatatcattgtgtggatggatcaccgcgcgataagtcaggcggagcgaatcaatgccacacatcatcgcgtgcttgactatgttggaggaaccatttcaccggaaatgcagacccctaagttattatggctaaagcaacacatgcctaacacctgggccaacgctggctttttcttcgatttacccgattttctgacctggcgcgcaacacaggatgacacccgttctttatgttcgacagtgtgtaaatggacattcatggggcaggaagacagctgggatgcgagctatttcaggacgattggtcttgaggatctcctgcatcatgatgcagagaaaattggtcgttacgtcagaatgatgggagagcctctgggtcatggacttacatctggcgcagccagagaaatggggcttattccggggacgtctgtcagtgtgtcaatcattgacgggcacgccggcgctctgggtatcctgggagcgtgtggcgtctcgggtgaagtggcggactttaacagaagagtcgccttaatcggcggtacgtcaacaggccatatggccatgtcaccagaaccacggtttattaacgggatttgggggccttattattcagccattctccctgcctactggcttaatgaaggtggccagtccgcaaccggagccctgattgaccatgtcatccagtcacatccctgttatgacatgctgctgacgcaaggtaaaactgccggcaaaacaatctaccaggtactcaatgaactattgagaacgatggccggtgaaccggagagtattgcttttctgacgaaggatattcacgttcttccctatttccatggcaaccgctcgccacgggcgaatcctacgctcactggcgcaataaccggccttaagttatcccgcacgcctgaagatatggcgctgcaatatctggccactatccaggccattgctcttggtacccggcatattattgaaaccatgaatcagagtggttacagcattgataccatcatggcaaccggtggcggaacaaaaaatccggtgtttgttcaggagcacgcgaatgcaacaggctgcgcgatgcttttgcccgaggaaagtgaggcgatgctgcttggctcggccatgatgggtacagtagctgcgggagtatatgagagtctgacggaagcgatgggagcgatgagccgaataggtaaaactgttacgccgcaaaccaatagcattaagcaatactatgaccggaaatatcgtatcttccatgaaatgtatcaggacctgatgaagtaccgtaccatcatgaatcagaactga

SEQ ID NO: 195654 - DNA, 954 bp, Klebsiella oxytoca
atgaaatccgtaacaagatttatgaacacagacccggtgttacgtctccagtgcattatcattattattgtcgcacttgcattctctgcgacccttggttcccgctatttcagtgtagcgaacttccagtcaattggttctcaactacccatgctgggaatgttgacgctggggatgggaattaccatgctgacgggcggtataaatctatctattattgccggcgcaaatgcctgctcattggtaatggcagccattatagtgagtcaccctgctaacccgttatttatcgtgctggcactactggcaggtatagccgtcgctgtggttatcggtgtcctcaatggtgccatggtcgcctgggtgggggtctcccctattctggccacgctgggtaccatgacgctgatttccggcctgaatatcctgctttcagatggcgctgttatttcagggtttccggatgcaatccagttactgggtaatgcaacattccttgggataccggcagcattactgctgtttattggtgtgacggctctgctctggattctgctggaacacaccacacttgggcggagtctttatctgcttggctcgaatgaacaggcgacaagattcagtggagtcaataccgcccgggtgcagttagccgtttatatcatttcagcattacttggctggctggcagccattctgatgatggcaaaatttaattcagcaaaagccggatacggagaatcctatcttctggtcaccattctggcctctgtcctgggaggtattaaccctgacggtggatttggccgtgtcattggtttagtcatggcccttatcgtccttcagatgctggaaagtgggtttaatttgttaggtatcagcagtttcctgaccatggcactctggggtggtgtgctgatcctttccattattttacagaatcgcaaagcctga

SEQ ID NO: 195655 - DNA, 990 bp, Klebsiella oxytoca
atgaataattcaaaattgtcccggcttgcgggataccatgaattctggctgggaattatggtgctggttctgatagccggcctgtcttttcgtaccgatgaatttcttaccatcggcaatcttacagatgtcgcaaccagttatgccattttaggtattctggcctgtggtctattcgtcgtgttaatcgccggtgggatcgatatttcctttccggcgatgacggcaattgcccaatatgttatggcgagctggataatcgctcacaacggtaatttcatcctggcgatcgccatcgcaatgactgtcggcctgctgttaggcatgtttaacggctttctggtctactggcttaaagtccccgccattatcatcaccattgcgacgttaaacctttactttggattactggtttattccacggacggaacctggctgtacggttttcctgactggtttatgaatggatttaactggttttcatttaccgcagcagatggatatgactatggcctgacgctccccctgttatgccttgcaggtgtcgtaattttcaccgccgtgttgatgaataatacccgtcttgggagacaaatctatgcgatgggtggtaatcgtgatgccgcatcacgattaggattgaatcttttgcgcctgcatttttacgtttacggctatatgggcattctggctggtattgcggccgttgtacaggcacagatcacacagtctgtcgcaccaacatcattaatgggttttgaactgaccgtactggccgccgttgttctgggtggaaccagcatgacgggaggacgcggtacgttaaccggtactctgcttggcgttgtattgctggcttttttacaaaatggcttaacgctgctgagcgtatcgtcttactggcacaccgtcttcagcggcatcattatcattgccagcatatcggcaactgcctggaacgaaaaacgtaaattactgagggagttataa

SEQ ID NO: 195656 - DNA, 1500 bp, Klebsiella oxytoca
atgacaaacaccaccgagtttataacgcttgaaaatatcagtaagcaatttcctggcgtccgggctctggataaagttaacctgaccttaaataaaggtgaagtccattgtctggctggacaaaatggttgtgggaaaagtacaataataaaagttatttccggtgtttatcaccccgagaaaggctctaatattactattgacggaaaactgtttcatcatctcacaccgcagctttctgctcactatggtatccaggtaatataccaggatttgtctttattcccaaatttcaccgtagcagaaaatatttcaatacaccgttatttacctggtggtgacctgatagtgcataaagagcagatgcggaaactcgccagagaaacgatgacacgcatcggtgtaaatttagatcctgacaggaaagtagaaaaactgtcgattgcagatcggcagctggttgctatttgccgggcaatcgccgccgatgcccgtctggttatcatggatgaaccgacggcatcacttaccagaaatgaggtaaacgggttactgcgcgtggttcgtgagcttaaagctgatggcgtatgcgttgtttttgtcagccatcgtcttgatgaagtgatggaagtagccgatcgtatcagtgtcatgcgtgacggaaaactggtgggaacatggccggcaagcgaactcgatgatcatgaactggcgtggctaatgaccggacagcgttttcattttactcgtttaccagagaaaaactttacagctgttccaccgttacttgagattcggaacctctcccgcaaagggagatatcagaacataaacctgtcgctatgtggtggcgaaattgtttctattgtcggtttgctgggggcaggcaggacggaactgtgcctgagtctgtttggaatgacacaaccagaacagggggagatattacgggacggtatacccatcaaactgaaaaataatcacgatgcgattcgtcatgggattggttacgtttcagaggatcggctgacgcaaggcctcataatggaacaatccatatatgacaataccatcgtcactgtttttgatcagctaaaaaccaaagccgggctactggaccatcagaaggcagagcagcttgttgatgaccttgtccgggaactgaaaattaaagtttccgataccgcactgccagtcaaaacactttccggagggaacgcccagcgtatcgctatcgccaaatgggtcgccacgcaacctaaaattttaatccttgattccccgaccgttggtgttgatatcgcaaataaagaggggatttatcagatagcaaaatctctggccgaccagggaatggcggttctgatgatttgtgacgaaatcccggaagcttactataacagtcaccgggttctggtcatgaaaaatggtgcgttagtggctgaatttagtcctctttcctgcaccgaagatgaaattgccgaggtggttaatgaataa

SEQ ID NO: 195657 - DNA, 462 bp, Klebsiella oxytoca
atgatccggtcgcccgaaacagatctaggattgtcccacgtagcgctggtcgtgcgcgatatcgataagagcatcgccttctatcaggaatttgctgatcttcaggtaattcatcgccgaatcgcaggcggcgatatcgaagaggtcgcgtggatggcggatggctcgcgcccgttcgcgcttgtcctcgttgcatctacgaatttgaatgatacgccactcggaccattcggtcacataggcattgcgtgtgccaagccgggagatgtctcgcgccgtgcggccgaagctgagcgccgcggcatcctgcggtctgccccgcgcaatgatgggccgccggtcggcctctggacgtatatctctgacccggatggcaacacgcttgaattgtcgttcgggcaggaaatagcattcagtatcggcagtggccacgatgctctcgaagtgtcgtcccgaacttga

SEQ ID NO: 195658 - DNA, 393 bp, Klebsiella oxytoca
atggctctccccaagctacgcgtcgcccgtcccaccgacgatatagaagcgcttattcgtttttatggagacggcctcgggctggaaatcttgtatcgatttgaggaccacgatggtttcgacggcgtgatgctcggacatgcaggcgcaccttatcatttcgagttcacgaaggcgcatggacatgccgcaggtcgcgcgccgacacgagacaatctcctcgtgttctaccttccggaccctacagaatggcaggttgccgtcgaaagaatggaaggagccgggttcagagccgtcccggcgttcaacccctattgggatcgctcaggccgcacctttgaagatcccgatggctatagggttgtgatccagcgggctgattggcatgcctga

SEQ ID NO: 195659 - DNA, 438 bp, Klebsiella oxytoca
atgactacaattagacgctcccgtcctgacgagggcgaccgcgcagtggaaatttggcgtggcgcggttgatgcaacacatgactttctctcgccggaggatcgcctttccatcgaagagatggtgcgtggctttctgccccaagcgccgctttggcttgccgtggatgccaatgactatccgctagccttcatgctgatcgacaagggccacatggaggcgctgttcgtcgatcccgcatgtcgaggaactggaattggtgccgcgctggtacgccacggccttacacttcatcctaaaatgtcaaccgacgtcaatgagcagaacagtcaggcggtcggcttctatgaaaaaatgggcttcaggcacatcgatcgttctccgctcgacgggcaaggaaaaccttatcctctcatccacttgaagtacggtgaatga

SEQ ID NO: 195660 - DNA, 885 bp, Klebsiella oxytoca
atgaatcggatgttcacacgacggactacacttctgatcccactcattgcattgccttggttgttcgggcgtggcgcgcgcgcagatgacggccgaagcattgtcgaagaccggctccgggaactcgaaatccgcagtggtggtcatcttggcgttgcggtcctggacaccgcgaccggtcaggtaattgggaaccgtctcgatgaacgcttcgctctgtgtagcacgttcaaggctctggctatcgcgttcacgctcgctcgcgttgaccgcggagaagagaagttggatcgaagaatcttcttcggcgagaaggatcttgttgcgcctttcaaggcgaccaagccgcacattgctgacggtatgaccgtcgagcagctctgcgaagcggcagcaattgtcagcgacagcaccgcggcaaatctgctgatggccagcttcggcggaccttctgcactgaccacctatctgcgctcaataggtgatcaaacgacccgtgtcgacaagaccgaactggctctcaatatcgtcaagccgggagaaaagcacgacacgacttcgccgcgcgcgatggttgggacactgcagcgggtcgtgctgggctctgctctgtcaccgacgtcgcgggcgctcatgaccgattggatgatggcgtccagggatgcggcggcacaacgcctgcgggctggtttaccggctgggtggcggatcgcgaacaagcccgggacttgggaaggaatatcgacgaacgatatcggcgtgctctttccacccaatcgtcctcccatcatcgtcgctgcttatctcggcaaggcgcgcggctccgtgactgatcaggaagcagttttggctgaagtcgcgcgcatcattacgagaagcgcataa

SEQ ID NO: 195661 - DNA, 789 bp, Klebsiella oxytoca
gtgaaatacgatacaagctctgcgatcatcggtcataaagcagttggacatggtcctcagaaggtcatcgtactgcatgattggcatggagaccacaccttatatgcctccatattgccgtaccttgacggcaatatattcagttacgccttcgctgaccttccaggctacggattatctcgaggtcacgcggtgccagccagcatccaacaggttgcatcgactattatcgccttggccgatgagctcgattggccgcgattccatctcgtaggccattccctttccgcgatgatcgcacaatacgttgccgtattggtaccaaaccgtatcgccagtctgactgctatctgtccacttccagccagcggttcactggccagtgatgacgcgctagtgttcttcgcttccaccgccagggacgacgacgcatttcgcaggttgattggttatttgtccggccaattatcgaaggggtggacggaagccaaacgaattcggagccgccttgcctcctcgcccgaggtgaagatgcaatatttctggttgttccgaacggatttctcccaacggcttctgggttcgactacgaaagtcaaccttatccttggggaccatgatccaggtttggatgaagcgaccgtcgcgcctctatttcgacaatggtttgacgatctgacagtggagacggttgccaattgtggtcattacccaatggaggaagcgcctccgtacttcgccaccacccttgagcgcctgctgatgaaggggaccatcggggcttcataa

SEQ ID NO: 195662 - DNA, 426 bp, Klebsiella oxytoca
ttgacaacctatctgcgctcaacaggtgacctgacaacccgtatcgacaagaccgaactggctctcaatatcgtcaagcccggagaagcgcacgacacgacttcgccgcgcgcgatggcgggcacacaacgcatcgtgctcggctccgctctgtcgccgacgtcgcgggcgcacctgaccaagtggatgatggcgtccagggatgcggccgcacaacgcctgcgggctggtttgccggcggggtggcggatcgcgaacaagcccgggacgtgggagggaatagcgaccaacgatatcggcgtgctcttcccgcccgatcatcctcccatcgtcgtcgcagcctatctcggcaagccgcgtggttccgtggcggaccaggaggccgttttggctgaggtcgcgcgcatcattacgagaagcgcataa

SEQ ID NO: 195663 - DNA, 900 bp, Klebsiella oxytoca
atgcgccgtaaaattcccagcaattccgctctcatggcgttcgaggcgtcggcgcgtcatggcagcttcgcacgcgcagcggacgagttggcactgaccgaaggagcaatcagccgccagatcggtcggctggaggctttcctcggcgtgacgctgttcgagcgcgtcggcaatcgcgtcaggcttctgccaagcggggagcggtatgccgcccaggttcgcgagtctcttgatcggctggagcgtgacagccagtatctgatgggacagcccagcgatggcgccagcatcgatatcgcgacgatcccgactttcgccacgcgatggctcattccccgccttggacgatttcaggagcgccaccccaacatcatcgtgcatcttgccgaacgaatggaaccattcgtgctcgccggaagcggtttcgacgccgccatccattacgagcatcccgcatggaccggaatgaggacgcaccggttgctgcacgagacgctggtgcctgtctgtcatccggctcttctcgacaaaggcgcagacgcggtgtcgctcgaccgcctgccacgtctgcaccgtcgccagaacccggatgcctggcagcgttatgcgcaggaaaccggaatcacgctgaccaatcctgcggtcggctcatactacgacctccacatcatgctgatcgaggccgcgattgcgggacttggcgttgcgctggtgccgcgcctctatgtcgagacggaattggcggaaggtcgtctggccgcaccctggcctgaaggccagtcgatctccaagaccttcagcctgatccttcctgagccgatccggttgagtgacggtccgatacaggcatttgcggattggctgctttcggaagtgcacactctgccccgcaccagctaa

SEQ ID NO: 195664 - DNA, 549 bp, Klebsiella oxytoca
atgatgatttatacggttgaatgcagctttgctgatccgcacagcgaagcggaatggaacgcgttttacagcctggataagctgcccgccctgatttctgtcagcggctttcacacctcacagcgtttcaaagcgttgagcgccggctgtcccgtctacctcgctctccattcgatcgacagcctcgatactctgaccggcgaagagtatatccagaaaggcggcggcaatttcgcccgttggcagcaacacatcaccgattggcaccggaacctgtacgagggcatcgagcgcgccccggccgtcggcgaaaccgaatatctggtgctgagcacaacaggccctcagccgctgcgcggattgggcctgacgccgtttgcgatgcgcgcggtcgccatggagaagttcccggaacagcgctggctcgcgaaagcgggtcgcgacatgatcggagatatcggacatctgccggacgatgttcacgtctatgcgccgatgacgccgcaattgacgaacggcgatgacgtcgcctctgcaagcgcgcggtga

SEQ ID NO: 195665 - DNA, 327 bp, Klebsiella oxytoca
atgccgaatgtcaccctctacatcttgcaagacaggatgccgccggatgagatgctcgtggcgctcgcggagcgatgcacagcgctctgcaccggcatccttcgggcggccttggagaatgtgcatatcatttttgtcgccgttcggcatggccgggggcatccggcctttgtcgagatccaataccgcctcgaaccgttccggacagcggccgtgatggaccggttcatgaaggaattggacgacgtcattcagtgcagcaccgatctgaccgcgcgcattcgctgcttcggctacgaagcgtcgagcatccacgcacgcaactga

SEQ ID NO: 195666 - DNA, 840 bp, Klebsiella oxytoca
atgacgatgaccgattttcccagccagacggtcggcgacctgaccctcacagccatcagtgacggctatctccacgccagtttcggcctactctcgaatatcgatgctgacgatgcctctcaaatgcaggagaatgcggggatacgggatcacaccactatccacatcaactgctatctggtgcgcggaggtggtcgcacggtcctgatcgatgccggcgcgggcggtttcaaacaatggggcggccggctgaaggacaacctcgcccaggcgggcatccagcctgctgctattgacgccatcctgttgacgcacgcccatccagaccatgtcggtggactgctcgaccccacaggcgaagccgcattcccaaatgccgagctcatcgcccatcggcaagaagtcgcgttctggcaggatgacggcaatctgagccgcgcgccggagcgtgcccatggcaacttcatcttcgcccgtcaggcgtttgccgcttatcgtggcaggttgcgcatgttcgagaccggagacgtgcttcccggcatgacgtcagttccgctccctggtcatacggcaggacataccggctaccgtcttgagtccggtggccagaacctgttggtctggggcgacatagtccatttcccagagatccaaatcccgcggccggacgtgtcgatcgcgttcgatcaggatacgcatctcgccgcagtgacacgatcgaggctgctggatattgtcagttcggaacggcttctgatcgccggaatgcatcttggtgagctcggtttcgcgcgcatcgagcgagcggggagaaattaccaagtcgcctatgaggagtga

SEQ ID NO: 195667 - DNA, 363 bp, Klebsiella oxytoca
atgagcgacgtcattacaatcctgggcaatttacgcgtattgtcgtgcgacccgaacggtcagcacatttctacagaggctgacgtcaacagcctcatcggaaccgcctttggcgaaagggccgatctggtcgcactacccgcagtgcgattggcgcagaatttcttcgatctccaaacgggatttgcggggctgctcgttcagaaattcgtcaattaccaacttcgcctggcagtcctcggcgacatttcaggtgcatgcgcgcgaagcagagcgctgaaggacttcgtgtatgaatcaaatcagggatcgtcgtgctggtttctgggcgatctggaggacttgggcaggaagttggtctga

SEQ ID NO: 195668 - DNA, 852 bp, Klebsiella oxytoca
atgtcgaaactcgacaccgtgctcgtcgatcaatatcggaacgttcttggtcaatggccggttgctgccgatcacctctgggtcgatacacgagagggcaccacttttgtcgtcgcctgtggtcccagggatgcgcccccgctcgtcctcctgcatggagcgctgaccaattcggcaatctggatgttcgatgccgaactctggtcgcagtcgtttcgtgtctacgccgtcgacgtgatcggggagccaggactgagtacagctaaacagcttcccttggaaggcggtaggtacgcgacgtggctcgacgacgtgcttgccgggctggatctggaaagcgccgcctttgtcggcgtttctttcggagggtggcttgctctggattacgccgtccgccggccgtctcgtgtcgatcgtctcgcgttgctttgtccggcgggaatcggccgccagaagccgttcttcctaaaagccttgccgcttctgttgctcggctcctggggaaaggcaaaggttcgcgctatggtcatgggcccgcagccgcaaacgttggccgacagggcgcgacctttgatggatctcgtctccagcattcattcgaaagtccgcccacggtcgattacgattccgctcgtctcagatgcagatctcaggagcctgaagatgcccgccctcatcattgttgggggacgggatgctcttatccattcaagcgagaccaggcggcgggtggagagcactatgccgaacgcgcaacttcattatctggaacaggcctttcatcacctccccaatcagcgggaaaccatcttcaattttcttcgcggcaagcaaatgggacgcattccatga

SEQ ID NO: 195669 - DNA, 420 bp, Klebsiella oxytoca
atgtctgaagagttttatactgtcggtcaggcggcggagcgtttgacgctgcacccgaaaaccgtgctccggcttatccgtgaaggacgcctgcaagggacgaaaatcggtaaatcctatcgaattctacgatcccacctggatgcattcgccggcgcggcgcgggctccgcagcagccgatcacggcacgagtatcctgtgttgttgatgtgccgaatgtctcccccgaactgtcgcgtcgcctgacagtaaccattcaggcaatgctgctttctcaggagcgcagccccgaccgcgttcaattcaattccgtctatgatgcggagttgcggcatttgaagctgattatgatcggctccgtatccgatacttccgaactcttgaggagcctggacaggcaactggaggcggtcaggtga

SEQ ID NO: 195670 - DNA, 1170 bp, Klebsiella oxytoca
atgcctcttatctgtgctgcaaccttgtctcgtctggccgggcgtatgttcatccttacgttggtgctgtttttactcgcgcggttctcttcaccggcactggccggctggctgacgttcgcagcaatcgttccgggtttgctggttagtccggtcgcgggcgttctactcgaccgcgtaggtccgacgatcgcggtcaggatcgacatgattgccagcgcaacattcattggcgctatcagcatcgttggctggctcgattgggcaacgccgccagttctgcttttcctggtaatcctgttctctctggccggcccgttgggcgcggcgggtacgcgaacgctgttgcctcgcctggtgccctcccatgcgctcgatcgtgcgaatgcgctcgatacagcgatctatgccgtcgtcgatgtcgtcgggcccgcgatggccggcatcatcgtcgcttggctcgggcctgaaagcgcgatgtcggtgatctccttctcttacgccgctgccgccatctgcctgtcctttgtaccgctccttcccggattggcgtccagacagatttcgttcatgcaacagacagtggaaggtattcagatcgtcgccagacaaccgacgctgcgcggcctcgccatctcctattcgatgtaccaggtcacctggggcgtgctctatgttgtggtcccagttttcgtcgccagccattatgacgcctcggttggtagctcagtgacaggcttcctgtgggctgcgatggggattgctggcggaattggcgcacttctcgcaggacacctgcgaacgaccggtcgcgagcgtcacattatggcgatcggaatggtcattacggccttggcggcatggccggtggctgcaaagtttggttttggcggacttgccatcggccttatgcttgccggcgtcatgtccggtccgatcgatgttgctcttctgacgcttcgccagcgtcgaaccgatccgcaacagctcggccgcgtcatgtcgatttcgatgagcctgaatctggccggtttccctctcggttccgccttggccggcatggtaattacgtcgtccttgtccgcaactttcgttctggcaggcatcgcctctatcgttgcggctatcgcaacgatatcgatcccgtccgatataaaatccgttgcctga

SEQ ID NO: 195671 - DNA, 210 bp, Klebsiella oxytoca
atgaaagatgctcctgaattcgttgcaacgaaaccaccccataacctcccacgatatcgccttctgaccggcaaagatgacgcgactttctgtcaccgtatttcagaggcgctggatcttggcttccaactgcacggctctcctgccgctactttcaacgggcaagatgtcattgttgcgcaagctgtcatttggccgcgcgccggctaa

SEQ ID NO: 195672 - DNA, 465 bp, Klebsiella oxytoca
atgatcgagacgagagcagcaagatatgaggatttggcagcggttcattcgatcacacaaagggcgtatgctgcctggctgccggtcttgggctacccagcccagccgatgacggatgatcatgggcctcgcatcaaacgaggcgaagttctgctggcttgccatggtcaacatgtgctcggcctgattgctgtagaacctagtgacgaccatcaccttattttcagtgtcgccgttgatccggacagcgctggaaaaggtatcggccctcgccttatcgcagaggcggagcgacaggcgttccttgccgggaagagacgcatgatgctctacaccaacgcgctcatggtgagaaacatcgagctttatctgaagctcggctatcgagaaacgggccgccggccaaatacggcgaggccgggatttacgatcgtagatatggaaaagatgttggacgacatatga

SEQ ID NO: 195673 - DNA, 615 bp, Klebsiella oxytoca
atggaattatcatccgtacttatttttgcgttcgccctgttgctgaacgctggaaccccgggtccaagcgttgccgctctggtttcgcgcgtgatcactagaggctggcgagacatcatgccgttcgtcgctgccatgtggatcggtgaagtgatctggcttacgatggcgatggctggcctcaccgcgatggcgcagaccttccaatttggctttcatgtcttgaagtggctgggcgtcatctatctctgctggctggcgttcaagatgtggcaggagcctgtcggcgaaaatgctgaagatcttccgcgttctgcctcatccttgtcgatgttcggtgcaggcatagctttgaccctgggaaatcccaagatcatggtattctatattgctctcttaccatccttgatcaaactttctgcggctgggattgtcgaatgggggatccttgcagccattacgcttttgacgctggccgcagtagacctaacctggatcttctttgctcataaagcccggcatctcttgcgaactccgcatgctacgcggatcgcccaccgaattggtgccgtcgccttgggcggtgctgcgaccgctatcgcgaggcaaaactga

SEQ ID NO: 195674 - DNA, 1224 bp, Klebsiella oxytoca
atgaaatatgattttgatgagtacgtaagcagagagaaaacagacagtctcaccgtggacggctggcgggaatacctgttttcgggacagtccgaatttgcaatgcggtatccggcagaagggctaatcaacctctgggttgctgacatggcttttgccacaccagagccgattcttcaggccatcagagaccgtctggatagaaaaatactcggctacactaaaatctacgacgaagaatactatgagatctttggcagctggtgtgagcgacaatatggtcaccgtttcaaaacggaagacattgtgctgtctccgggcattattcccgcgctgaaccgtctcgtcccgcttctgaccgacatggatgacagtattcttattatgacgccttcatatggcccgtttaaaaaggcgggtgaatacagtcagcgtcgcgtggtgtactcggcgttaaaaaaatcagcaggcggctgggaacctgactgggaagactttgcacgcaaagccagtcaggccgatttacgtgtgaaaatccttttcctgtgtaatccgcataacccgaccggacgagtctggcggcctgatgaacttaagcggattattgaaatttgcctggccaatgacatctgggtgatatctgacgaaattcactgcgacctgtcccgaagcggtatcggtcatacaccggccgcctctcttttccctgattctacacgcattattacctgcatgtcctcgagtaaaacattcaatctggccgggaatttgttggcaaatattattattccggatcccggtgtcagaagcgagtggcgtctcagacacgacgagttcatctctccactgagcctggcagcaaacaaagcggcgtggagtgaatgtgatgactggcttgtccatctgagggaatatattgacggcaatttccagtacctgcacgactatctcaaaagctatttacccgaaaccaggttctcgatccccgaagggacatatctggcctggatagatattagccgctacctgcccgacaccgcaggtgaggatttatcgctgtattttgcccgggagtcaggggtccttcttgaagggggcttgctgtttgtcgacaatggggacggatatatccggttaaatctggcctgcccacggagtatgctgacagcagggatgaaaagaatttcacaggtactgcggataccggctcctcatcgtgtataa

SEQ ID NO: 195675 - DNA, 870 bp, Klebsiella oxytoca
atggccaattgcgcgctcattcttaaaatatccccggcaatgctggcgtttgctgcaaactctattctgtgccgtctggccctgcagggaggccacattgatcccctttcattcagcagcctcaggctggccagtggtgcactcgtcctgtcacctttcttgttttatcacgcaaaaactacattatcgctgtggcgtccgctgagcggattttacctcatggtgtacgcagtgctcttctctgtcgcctatatccatctcgataccggggcaggtgcgctgttactttttggtgccgtacagtttgcgatggtgatccacggattatttaaaggggaatcactctccgttatgcgggcttgcggtttagttattgctctggcaggaattgctgccctgctgttacccggggcgaaggcaccgccgctttacagtgcacttatgatgatcgttgccggattagcctgggccgcctattccgtcagggggagggcgggccaggcggccggggcttcaacggcggcaaattttgtactcgccacgccgatggctctcgctctttcgttgctgtttatgaagcagggtcactatgatgctgcgggcattgctttgtcattgctgtccggtgccgccgcctcagccggtgcatatgtattgtggtatacccttttaccctctctcggctctatcaccgccagtacccttcagctcagcgttccctgtctggcaatgctagggggtgtggtattcctggatgaatcactgacggtcagaacgatattttctgccctggcggtgctgactggcattgtgatggtgacacgcgagaaatccccccgtcagtcgatgacaaaggcgagagaaccttaa

SEQ ID NO: 195676 - DNA, 636 bp, Klebsiella oxytoca
atgaaaaaatttaattttgctgctctacttccgggatttttggcgctcaataattctgtatgggcaagtgattcatccaccggagccagtgatttgcctggtatgactcttaatgaacatgatttagtgatagccccacttaacaccgaagttccattctacattgcagggcatcgcagtcatagctcccatcgaagccatagttctcaccgatcatcatcaggtggcgggtactatggtggcagcactccttattatccaaaaacatacagctcaccaagctcatctgggtcttcaagttcaggaacaagttcctcatcgtcctcttcctctgtgcgttcgcttcgttctaacgacaataacaactctactactacgaattctgttggaactacagaagctaaccgtgcaagtaatgggctgacttctggtacagagaagcgtaagcgcttaatcatgcgggttcaattcactttgctggatagaggttattacaacgggaatattgacggcataatggggccttccacaaggcagtcaataaaaaattatcgcattgcgaacggactaccaacacctgcaactgaaacgctggatactcaattattgaactcgttaaatattttggctcgttaa

SEQ ID NO: 195677 - DNA, 192 bp, Klebsiella oxytoca
atgtccgccctgtgcggaaaaatctacaataagcgaatgcgtaatatttacgatgagatgtgcctgcggggtaaacctaaaatggtggccattggcgcgctgatgcggaaactggtgcactggtgttatggcgtcctgaagaccggaaccgtttttaatgacgaaagcctgaaacaagtactgtcaacctga

SEQ ID NO: 195678 - DNA, 789 bp, Klebsiella oxytoca
atgtttccagtcggcattgacgtaagtaaaaacactctggatctttgcatgctttatgacggcatcaaaggacgcataaaaacccgtaacatccaaaataacagacattcagttgaaaatattcttcgctggctgaggcttcagcactgcggcccggaagatgttcatgttgtgatggaagctaccggtgtttatcacgaacggctggccactgagttacatgacgccgatttccgggtttctctggccaaccctcaccgcagtcgggagtttgcacgtggcatgggaataatgacaaaaacggataaggtggatgcttatatgctggcctgttacgcattccttaagaaaccacaccgctgggagccgccggcacccgaaatcagatatctcggtgcactcctgcgacgacgggatgttttgctgggcgatgccctgcgtgaggaaaactggctggaaaaatacctgtcgacagacacacctgcagatattatcagttcctgcaggcgtatggcgcagcttctacgcgaggaggtaagtaatatcgagcggcagattaaagcacatatcaaagcctgccctgcactgaggcgtgattatacactgctgacctcaattaaatcggttggtccccagctggggatgcatatgctggtcgtgcttcgcagccataactttgcatcagcagagcaggctgccgcctttctgggcgtggtgccgatcgagaaacgctcaggcacatcggtccggagtcgaccccggatgtcgaaaattggccccctcagttga

SEQ ID NO: 195679 - DNA, 138 bp, Klebsiella oxytoca
atgatgcaacagaaaaaaaatgaccagaaaaaagtgactcttaaaaaactcaataagaaagccagtaaagtaacgcgtggatctgatggcccaatcattgagttctttaatccaaatggagttatgcattacggttga

SEQ ID NO: 195680 - DNA, 618 bp, Klebsiella oxytoca
atgttcaacatgactcattatctgcgctttagcatttataaaaatgacttggttgttattgatataaataatgatgagttctttattatgaacgacatcaatcatgaaaatataaaccggcttaccgacattgaggaggagttattggctgcaggactaatacaatcactaacaccgattagcgataacaatgaaaatttctatgatgaacgatggttaccaagaaaagcagaactgcacagaattaatcctttcttattattaaaggcatacagcatttttttaaaatgcaaaaaaaatcttgaccgcaatggttattacggaattatatacaacctgaacaatatcaaaaaaaatgacaggtgggataaatactcaccggaagctataattaactgccttaattttataatgccatttatacactgtgaaaacccatgcctgatttattcttatgtattagttacgatgttaagaaaagcaactggtaaggggactctggtcgtcggagtcagaactcgtccctttataagtcatgcctgggttgagtttgacggtgaaataatttccgataatgtttacttacgggataaactcagtgtcatcatggagatttaa

SEQ ID NO: 195681 - DNA, 1590 bp, Klebsiella oxytoca
atgcttattatcacaggaaataaaacacctacgggactagaggattacatctgcaaacataatatgtttatctatgcagatgatacctacgagaaatgggattataaagataaatatgtattattcaaaggttattgttttgatgaagacgggaatgaaattacaataaacaagcattcatttctccctgaagtgctggacaaactgcccgcgcttagtggtttctttgttttaattactatatctaaagataaaattgttatatataaaagtctcagtaggaatactgatatattttataacgctgacgataacaaccttactataagtgacaacatcaaacttctgtcagatttatcgggtaaaaaacatatagactcaaatttttttagcgcttttgttaataatgcgtgggtttcagtgttccttagccctataaggggtatagaaaaaataaacggtggttgtaaatacgtttttgactctgccggcgttcatgtttttaagcacgcaaatatcaccccttctaataaagattttattgaagtcacttcaaacatgataaaatcagcatgtaaaaacaaaagggtaattttgcatttatcaggagggttcgattcgagttttatattttatatattaaaaaaatgtaacattagctttgaagtctatacccatgctcctgaccgatatgataatgactcagaagttatcagagtcaaagagttatgtaccaaaaacaacatcccatttaaagttgtgaccggttttccagacacgcttaaaaataataaggagatcagcatcccctcggatgttaatgtcattgagaatgaatcagaagataaccaatataatgagctattgaataatcaggacatcgttttcttaaatggtcacggtggggattgtttgttcgttcaaaacccctcactcaagagtgttcatcacagattgaaacatgggaaggtaatcaacggactatataatgcttataaactatgcaggctaaaatatttgtcgttctcggatataattaatccgaaaagcaaaatcaactgtaataactggtttactgataaaaaatacaaagacttttataaacatcctttactaatgcatattgacgaaagtagtccagagtacgaccatatggccaacatgttatatttcatggaaacccttccactacagttaaaagggggcgcaatgatgttttctccatttctgatgtcttgcgcgttcagggcttttatgaaataccgttatgagtataattttagctcagaacacgacaggttcttagccagaaagatagcatataacatcgcgcacgatattcgattatttgatgtacgaaagcgttcctctaataaccttttgtttgagtttttacataaaaacaaagaaaggttacattcattgataaatatgggatttacccgggggatggggaatataacgactgatgatttgaaagagtcgctggaagttaatacatcgattggtattgatggtaatgcaacaaaatttctaaaattaatgatgctcagtcgctatgctgaaatgaacatgctgacaaaggaataa

SEQ ID NO: 195682 - DNA, 1758 bp, Klebsiella oxytoca
atggataaaaagaactcaacatctaaagtaattaaaatccttaccaggaatggcctgagaaattttgtcattgtgttttttctttcggttttttcgtcagcgttattatcaattactccggtttatatatcgtccattacggggcgtttaacaaataacaaccctcaagggatcgaatcgatttatgttatcggagccatgtatgtcatcacacttggaatacaaaagtgtttgcaattcctttcagtatactgccagagccatttaagaattgacgccataataaacatttcgcgtgcctatctgcagtcattatacgaaaaagaaagaacgctggctccggatgaaaacactggggatatcagtcataagttaaatcaggcgactaacgatatctatgtcatcatcagattgcttgctacaaatctatttccttctgttttgcagattctgatatctgttgttttcatattcagttcaggcgatgtttttacctcggttttatttttgctgtattcatttgtatttattgttgttaatacttatttcagcaaaagaatattaaaaagcaaacgagttttacttgatagtgggcgaaaaacatatagtcttatcaccgatagtgttaaaaacatatcacttgtcagaagcatgaacacctttgattttttcttcagtcgatttcgtgctactttagagaatgaccgtaattcccaacgggactactggcatttaaatatcaaaagtcagatagcctccgggcttctaaatttgattgtgtttggtgttgtgtttttcaaggtgttaaatgatacggtaaatggtttagttccactcagtcattttatactgattacatcttacattattctttttattactcctctggaggggttggctcagtcacttattgaattaaaagaggcgagttctaatcttaatgaattcctgaaaaacatgaatcatgggaaggaaagtaaaaatcttgtcagaatggacggcagcattgatatcttcgccaaaaatattgagtatacatataatgatcaaaatgcgcagcaaaatttcaaacttggccctgtaaacctgacattaaaatcaggtctgttttacagtttaaccggagagaacgggtccggcaaatcgacttttataaaaatattaaccaggcaattaaaaaattacagtggtcaattgacaataggaagcaaagattaccagtctatcctggatgatgatttttataatattgtatcgtatgtgtcccaggatgatttcatttttatggatacgttgagatttaatcttcagattgcgaaccccaaagcaacagaagaacaaatgctgcaagcgcttgagctatctggattgagcaacatgaatgacaccagtctgcttagcagatcaatcgctgacggcggtgttgatttttccggcgggcaaaggcaaaaactgtcccttgctcgtttattactgcgcaatcctaagatcatcatacttgatgaagtatcctcttctatggatataaagacggaagaacattgttttcgcactatcaggagcaaattccctgacgcaacaatcattaatatcactcaccgtccagcctcactaatattgtctgatgaaattattgtctttcaggatggtaaagtagttgagtcaggtactgtagatgacctaatgaatgcagggcattatatttcagatcttatgagaaagtatgcctctgaaaaaagtggaagagtaaaggtttga

SEQ ID NO: 195683 - DNA, 642 bp, Klebsiella oxytoca
atgaaagtgagttatctgacaccattattatgtatcggtatgctgaccctaagtggttgtaatgaccctaaaaaaccgtctgaaagtaatttcaaagaagcagctcagcaatatctggacactgtttatccggtatgttatatcaaagcaaatttcccgtataaaacggatggaatttcctttaacaacatgcctgaagtattacatgccatggcggaaaaaggtctgctaactgaaaaggaattatcgcgcaaacatattgatgcttcgtgggggattaaatctcatgatatagtggtaaatagttatgatctaacagaggaaggaaaaaaatattataagccggatgcggcaaaaaatatgcgaggcgaaaatattggcggtttctgttttggtaaagctacagtaaccgaagtcagtaatttcactgaaccatctgatgccatggggcaaaaaatatccagagtatcattctcttataaagttactgaaattcctgaatgggctaaaactcctgaaatcctctctgctgaccgtcagattaaaaaagatgtcgattcagcaaataacggtatgaaggtgaccaacgtattcgtactgactaataacgggtggatacatgagagattatttgggaagtaa

SEQ ID NO: 195684 - DNA, 219 bp, Klebsiella oxytoca
atgaagacatttaaaccctttttcatgatgtttctcattatcgggttaaaaaccctgatacattattatactgtcagggaaatccaccataagaaaaaggctgggatcataatgaccacagccagtgttgcccctaaaatcctccatgttgttttttttgtgaaagtaaaagagcaagctattaatgaaattgccagaaaaagggaaacaggccagtaa

SEQ ID NO: 195685 - DNA, 801 bp, Klebsiella oxytoca
atggctgctaaagagctttgtcttacgactggcgcggttagtcggcatatcaaaaatctcgaaacaaaacttggggaaacattattttatcgggggcataaaaaggtgacgctgacatcgcgaggacaaatatttgccctgacctgcaagaaaatactcgatgatttgtcggtagctgaaacatcttttatggaaggctccgctgtcctggatataacggttaactgcctccccacctttgccatgtactggttaataccgagactggctgattttcatcatgcctttccgcacattcatgtgaacgtcgtgacgagcacgggtatggttacttctggctccgatattgccgtccgtcgagaccccgctcattttcgggggatagaagctttaccttttctgatagaaaaaagtgtgctcgtgtgcagccccgattattttcatcagcaaataatgcagcctgcaaacaacacactcatccatatccgtgtccgcagtgatttatggcgaaaatggtctactgagagcttaagggtgcctgagaatgtcacacgacatctttaccttgaccatacctttgcagctattcaggccgcagaggacagtctggggatcgcgcttgtgccgcaaatattttgtgagaagcacctgacaagcggacgactggtcatgctgaacgaattcggaacactgatttccggtacttatttcctcgttatgcagactaatatcaaaccgggcatacaggagttttcagagtggctggggaaaaatattgccgctgcacgcgaacagccttaa

SEQ ID NO: 195686 - DNA, 1182 bp, Klebsiella oxytoca
atgaaacacaattctgaactgaaaaaatttaaagtgagtacgcaattatcaatgcttggcaggaaccctgatgagcagagtggctttgtgaatgcgcccgtctaccgtggctctacggtggtttacaaaagctgtgaggatatccgcaataaaagggcacggttctcttacggcactgccgggacgccaacaattgaaaatctggaaaacgcatggtctgctctcagcgattcagccggtacggttatttcaccatcgggtctgggcgcactggcgctggcgcttttttcagtgacacgggctggcgaccacattctggtaactgattccgtttatcgcccaacccggaatttttgtaatacgctgctggcaaaatacggggtctctgtatcctattatgacccactgattggggctgctattgaaggacttattcaggacaataccaaggtaattctgctcgaatgcccgggttcacaaagcttcgaagtacaggatattggcgccattgttgcggtagccagaaaatataatatcagcacaattattgataatacctgggcgacacccttgtttttcagagctcatgagcatggtattgatctgtcagttgaagctggtacgaagtatctcagcggtcattcagatctgctgatggggctcgtaacagcaaacgcctctcactggccggcattgcgtgaagcttatgatgcaatggctatgctacctggtgcggaggattgtttcctggcgttgcggggcctacgtacgatgcacctgagggtaaaagaggctgaagcccgtggtttggaaatagcgcgctggctgaagagtcagcctgaagtaagcagggtactgcatccggcttttgaggaatgccctgggcatgaaaattggaaaaattattttacaggctccactgggcttttttccatagtacttaaagatcggtttaatcaggataacgtggacgacatgctggataacatgagtattttcggaatgggtttctcatggggggggtttgaaagcctcatcattccatttaactgtacagaataccgcacggccacccggtggacgcctgaaggcatgacgctgcggcttcagattgggctggaagacatggacgacctgaagcaggatctgcaggaaggtctgaagcgattgtataaccggtaa

SEQ ID NO: 195687 - DNA, 1335 bp, Klebsiella oxytoca
atggttaagttaaaacgtagatgtctcttgtttaacttacataatggtaacatcatgaataacatctctgaaatttctgaaagggtagctttaaataaaataccctttacaagctatgatgctggctgggttattctttgtattggtatggcaatcggtggcggtattatttttctgccagtccagattggactgaaagggatctgggtatttaccctgtcggtcctgattgcatacccggctctctatatgatgcagtcactttaccttaaaacattatcacaaagccctgaatgtaaagattattctggtgtgataaccttttatcttgggaaaaactggggattctttctgggggtggcatattttattatgcttctcaaaggaatgttaacctactcgctggcggctacctttgacagtgcatcgtatttacagacattcggcatatcgtctgacaaattatcagataactggtggtatggacttgttgttttagccttactcgtcagtattgcagcccagggtgagaagttgttgttcaaggtttctggccctatggtgctggtaaaactggcggtggtggtgcttttaggtctggtcatgatccctcactgggatatgcggaacatcagtaaccttccgccttttggtgaattactggttggcacagttctgacgttaccttttacgctgttttcaatcctttttgttcagatcctcagtcccatgaacgttgcctttcgaaaagtagagccagacccgcaaattgccaccctgcgggcgttacgggtcagtcgtattgcttatggcatcctggtttgtgctgtacttttctttgccttttcatttaccttttccctcagccatgaacaggcaactgaggctgctcagaataatatttccgcaatggccatcgtggcgaaagttatcccgggcgaggtggtcaggataatgtccgttcttctgaatatctttgccattgtaactgccttttttggcatattccttggctttcaggaggcaatgaaaggaatagttatgaacatcctttcacgttttgtagatgagaaatcgataaatgaaacgggtgtcagtatcggtgtgtcaatatttatcgttcttttgttgtgggtatgggtgctgacacactttccgatcctgctactacagcagataggggcaccggtttatgggattgtctcctgcatcattccctgctacctggtgtttaaggttacccaactcagaaaatactattcctggcgtgtgctgtttatctcagcaacgggtgttctgctgtgcctctcgcccttttttaaattgttcgagtaa

SEQ ID NO: 195688 - DNA, 930 bp, Klebsiella oxytoca
atgctaagttcaggtacattgagtcagttgagtgtttttgtcagaatagtcgaaacaggaagctttacaaaagcagcccatgagctgggactatcccgctcagctgtcagcaagagcctgtcaaaactggaagaacaactgggtaaagtccttataaaaagaacaacaagaaatattttccttactgaacagggtgaagctgtttttaaccgtgccatttcgctgctggaagaatgtgaagatatgttttctcaggtacgaagtttctccgaaccggaggggcatctgcgcctgtcatcttctgtagcttatggggccaacatactgccagagttaattacctcttatcaaaaaaaatatccgcttgtaaaatttcatgttaatttaaatgacaatattataaatttatcggaaactaactttgacatggtcctgaggataacgaaaaagcttacagagtctgaaagcaattactatctcgggaaaattaactggatatattgttgctccccacagtacctaacaggaaagccagaaattaaaatgcccactgacctgatccatcatcgttgcctcaccaatccggtaatggcatatcatgataactggattttttcaggagaaaacggcgacatcatggtgccagttgaatcagctgttacatctaactcaagcctgacattgttaaatatattattatcccataatggcatatcctgcctgccggactatctggcctcaatatatatcaaaaaagggagcctggttaatatacttcctgaatatcacgcagggctctctcatcatttatatggcattgaaaaaaaatcaagatatatcaacccattagtaagatcatttatcgaacatttacggcatgaactaaccggacctgataccttacccggacagaaaacggctcatacctga

SEQ ID NO: 195689 - DNA, 1071 bp, Klebsiella oxytoca; identical to SEQ ID NO: 195613

SEQ ID NO: 195690 - DNA, 225 bp, Klebsiella oxytoca; identical to SEQ ID NO: 195612

SEQ ID NO: 195691 - DNA, 129 bp, Klebsiella oxytoca; identical to SEQ ID NO: 195611

SEQ ID NO: 195692 - DNA, 222 bp, Klebsiella oxytoca; identical to SEQ ID NO: 195610

SEQ ID NO: 195693 - DNA, 528 bp, Klebsiella oxytoca; identical to SEQ ID NO: 195609

SEQ ID NO: 195694 - DNA, 285 bp, Klebsiella oxytoca; identical to SEQ ID NO: 195608

SEQ ID NO: 195695 - DNA, 585 bp, Klebsiella oxytoca; identical to SEQ ID NO: 195607

SEQ ID NO: 195696 - DNA, 681 bp, Klebsiella oxytoca; identical to SEQ ID NO: 195606

SEQ ID NO: 195697 - DNA, 159 bp, Klebsiella oxytoca; identical to SEQ ID NO: 195605

SEQ ID NO: 195698 - DNA, 1005 bp, Klebsiella oxytoca; identical to SEQ ID NO: 195604

SEQ ID NO: 195699 - DNA, 192 bp, Klebsiella oxytoca; identical to SEQ ID NO: 195603

SEQ ID NO: 195700 - DNA, 1233 bp, Klebsiella oxytoca
atggggaatataataaaagacggaagtggcagttattttccaatgttgtttattctgccacttgccggactggctgaacttgcatcactgtactctattcaggcgctgctaccaaaactgagtgaggtttatcatattccgctgaatcaggttggcatgatattatctgccgaagtagggttcctggcatttgccatgttgttcagcggttcgttatcggatcgctttggtcgcaaacctgtaatatttgcatccctttttgccggaggtgttttgacgttactgtgcgcgctggcaccatcatggcaggttttagttatcttccgggcactgctgggtattgcggtcagcggtgttactgcagcaattacggtatatatcagtgaagaggtctctccgggtatggccgggatcatcaccagttattttatctttggcaattctctgggaagtatgtcagggagggttattgcgacccagatgatggagcatttttctgttgaagttatattttctctttttggttgtgtcctgattattattgctcttgcggtgaaattcctgttaccggcatcgagaaattttaaagcatcctcatcactacagttatcggttgtcttccgggggggactgaaccatatcagaaacattaaagtttcgttatgtttcataacaggttttattctgttcggttcatttacgtccatctttaattttttagcttttaatttacacaatgctccgtacaacctcgactatacatggattgggctaataccactgagtttttcccttacttttttcattgcaccttatgctgctcgtcaggcaatccgatatggatcaatgaatgttttaagttttttaattagttttatgatggttggggtgtttattacatttattgctgagtctgtctggttatttatatctggcgtggtgctcctttcagctgcattcttctcatcacattcaatcattcttgcctgggtcagtgccagaacatccagtgcaaaaggacaggccacctctttttatttactctcttattattccggtggtgcggtaatggggtatgtcaatggctggttgttcgccatacaagggtggggcggtctggcgatatcctgtcttgttatgctgggcattgggcttatgatcacacgggtgatatcagcgaaatacgagtatcaaaaagcagccgagaaaaacagtctttccgaaattatttag

SEQ ID NO: 195701 - DNA, 1437 bp, Klebsiella oxytoca; identical to SEQ ID NO: 107996

SEQ ID NO: 195702 - DNA, 624 bp, Klebsiella oxytoca
atggacgagtttaatcagattacaggtgtcattgctcccatgcctgacgcgaatattgataccgatgtcattatgccaaagcaattccttaagggaattgatcgtgccggtctggataaaggcgtgttttttgatctccgttttaccccggacgggcaactgaatgaggacttcatcttaaacaggcctggctggcagaatgcttcttttttgctgacaggtccaaattttggatgcggttccagccgggagcatgctgtatggggtctgaaacagctcggtatccgggcgctgatcggctctacttttgccggtatttttaatgataactgccagcgtaacggcatactgaccctctccctggacgatgcttcagtaaaacagttaagccggattgcaaacgatcctgaaatgaaccgtatcaccgtttctctcacggacggggagatcatcacacaaaatggtgtatttcctttccatgtcagtcagatggttcgtgagatgttatctgctggaggggatgctattggctggacgttaaaatatcagcaggacataacgcggtttgaaaaacagtatttttcccgctccccctggctgaaaccacaaccggtaacggactga

SEQ ID NO: 195703 - DNA, 870 bp, Klebsiella oxytoca; identical to SEQ ID NO: 107998

SEQ ID NO: 195704 - DNA, 1977 bp, Klebsiella oxytoca
atggcttctccttcactactgaatgatgcgaacgctctgctctattcggcgaagagttttaccgctgcgatgctcgcatactatattgcattatcaattggcctggagcggccttcctgggcaattatcaccgtatatattgtttcccaaacctccgtcggagcatcgctaagcagaagtttgtatcgcctggtaggaacggtaattggcgctggcatgacggtattaattgtacccacgttcgtgaattcccccgtattttgcagcgtgatactggcaggctggattacattctgcctctatttgtccttgctggaacgtacgccccgggcctatggttttgtccttgctggttacactgcgagtctgattggcttccctgctgtatccgatcctggcgcgatttttgacatcgctatcactcgggtacaggaaatcatgatcggtatcttctgcgcggcacttattcatcgctatgtattgcccgcgcgcatctcaggccagttcaacagtaaattatcgcagacgctgctcgcggcgcgacagcgtatcgcagagactttaacaggcaaacccgatcctgtttcctcgccgctgcatatggcactggcattgcagttcctgcagggtatcagccatcatatcccttatgattttgcgttctctgtaccggtccggcaagcgagaaaaaggcttcatgacaggcttgcgcgattagtcattgttaactgtgagttacgtgaccgtttagcactgatagcgaagatacctttcgatgtgcaaattttaatggatgatgttgaggtctggctggcctgcaaagatcaaggaaaatttaaaagcgagggggaagcgctcaaaaaacgcagtgaaaaattactgcagcgctatgtcgtacatgagttgacgtttgtagaagcactgaatgtaagttttatgcgctacctgacagaggccattgtcctcgtgcagcagtgctatcgtctttcggatgccattcatcacgcgaatcagatgcctgcgcactcagaaatgaataccgtgaaagggtatgtattccaccgcgatcctcttactgctgcccgcaccgcattgggcgctttcaccatcattttgagcggctgcatagtgtggattttctcggcatggcctgatggcggtacggcagtatctatccttggcgtttgttgcacactgtttggcagcttcgatacgcctgccccgcatattgtgaaatacatcattggttccctctggggagttgtgataagcctgatttacagcttcgttctcctaccgcaagtcagtgattttatcgtgctggtagtggttctagctccggtatatctgcttgccggatcgctccaggcaaggccgcccaccacgtttatggcgatggggatcacactgacgctgcctattttgtgcgagctgggtgctcattacagcggggattttgccgtggcggtgaatacctctatcgcattattttctgcaactggctttgcggtattcagcatgggctttctgcagactgtgcaagcagatgcggcaataaatcgcctgcttaaattatgccagcgcgatattaaccgcagcgtgaaaggtgtgttgaatactgatgaaactctctggatcaacctgatgatcgatcgggctgcgttgatactgccacgtttgccgcgcagcggacagtcatcagaacaggcattgaatcatcttttgcacaccctgcgtataggcctgtgtgtaatgcgattacgccgatgggatgcgcatgcagacaaagaaataaaagaggttctcaattgtcttacacactcgacggatattaacaccttacttgaacggattgtcagcctgactgagcgtagcctgtccgtagcagatgaactatcgcggcatcatgttaatcaactggttgatctgtactgcgcattaagcactcaggaaatggagcctgtcgatgatcaatga

SEQ ID NO: 195705 - DNA, 789 bp, Klebsiella oxytoca; identical to SEQ ID NO: 107962

SEQ ID NO: 195706 - DNA, 1389 bp, Klebsiella oxytoca; identical to SEQ ID NO: 107961

SEQ ID NO: 195707 - DNA, 492 bp, Klebsiella oxytoca
atggctgatacgttccagaatgaggtgcccaaggcacgcattaatttaaagctggctctgcacacaggaggcgcgcagaagaaagtcgagctgccgctgaaactcctcaccatcggtgatttcagtaatggcaaagaagaccggccattatcggaaagagcaaaaatcaacgtcaataaaaataacttcaacagcgtactttcggaattcagcccggaaatcagcctcacggtacagaacacgctggccggcgatagcgccgaagaaaatattcagctccgcttcgccgatatgaaagatttcgaaccggagcaggtggcccgccagattccccagctccgcgccatgctggcgatgcgtaatttgttacgcgacctcaaatccaacctgcttgataacgccactttcagaaaagagcttgagaaaatcctgaaagacccggcgctgacgcaggaattacgcgacgaaatgagcgcgctggccccgaaataa

SEQ ID NO: 195708 - DNA, 477 bp, Klebsiella oxytoca; identical to SEQ ID NO: 5326

SEQ ID NO: 195709 - DNA, 939 bp, Klebsiella oxytoca
atgaaaaaaaatattgttggtaaatattaccgccagcctcatgaaggctggccttctgttgaagatttacaagtgtttatcaccgttgcccgaaacggtagtttctcccgggcagcgcttgagcttgggcaatcggcttcctatatcagtaaacggatcgcactgcttgaaaaaaacctgaatacccgcttattttttcgcaataaccggatggtacgtctgaccgttgacggtgaaaatgccctctccggagcgatacagctggttgagcagatgggtgattacgtcagcagcattacagagccggatgatatgctcagcggcaatatcaccatcagttgctctttcggttttggaaacgagtatgttgccggggcgctgtcagggctgatacggtcgtatccagggcttaaagtaaaattactgctcagcgatcgcgatgttgatctggttgaagaagggatagatattgagatacacgtcgggaatgattttaaagaaatttatatagcgaaaaaactcgccacaaaccgtcgtattttgtgtgcctccccggattaccttcatcaggctggtatgccatcatcaattgatgagcttgttgatcatcattgtctgatgctccaggagcgtaatgctgttcttggaaactgggtgttgacggatggacaacaggaatttacctgccgtctgaatacgtttcatacgtcaaacagcggcagtgttgtgctgacctgggcattactgaaccacggaattgtattacgttctacctgggatgtggagaagtatatcgaaaatggcaagctcattcatatcctccctcaatggtatcaggaagcggatatctgggctgtgtatcctcagcgtccgtctaccagcgggagaattaaaacgtgcattacttatcttacccggtacttttctgagcgattttag

SEQ ID NO: 195710 - DNA, 1239 bp, Klebsiella oxytoca
atgactgcgaaagatcagtttgctgctcatgttggtttggactgggcggataaaaaacacgatgtctgcgttcagtttaaaaacggtgatcgcatattccatgtgattgaacatacgcctgaggcacttgatatctggctcaatgagttacaccagagggcgaaaggcaggattgctattgccgttgagctgaagaaaggcccggtggtgtatgcactccagaagtacccatttgtcactgtttttccagtacacgcgttgtcactggcccgctaccgacaggctttctggcccagcggtgcgaaggatgatccgcaggatgctgagctggcattagacctgatgctacgttatccccacaagataaaagccattgaagccgacaatccggatatccgattactccagcaattagttgagcagcgccgactgctggtcgaagacaagcgtcgttttgttaatcggctcatcaatacgcttaagcagtattaccctcagcccctggaatggttctcccatcgggacagctcactgttctgcgagctaatcattcgctggccgagtctgcaacaactcaaacgggctcgcagcgatactgtccgtaattttatgaatgctaaaggtggtcctgctgttgcatataccgaacagcgggttgcaagtattgccagcgctattcccctgaccacagataaaactgtcatcgaggcaaatgccttgatggcaatagcactagcatcccaaatcaaactgacaggcgacctaatcagaacctacgatgaacgtattgaatccttattcgatacgcttccggatgcagaactgttcaaatcacttcctggaatgggaccgtgtatgggcccacggatgcttgcagcactgggtgataaccgcgaccgcttcaacagcgccgaagaaattcaaaactacgctggcatcgcaccagtaaccgagcgaagtggtcaaaaatcctgggtacactggcgttggcagtgcgcgaagttcgtccgacagacattcgtggaatggactgcgaagacggttaactcatcgtactgggccagactttattaccagggccagcgagaaaaagggaaatctcatcagtcagcgctccgggctctggcatttaaatggataaggatcatttaccgctgctggaagaccagaacccggtacgacgaagcgaaatatttgctggcactggaagcgcgaaagtcgcccttactgaagccataa

SEQ ID NO: 195711 - DNA, 1239 bp, Klebsiella oxytoca
atgactgcgattaatcagtttgctgctcatgttggtctggactgggcggataaaaaacacgatgtctgcgttcagtttaaaaacggcgagcgcatattccaggtggttgaacacactccggaagcacttgatatctggctcaacgagttgcaccaaaaggtgaaaggcaggatcgctatcgcccttgagctgaagaaaggcccggtggtgtatgctctccagaagtacccatttgtcactgtttttcctgtgcacgcgttgtcactggcccgctatcggcagaccttctggccaagcggtgctaaggatgatccacaggatgctgagttagcattagagctaatgctacgctatccccaaaagataaaagccatagaacccgacaatggcaatatccgattacttcaacagttagttgagcagcgtcgactgctggttgaggacaaacgccgctttgtgaatcgactcatcaatacgctaaaacagtattatcctcagcccctggagtggttctcacatcggggtagcttactgttgtgtgagctgattatccggtggcccagtctgcaacaactgaaacgagccaggcgcgacacgattcgcaactttctgaatgccaaaggtggccgcgcaatggcccttaccgagcaacgtgttgcgaatattgataacgcgatcccattgacgacagacctgagtgttatagaggctaatgctttgatggcaacagcactggcgacacaaattaaagtcgtgagtgaaatcatcaaaacctatgacgaacgaatcgaaacgctgtttgacacattgccagatgctgggctgttcaaatcacttccgggcatggggccgtgtatgggcccacgtatgcttgctgcacttggtgataaccgtgatcggtttaacagcgctgaagaaattcaaaactatgcaggtattgcaccggtgaccgaacgaagtggccagaaatcatgggttcactggcgatggcaatgtgccaagttcgtcaggcagacctttgttgaatgggctgccaagacggttaattcatcatactgggccaaactttattaccagagacagcgagaaaaagggaaatcgcatcaatcagcaatccgggctctggcgtttaaatggataaggatcatttaccgctgctggaagaccagaacccgctacgacgaagctaaatatttgctgacactggaagcgcgaaagtcgcccttactgaagccataa

SEQ ID NO: 195712 - DNA, 174 bp, Klebsiella oxytoca
atgtcgcaaatgctaaagtacggcattcgcataactataccgctagagatgagtttaagcgctattttgatattggtgtatttcatgcggatgaaggttggatcagagaaaaatttggtggtgctggtggagaaggaattaagtttattcgttctgaattcaaatatctcctga

SEQ ID NO: 195713 - DNA, 258 bp, Klebsiella oxytoca
atgcttgggtatctgagatacagtcaatcattattctcgcaagtctttcaacattgtttggatcgaaatagatacatccactgtaagcacctactgtttcatgtgcatatggaagatctgcagctaatattggtagaccataatgttttgcttcagaaagtggtaaaccccatgtttctaattttgaggggaaaatcaaaaagtcaactttattggcatataatgaatccaattcctgtttcgtttgaaagcctataa

SEQ ID NO: 195714 - DNA, 774 bp, Klebsiella oxytoca
atgacaaaggcaaataaccccaaatacccgcagcgcgtgcgtaacgagctgcgttttcgcgagttgaccgtgcagcgcgtcgagcgtatcggtcacgctttccagcgtattgtgctgggcggagaggcgctggacggttttgtttctcagggttttgacgaccacaccaagctctttttccccgaagcgggcgccgcattcacgccgccggtggtgacggatgaaggcattaactggggcgaaggcgtgcgtccggcgactcgcgactatacgccgctgtacgacgccgggcgtcatgagctggcgtacgacttttttattcacgacggcggcattgccagccgctgggcgctgacggcgcaagcgggcgataagctggtgatcggcggcccgcgcggttcgctggtggtgccggaagattacgcctggcagctgtacgtgaccgatgagtccggaatgcccgcgctgcgccgccgtttgctcgggttgcagcagcttccgacgccgccgcaggtgacggcgattgtgactattggcgatgcgtcttatcaagattacctggccgatcttgatggctttaatatcgagtgggtggtagggcataacccagccgccgtggccgaacgtctggcgcaggtggtgattccggcggacgattattttatctggctgaccggtgaaggcgcggcggtgaagtcgctgctggcgcgctttgaaggcgaagagattgacccgcagctggtgcgttcgcaggcctactggcacagcaagtaa

SEQ ID NO: 195715 - DNA, 330 bp, Klebsiella oxytoca
atgtgtgatagccagagtgacagcacgccgtttattgaatttatgctggaaaatatggttatcgcgttgaaagatggcatgggacaaaccgcttctctgtcggaagaaatgtcggaaaaaatgtcggaagaaaaagtggaaatgctggctgccgttgaggaacggatcctcaagcttttgtccaaagaacccacgcgtaccgcgaaagacatggctcaggaaatggatgtttctgccagaaccgttgagcggtatctgaagacgctgcagcaaaagggaagattacagcggaccggcgcaaaaaaaaggggagcctggcgcattctttag

SEQ ID NO: 195716 - DNA, 549 bp, Klebsiella oxytoca
atgctcctcgctgcgagctatatatatacaaaagttacggcagaacaatcaactgagctcgtatggactggcccaacaacacctttcgtatcagctcgccgtaccgaacaagctcttctacaaatcattagcaatgccaaacagtcattatttattactagttttgtggcttatgatgtatcttgtattgtcaatgctttgaacgtagcaataaaacgtggcgtggttatcaccatgttattggaatcatcatcagaatatgtcggaagtattaatttcgatcatatttccaagatgaaaacacttatgcctcatgctcgaatctacttatgggaaaataaaccctctgagttttcagatggtcgcgtacatgcaaaagttatcgtcgccgatagtaatacatgttttatcacaagtgcaaatctcactggatatgcaatggataaaaatatagaggtcggtgtgcttattacaaatggaagtattcctgcattgttgcatgaacatctgaattaccttataagcacaaaggtaatcactccagtttga

SEQ ID NO: 195717 - DNA, 780 bp, Klebsiella oxytoca
atgagacaagttgaaaatggattacttgaagttgcttggtatttatcaaagtatggaaaaaaaacgccaccggtattacttggtgttgactccttaaaggatgcaatattgttattttatccaacatttggtgtaggtaaaactgaagtcgaattctataacagtatgaaaaactatagggatcgttttgattcctggctgagtgatgtgcgcagaggttggagaaacgctgatggttcgccaagtgatctttcattacctgctattgatgttatgaacaaaatgaatgggttacctattttcttagttgaacaaaaaattttatattggctatctccaaacccttccataccagaagcggtcggtttctcttgccctctagacgatgaaactctgaatgaaacaatgagagagcgattaatctcagcacgacttgggcagggagagttcagaaaaaattgtctacagttatttccagcttgcccagttacaggaatattttttcatccattactaagagccagccatattaaaccctggtctgcatgtgagaatgctcatgagcgtttagacccttataatggaataatgcttgctgcacacattgataccctttttgatcaaggatggctttcgtttagaaataatggtcagatattaatcagtactgaactcaacaatgaagtaaaagaatacctaagtcttccagaaaaaatatcaccattttcgattttatcacataattatcttgagtggcatagggataatatactgaggtag

SEQ ID NO: 195718 - DNA, 588 bp, Klebsiella oxytoca
atgttcaaattattcagaaaaattcctgtcattgggacaatgatttttattatcaatagttatgtctacaatggcgaccttagctcaggcgataagtttgctccacttgccatgtggataaaaaagctttttggtaggttcgtcgtggcttcacttttaacaggtcttgttttttgtaatgaaataacatcatgtttaaacataaatacttttattgaaggttctatcaatgctaaaaacccaggcagcataatcgtatcgacttttccatctctcataggctttgggataggagtgtatgctttaacattggtacttagtgaatcagttgtaagcaactttcaaaaaataatatcaggaaaaaataatacgtctggcagtgttttgatgttgagctcagatttagcatatcctatgttaattcttgttctaacactttctgttggtattttacagggtgtatttatcgacagttataagttatgcgtagtaacatggtttatgctttggtatagctttattgttattattgagatgctgggggtattattcggtttgtcaaataatagcttgctggataagctttag

SEQ ID NO: 195719 - DNA, 906 bp, Klebsiella oxytoca
atggctagttttattttctataacattcaagttcttcctaatgaaaccgctgaagaaataggtgttaagggatacaaaaaaatcttcagcttattaaaagaaaaaaacaatgaagagctgaagtctgggaatcatttaagttatcattttaaagttgggaaaaactcatatttcggcccgtatgagttttttagtgagcagggtggggttaatggaaacttcataaaatataacgacagtgatgatgtaactgatttgttgacagataaggttttattttcaaaaagtaaaaaaaatgctgctgtttcaggtaaaaagaaaatccctttcgtatttgatgccaaaaaccatattttagcaatagatcaatctgcggcaccatctcaagaatatgataagttacttgaaatattaatgtattacattgacccaatagtaaaaaacttattccctgaatatacattaactatcaacttattatctctccctagtgctcttgatgaagtttttgcaaatgctatatcttataaaaatgttgaagttagcgtttttgcccctaatggagatgatgcagaagatattttagaagaaatgagaaagagcaaaatgcaaaaactacaattgagtggttcaagcggcgatagtagtatgattagcatacctaatttcttgaagaaaattctaaaatcagcacaaactcatgggaagataaaattaagatatagagttcaattacaaaattctaatgaaacaaaattaatgacatatgactctgaaaaatccccactcaaactcaatctccgccataataaatctgataaagacgaccgaggtttcttaagaggttgtttaagaaaaatcagagagttttgtgagctgaaaaatgatgagatacaaggggaataa

SEQ ID NO: 195720 - DNA, 258 bp, Klebsiella oxytoca
ttgcaggcaaatggtggtcttctgcggatcgatgccgacggcgagataatcggccatcacctcaaggatattgctgctgattttttgcggattgctgccgttgtcggtcagtccctggagatccgcgacgaggataaactgctggtggtcatgctggagctgcacgcgctggcgcagggaaccgacgtagtgtccgaggtgcagctggccggtaggacggtcgccggtcagaatagtttggctggtgctcatgagtga

SEQ ID NO: 195721 - DNA, 1863 bp, Klebsiella oxytoca
atgagtcttgatgagaaaacccccgttggtgaagtacgccctagccaattactttggacctatgggcctggagcactaattgatcttccaaacctatctgtcataacgcttggaatagatcggtgggaaaagaatcgttgccagccaattcaggaaacccggctgcttgaggcggttcggatgaaattgggagatcaagtcgaaagtttgcgtatgccaccatttcagaaaggtgaagtggccgacaagtggtctgctgaagcaaatataggagttcccgtacgtcctttcccgcgatggctacgttgcgtaaagtgcgggcttctttcaccttatgatactggattatttgagatcaaagaaaatcggtatagacccgaacgcactcgctttcgccacaaaggctgccgaggttctaaaggcgatcagcctgccagggacgccgatgccgtacctgcccgtttcctcttggcctgccgtgatggtcatcttgatgattttccatggcattactttgttcacggcggcaacaactcgtgcaaagggacgctgcgattctttgaaagtggagcctcgctacaaaccgaaaatctatgggtaaaatgtgatgaatgtggggcatcaaggagtatggctcatgcgtttggtaaggcaggaaaagagaatcttcctgcatgcagaggacgtcaccctcacctagattacttcgacaccgaatgcaatgtggaaccacgtgcagtattgttaggatccacaaatagctggtttcctatgacgctgtctgcactcgcgatccctctactacatgtatcaccattgcatcaaattattattgattattgggatgatctcgctgatgtagaggatcgttctgagttgaaagggattctcaaagcactcaataaaaggggggaggcccaaggcattgagaaacatgaccttgaggcaatttgggaagctattgaagcaaatcggtccgatagtagtgaagaatctgtcggtgagatcgatatcaaagggcctgagtgggatgttctaatagaaccgaatccccccgcagactacccacatttcatgagtaagaagacccacacaccgccacgtttttcatcatttatcgaacgcgtattgctcctagaacgcttacgtgaggtcaatgcattaataggatttactcgagttgaagcgcctgaagaatctgacgatcctagtgaacgtgttccaatggctaatctatcacgaaacagacctgactgggtgccagccagccaggtacatggcgaaggcatcttcctccaatttaatgaagaagccctagttgcctgggagtctctggatgcagtcaaaaaagttgacagaatgctccgtggtggacataccggatggcgaaattcacgtcatcttgatcccgaggagggctatccgggtattcgctttgccatgctacacacactttcacacttattgattcgtgagatggcactggaatgtggatacaacgcctcaagtattcgtgagcgaatctatgccaatacaagcaatgataaccctcaagctggtatccttatctatacagccgccgcagattcagatggaactttgggtggcctagtcgatcttggtaaaccagaaaatcttggaagattactggaacaagcgctgaatcgctcaacgatttgctcctctgatcctctatgttctgaacatgatcctgagaaggaccgttcgttacacggtgccgcatgccatgcgtgcagctttgtagccgaaacgtcgtgtgagcgtggtaaccgttatttagatcgcgcattactcgtgccgacacttgagcatactgccgccgcgttcttcaaggatttctga

SEQ ID NO: 195722 - DNA, 3996 bp, Klebsiella oxytoca
atgataaatgataaaccaaccagatcacataatgcatggttcgctattgaccgtgacccagtgaaagatcccatcttagcctcctttacgctgcaattaaaaggtggacgtccacttaatcaaggtttttccaatgacgattgggtactgatactagataaaacaggtcatatcacccgagtggggcgtattctgcgtattcgttcagatctcgaaaccaccacactcttttttgatcgaatgttgcaggttgaaccgtcagtttcaattggtatgacctctattaagttacctgctaaaggaagctctggtcgcattcaatggaaagatttcattgaaatgctccccgatgtactgcacacgagtattgctgaaataccaacgatcgaagatcaaacctacatccgtgaattactgcagttggctgtgatggatgacttgctcggtccggcagccggtcctaatgaaattatagttgatatgggagtgagagaccgctatttggttggtaagcttgcgccacgtgaagctgcggaaaaaggaatggagattccagtaaatcctgaggatgcggttgataatcctccagacctaattgttaaggctcagacggtaaaagttaaatctccgacagaacctggtcgtggggagcccgatacacaagaggaaattgatgccgctagcaaccaatcattggtaccaagcagcctcggaatgactttctgtgtagatggtgatattgctcaaattgaaatcgaagctcgttggggtcgttacgaacgcagcgaagatcatgagatctaccggactcgaaaaaataaggaaactggagtcgaagaacagacgaaagccaaggtgtggcagcgcatcccttgcggtggaaaattatcgttattgttaaaagaaggggtaatttcacctcaatcactggacagttcctccccagaagtattggtacaaggcaccatccgttccaagaatcctaatggcgatcgtctggtcacactattccttgtaaatacgcaaaaagagccagaaaccaaccgtgatacagcatggatcttccaacccgaattgatcgttcgtcccgaaaaggatgcaaacgaacaagctattttcagacgtaagcccgttctggacgctaacggtatggatccagaacgcgaagcactggaaatgatttacctgaaccgcgtagagtttgcagtaggacatggtgttgcggtgcatgctgaaactgcagataacgtagaactagcaacagaaattcgtacgacggtgatacctcagtacgaggtacaaagaactgagactccaggtcttgatatatctgatcggccagcgctgcagaaaatggtaagtagtggtttccttgacatgcagacactggcgactttggatatagatgcgctcgtcaatgcattgagtatgctgaccaaggactacgatgcttggatatgtgaacagtactcaagcataggaaccaaggctacaagatttgacgcccaagccctagtagccatggatagatgcaaagagattcttatccgcctacaacaaggtattgacacccttaaagataatgaaaaagcgttgacggctttccgtttcgctaaccgggcaatggcaacacagcgcatacgcagtttgtacgcgctggaaaaacgtcgtggaaaagatgttacggtcgaacaatataatgaagaaaaaaaccgcagctggcgcccttttcagttggcatttctgttgctttccatcccatcgttggcggacccacgccatcctgatcgggtacaacctgtaaatgcttatgctgacctgttgtggtttcctactggtggtggcaagaccgaagcctatttaggcgtagcagccttcactatggccatacggcgcctacagggtaatttaggcgggtatgacagctcacgcggcttggccgtgatcatgcgctacacacttcgcctgctaacactgcagcaatttcaacgtgcaacagcattgatttgcgcaatggaagtattgcggcgtgaatcaattgataatggagataaatccctcggcatagagccattcactatagggctttgggtcggaaataaggtgactcctggtactaccgaagacagtcatcgagccgtagaagatgcccgtaatccagacaaatacaatgctgcagcagcgtcacccgcccaattaacaagctgtccttggtgtggtagcgaaatagtaccagggcaggatgttgaagttcgcaaggacaaatcgggtggccaaaccttcgtttactgcggtgacaaaaaagggcgttgtgatttttcaaagggcaaatcaagcaatcattcacatccaggtattccagtattggtagtggatgaagagatctatcaccgccctccgacgatgatgattgccacagtggacaagttcgccatgatggcgtggcgcggtcaggtacggacactttttggccgggtgggacaggaatgtccgcgacatggtttgctctggccaggagccaactgcaacggcaatcatccagccgccaaggggcaaccttccaccaaggcgaaaactatcggccctatccggccaccagacctgattatccaagatgaattccatctaatcagtgggcctctgggcaccatggtaggattatacgaaaccgctgttgatgagttatgtagttggacacttgatgacaagaacgtcaaaccgaaagtcatcgcttctacagcaaccgtccgaaaagctaaagaacaagtaaacagcgtcttcatgcgccaagtagcagtgtttccaccacatggattagatgttgaagataactttttctcggttcaacgtgcaataaaagagaagtatggtcgtcgttacctcggcgtatgttcacccggtagctcaaggcctgcaatgctgattcgcgtttacactgctttcttgaccgctgcacaagagttatttaaccacttcggtgaaccagccgatccctacatgactatggtcggttatttcaactcgctacgtgaattaggtgggatgaaacgacttgcagaggatgatgtacagacacgttcttatcgggtccaaatgagtatggttgagcggcctgcactggcacaacgcagcataagcaacattcgcgaactaacttcccgtgtatccagtcaagacattcctaaataccttgataacttagaggttaaattcaagtctgaatttgatacaactaccggtaaatatgttaccagatggcaggagggtgatactcgagccattgatatagtactcgccaccaacatgttatcagtaggcgttgatatcaatcgacttggcctcatggcagtgaatggtcaacccaaaggaacagcggaatacattcaggctaccagtcgcgtgggacgctcatttcctggtttagtttgcacagtactcacatgggctcgtccgcgagacttatctcactacgaaacatttgaacattatcacgccactttctacaaacatgtagaggctcaatcggtcaccccattctctcctcgagcaatggatcgcggtttaacaggaactctgttaagtcttgtacgtctggagaatgatgcattcagcccgaatgaaggtgctggccaattgagtacgtctaatcaattcgaggtcagcaatgccatcaaagtgctggcaacacgggcagggaatgttgcggaagacaactcacgtaaaaaattagcagagaatgaattgaaagagcgcgccgacgaatggacgaaaaaagcatctatgggtggaagaattctcggatatgaaaagcgtgggcctgaaaaggataaaacagttaatttaattgaatcaccaggtctgaagccctggaataactggacggttccaatgtcaatgcgagaagtcgaacctggcgtacgactgataatgaacaaaagtcatatcactgatgataaagattggaagccacgtccaacaacgaaggatgaggattga

SEQ ID NO: 195723 - DNA, 4077 bp, Klebsiella oxytoca
atgagtttgactaatttacacgctgattggctatcactgaccgagatttcaggaccctttctcgcaattcccgtactgatggaagccttccctcagggactagaagaactcaacggaaccaaacgcaaacgggtacgtcaggcctatgatgaatggcgtgaagcgctggaacaggaagatcctcagttaattgaattgcactatgcatggcttgatgaggtcctatctcgagtccttgatcttgatgaagatggtaaaagtgatgtactaaaacgcgtcgaatggtgcgcaaaccatctggaatctgtgctaccggaccatggtgtagtccagcacccagatttagccgttgttgatgagcaacgtgcaaacaagccattgatgctcatacacacatatacaccggacgtggatcttgaggccacgatgaaacgggatggatggctaactaccccggcagaccgcatggtccagttatgccgctctcttgattgtcgtctcgggttagtgactaacggtgaacgctggatgttagtagatgcgccagttggtgcggttacctccttcgccagctggtatgcacgcctatggaaccaagaggcaattacattgcaggcttttgtgcacctgctcggaatccgtcgtttcttcgttaataaatccgaacaattaccagcattgttcgactgttcactgaaataccaggacgaagtgaccgacgctttaggtgaacaagtccgccgcgccgtagaagtattaatacagtccctcgacaaagctgatcaagatcgtaatcgcgaactactgcacaacgtcaaagagaccgagctttatgaagccgcactgactgtcatgatgcgtctggtattccttctctcggcagaggagcgcggactactactcttgggcgacgaacgctacgagaccaattatgcgatttccactctacgcatgcagttacgtaaagagtcttcagaaatcctcgaacgacgttgggatgcctggtcacgcctgctggcaatctttcgtgcagtttactgcggcgtagagcacgagaacttgcgtctacccgcattgggtagctcactgttcgatcccgaccacttccctttccttgagggaagggccaaaggttctaattggcgaacagatacagctaaaccattgccaattgataaccgtactgttctgctcttactggaagctattcagcagttccaaggtcgcacactctcttaccgtgcattggatgtagaacaaataggttatgtctacgaaggtctgcttgaacgcaccgtcaggcgcataggtgaagtcacgctagaactagatgcgacaaaaaaagcgcaatcaccttgggtcaaattggctgagctggattctgcaaacatggatggtattgagtgcttggtcgaattgctgcaagaacgctctggtagttctgtcagtagggtgcgaacaaatctgactaagacagtcgatgacaccttagccgatcgcctcttaacaacttgccaaggcgacatacaactacgcgaccgaatcaaaccctatgttcacctacttcgaaccgatccttggggctatccgctggtctatcctgcaggggctttcattgtcacctccggttccaaccgacgcgagactggcactcactacacaccgaaatcgctcaccgaaaccatcgttacagaaacgctaacaccggtggtctatatcggaccagcagaaggcacactacgtgaaggatggcaactcaaatcccccgttgaattacttgaactcaagatctgtgatcccgctatggggtcaggggcctttctagtacaagcttgtcgttggctggctgatcgcttggtcgaagcttggtcactggccgaaaccactggaaaagcagtgagtgtgaacggagacgttcaggaagaactgggtaccaaggagtcactgccacgggatattgatgcgcgcatcattattgcccgtagcctaattgccgagcggtgtttatacggtgtggatttaaacccgctggcagtagagctagccaagctttccatctggctggtgacacttgctaaaggacggcccttcggcttcctcgaccacaatcttcgttgtggtgacagtctgttcggtatccatcgcctagatcaactgacacagctttcgatgactccgtcagcacaaggccagcaacatccattcggtaagagcatcagactatcaatgcgcgaagccatagaacttcgccagcgactacgcgagacaccgatccatgacatccatgatgtggaagtcatggcacaactgaatgctaatgcacactccaaactagaaataccgcagtgtattgcgaatggatttataggagaggttttctcatcaggtagtaataaagctatgttggaaaatgcactagcaacgcttactctccatgcagggcaagccctcaatggagaccgcgaattactatccatgatacacaagagatcggttgctgcattcctgactgacttgccagccgataagcccgcacgtcggccctttcattggcccctggagtttccagaagtattcgcacgcgagcggggtggcttcgatggtatagtcggcaacccgccattcttaggaggaaagcggataacaggtactgcaggaacggtttttcgagactggcttgttagttatattgccaggggaaaagttggaagcgctgatttagtcgcatatttttttcttcggtcttatatgcttcttcgtgaaaatgggcattttggtctccttgcagtaaacaccattgcagagggtgatacgcgtcaagtcggccttgaggaaatgcttaagataggagctgttatacatgcagcctatcccaacgaagcttggccaggtgccgcggcggttgttactagccgtgtccatgtacgaaaaggggaatggaatggtcctcgcaacctgcatggaactgcagtcccgcatatatcagccttcttatctgggcgtgaggattggagtcttcaacggcttaaagctaatgtaggaattacttttattgggtcggttgtaaacggtatggggtttattctctcacctgaagacgcgcaacaaatgttacattccgaccctaaaaattcagaagtaatcttcccttacctcaacggtagcgacctaaattctgatccagctcaacacccaagtcgttttgtaattaacttttgggactggagtgaagaacgtgccaaaacgtatcttaaaccctatgatcgaattctttctctagtgagacctgttcgagaaaagctcaatcgcgctaaatatcgagatcgttggtggcattactccgaagcagttccaaacctttaccacacgattggattcgggcacaactttgaaaaacatccagctaattggaactcagcgctgaaacaattagatcgcgtattggttgttacacgtgtaagcaaaacgctagcgttctcatttgtaaagactggcattgttttttctgatgcaacagttgtttttgcgacgaacagggatcaggattttgcgctttttcagtcaagtattcatgcagtatttgcttggcaacatgcttctcgactaaagaacgacttgcggtacagtccaacggatgcacttgaaccgttcgctttccctgaaggtttccgtgatacaccaaatgttgaattggatgatttggggaggaaactccatgaagcgcgcgctgaaattatgcacactgatcgcattggcctgaccaaactctataaccgattccatgccaacaccgaacgagatccccgtattgaaggactacgcacattgcaatatgaaatggacgttagtgtcgcacacgcctacggctgggacgatcttgacctcggacatggtttccacgaagttccatatttgccagagaatgaccgggttcgcttcactatctcagaggctgctcgtgtcgaagtgctacagcgattgtcagaattgaatcgtctgcgttatcaggaggaactcgctgctggcttgcatggaaaagcgactaaacccaagatattaagagcaccacgaagatga

SEQ ID NO: 195724 - DNA, 3141 bp, Klebsiella oxytoca
atggatatttcaaatcaagcagatcagtctcaacaaattactcctgagccaggacagctcgttgaagttcgccgacgccaatggcttgttgtagaagtctcatcctctcaattaccaaccgcttcatttcagcagcatgcagtgactctttcttctattgatgaagatagtttaggggaactacttgaggtcatctgggaaattgaaccaggggctcaagtaattgaacgtgctggtttgccatcaattactggccttgatgactctgacacccttgaggcctttcttgatgctgtgcgctggggggcagtaaccaaagcagaccaccgtaatttcttacaagcaccttttcgtagtggcgtcagcattgaggacttccaactggatcctttggtacgtgcaattgacatggctcgtgtcaatttactcatcgccgatgacgtaggccttggtaaaaccattgaggctgggttaatcattcaagagatgttacttcgacatcgtgctcgtacggttttgattgtctgtcctgcatcgctgcaggagaagtggcgtttggaaatgctggaaaaattcggtctagaatttcatatcgtcgacaccagttatatcaagagattaagacgtgaacgaggaattcatgccaatccgtggacatcgcatccacgattaatcacttcgatggactgggccaagagcggcgagggcctacgcgccatgcgtgatgttctccccttaaaggtcagttatccacgcaaatttgacatgctggtcattgacgaagcacacaacatcgcaccagtaggtggagcaagctacgccatggaaagtcagaggactcgattcatccgttcgatcagtcctcactttcagcatcgtttgtttctaaccgctacaccccataatggctataccgaatctttcacttctttgctagaactgctggacgatcaacgcttcgccaggaacgtacttccagacgagaaactgctgaatcaggtaatggtacgtagactcaaaagtgatttagtcgattctgagggtaagctgctctacgctcaacgcaaactcgaagccctatccgtcgcatactcagcacaagagcgctccatccatgatcaactaaatgaatactgcaaaagcagagaacaaggtgcagagaaagctaataaaatctttgggactgcctttgtcaatcagctactgaagaaacgactattttcctcacctgcagccttcgcatccacgcttgaaaaacacatagcaactttaactcatggcaaacaaaccagtgacaagaacgctatggcagagcgtattctacgtaaagcaattcttcgggccgaagaagattacgccgacgatcaagaggtagagaatgcccaagcagaggccgttgaagaagcctctcgtcacaccctaccgctcacgcccaaccagaaacagatattgaatgatctgcgccaatgggcacaaatagccaagaaccaagtagattctaaagctaagggtgttcttgattggattgacacaaatttaaaaacacatggtcagtggaatgaacaacgggtgattctgttcaccgaatatcgaaccactcatcaatggatgcacgagattcttgccagtcatgggcttggtggcgagcgcttggctattcttcatggaagcatgccgcaggatgaacgcgagaaagtcaaagcagcattccagacatcacctaaaacctctgccgttcgcatcctacttgctactgatgccgcttcagaaggtatcgatctgcaaaattactgtaattaccttatccatctagagattccttacaaccccaatgtaatggaacaacgcaatggacgtatcgatcgccacggacagcgccagaaagaagtcgtgatctggcatcccgtggatggaagtgaaaacggtgatcttcgtatcggtggtcacggtgacgacatccttcgagctctacgaaaactcgaatcaatgcgagcagacatgggcagtgtcaatccagtcatcgcaccacaaatgtcaggtttgattgaaggctctatcaaagaaattgatactcgtctggctgaatccagaatcgcaaaaaccaaacgcttcattactgctgagcgcgaacttaaagaacgaattgctaagctacatgatcgactcctgtctgctaagcatgattttcatcttacacctgagcatatccacatggccgttaataccggtctcacacttgcaggccgtccaaatctagagccttttgagctaccggatatacctcctggctctgtattcaagatgcctgctctgtcaggtacatgggcacgctgtcttgaaggattgcgacacccctacacccagcagattcgccccataacatttgatcactcagtagctaaaggtcgcgatgatgtcgtactggtccacttgaatcaccgtttggtacaaatgtgccttcgtttactacgagccgaggtgtgggcacatgatgatgtaaagaacttgcatcgagtcacaatacgctcagtaccagacacattacttgatagtcctgctgtggccgtcgtctcccgattggtcatcactgggggtaatcaccatcgacttcatgaagagttgacagtagcggggggctatcttggtgacaaagcctttagacgcgaagaaggcgtcaacaaaattcaacaatggttggaacaagctaaatcattgaccactgaatttgcgctatttgatgccttacgcgttcgttttaatcgtgcacaaaacagcattcttcagtctgttgaggcaagatcaaaagaccgtctgcaaaacctaactaatacccttcagaccagtaaagatcgtgaattggctgatatcagtaatgttctcaacgaacttgaaagaactattaatgctgagttggcgaaagatcaacaacctattcagttttcactattctcagaagatgaacgaatacaactcagacgtgataatgctgccttggaagctcgtcttgcacgcataccgtcagagcgcgaacaggaaatacaagcaattgaaactcgctacaccaaaattgatgaccgcactttcccagttgcagtcatttttctcgttcctgaatctactattcagaggggtgtagcatga

SEQ ID NO: 195725 - DNA, 1053 bp, Klebsiella oxytoca
atgaaaaaagtatcttgtgttgatttattttgtggtgcaggcgggttaacacatggtcttgtacttgagggagtacctgttgtcgcaggtattgatattgatcctgcctgcaaatttccctatgagactaataatcaagcaaaatttattgagaaaagcgtaagcgatttcacatcttcagacttgaatgacctttacgctgattctgatgtgaggattctagctggctgtgcaccttgccaacctttctcaagctatgcaagacgttatgagcacggtggtaaggatggaaaatgggggttattgtacgagttttctcgcttggctgaggaaactcgccccgatttgattaccatggagaatgtcccctccgttgcaaaacatgaagtttttaacgactttgtcgacaccttagaacgcattggttaccacgtttggtttagtgttgttgattgcactcaatatggcgtgccccagatgcgtaagcgcatggtactgcttgcctctttacatggtgagataaagctctctgagtcaacatgtactcagcctgttaccgtaagacaggccataagcaatttgcctgctttaaaagcaggagaaactggtactggggataagctacatgtaacttcaacgttgtcggaaaagaatatgcaacgtatcaaagcctcaaaaccgggtggaacatggcgtgactggcctgaacatttgattgctgattgccatcgaacggatcgaggcaaaacgtactctagtgtctatggtcgaatggaatgggataaaccggctccgactatgactactcaatgttatggttttggaaatggccgctttggtcacccagaacaagatcgcgctatctcgttgagagaagcggctattcttcagagttttccccaagattacgtatttatacccaatgaaagtaatgtaaaccttagagttctgggtcgaatgattggaaatgcagttccggtaaagctcggtcaggcaatcgctcgcagtataaattcacaccttgatgatttgaacttagtcgcaacaaagtga

SEQ ID NO: 195726 - DNA, 207 bp, Klebsiella oxytoca
atgtttgccaaatcctttctcgctctcgacggtaacggtggtctgaacggtgcacgtaccgcgcagacagctacttatgatcgcgataccttccaactctgcggtagtgcgctgcaataccatcctggatacgacacagaacgcccatggtttgaacacattgatgcgggtctcatcagcgatggtcaacagcattgccctacgtga

SEQ ID NO: 195727 - DNA, 231 bp, Klebsiella oxytoca
atgcctgaactcactgaattgcctgatgggccgtttacacgccagcaggcagaggcggttgcgtctcaatattccaacgttgcgatagaggatgaccaggggtcgcatttccgtatggttatccgtcatgggcattgcatggtctggcggacctggaactttgagccggatgccggttactggctgaaccggtatatcaatcgttatggcatccgcaaattccctgcataa

SEQ ID NO: 195728 - DNA, 357 bp, Klebsiella oxytoca
atgaacaatcactcagaatccggtgccataccggagaatcccccctgcaaacagtgggggctaaagagtacgatcacaccctgttttggagctcggctggtgcaagaaggcgaccgcctgcattttctcgctgaccgcgccgggtttaacggtgctttcagcgacgagcatgtattgcgcctcgaccaggcctttccgttgatactcaagcagctggagctgatgctcaccagcggagaactctctccccgccatcagcactgtgtcaccctctatcacaacggactcatctgcgacgccgatacgcttggtagttgtggttacgtatacatcgctgtttatcccactcaacgttaa

SEQ ID NO: 195729 - DNA, 864 bp, Klebsiella oxytoca
ttgaaggaatatactggagcggttttttttgtagatattcttggcgttggagctttaactcaaggtaaaatagaaattagtgaaaaggatttctcagcacataattttagatatgatagtaagttttcagagcatcagttttgcgcaaaattactattgaaatttaggagggtattaatatcttccacaacacatgtaaaaaacattaaagtggctcaactatctgattgtgcattcatctggtctgatgatccagatatagtagttaatgtcgcgagggatataatgtggaaaagtgtactaggtggacttctttgtaggggagggttggcaaatggacagatcgttgagcccgataaaataaacactaagttaggtatgtttatttgtggcggtgcagtaaccgacgcggtaagacttgaaggaacaggtaaaggtgcaagagtatttgtcaaacaagagttagtatcagagttaaaaaaaatcccatatacagcatttgttccaagaaagagtctaattgatttttccacaatagatgagtttaaatggtatcgatatcctgatgttatcaagtcggctaatgaaaacttaaataaaaaattagtcatgaatgagattgtaaaacttatagccatgcttaagcactctccaaaatatatatggaatgcgtcaaaccctttagggcgagttcaactagctagttcgattgatatcatctcatctgaaaccgaagtacttgcaggaaattcagatttaaaatttgattatgaaaatatggttgataatttaaataacagaagtgaagagagatataaaaaaatcctaatcaattatcataagttaattaaatcatcagtttga

SEQ ID NO: 195730 - DNA, 264 bp, Klebsiella oxytoca; identical to SEQ ID NO: 127147

SEQ ID NO: 195731 - DNA, 207 bp, Klebsiella oxytoca
atggctgaatatcagttaagttttgatggttttgttcggcttttttttgcaatggcaatcattatctgtggttacgggtatatggttatgagcatttttgtaaaggatacccttactcatattttaatgttgctgggtcttgttgggttcagtgctttcttttctttcgttgtatttatggataaaagtatgtggagcggctcttga

SEQ ID NO: 195732 - DNA, 300 bp, Klebsiella oxytoca
atggacaatggttttttttggtttctactttttcttgcgtcagctggatatttttttgtgcagtatgaagattttcgcgatatgcagcccgctacgcctgaacaactgcaaagtattattcatgatgcgccttgtgcgggtgaggcttttcggatggctcttcaaactaatactgtgacttcgtcagcaacattaacttttggtgacgcaaaaaagatggcatcagaatgcaaggataaagaagagattaaagcagtacgtgaaaaacaacttaacgcactgaacgatatgagcaaataa

SEQ ID NO: 195733 - DNA, 363 bp, Klebsiella oxytoca
atgacactggcggccactaccatcgataaccgcagcagcactactactgcacacggggatatgcgggtatttgcttctgtggtgcacaataccggtaacggtgcgaccttacacagccagaaaaacctgtggatacagaaagatgctcagggtaataaaagcaatctggtggagaaccgttcggcaactatcaaaaccaatacaggtgacctggttatccgaactgatcggctggaaaatataatctcaagggctgataccattatcagtacagaacgtcctacgacagcactggtatcagactcccgactgggctggcagagtctgaattggttttataattcattgaatttactttggtaa

SEQ ID NO: 195734 - DNA, 846 bp, Klebsiella oxytoca
atgaagctaaatcgtttttctttacccgtgcttatttccacctgccttttttgctctacggctttcagcgccgatctgcttgaacgaattaaagaagcaaaagagatcaccgttgccactgaagcgcgatacgccccctttgagtacgttgataacggcaaaattgtcggttacgacgttgacctgatgaaccacatctttgccaaatcattaccaggcgtgaaagtgaaacagctggatctgcctttccaaggcatcctgccagggcttgatgcgaaaaaatttgacttcgtggtgaccgccgtcaccgtcaataaacagcgtattgaacgcttcagttttaccgctccggtggcggaatctaccgtcgcactgctcaaaagagcagaggacagcgcgattaaaactccggatgacctgagcggcaaagtggtgggctcgcaggccggttccggtcagttgcaggtgctgcaatccttcgatcaggcgctacgcgccagcggcaaaccgggcatcaaagagatcaaacagtatgtcgcgtttgatgaagcctatgccgatctggcatcccgccgtcttgatggcgtcgcccagtcgctctcgaacctgggtccgctgattaaaacccgcccgggcgtttttgccacactgccggaaatgatagggccacagaccttctttggctgggtcgggcgtaaagatgccgacagcgccgctctggtaaaactgatcgctgacgggatcattgaagccaatcgcgacggcaccatgaaggcactgcagcagaaatggttcggcttcacgatgagcgttccggcaacagaaatgcccgcaccggcgctgtga

SEQ ID NO: 195735 - DNA, 660 bp, Klebsiella oxytoca
atgacggatttcatgacgagctttatccactggcttccgatgctgatgcagggagcactcaccaccgcagcgctctgcctgacagcgatggtcgccggctttctggtgggtattggcgtatggcggatgtcgaccagtccgttaccgatttaccgcatgacggcccatggatgggtcagtctgtttcgcgggaccccggttctggctcaactgctgctctgcttttatttaccgtcacaattggggatcgacattcccggctttgccgccgccacgctggcattaacgctgaacacggcggcctatcaatcgcaaattctgaaaagtggtttcgccagcatcaccccaggtcaactggaagccgccgcgatttgcgggctgagcccacggcagattttatggcgcatccaggtaccgcaggttgtccgtactacgctgccgtcactgatttccgagctgattgatgtgatcaaagcctctgcggtggtgtcggtcatcgcgctgacggatctgatgcgcgtgggccagcaactggcctcatctacgtaccagccgctgcaggtctatctggccgtggctctggtctatctactgctgaccagcctgctggcgctgttgggccgtcaggcagaacgccactggcagagggaacaacgatga

SEQ ID NO: 195736 - DNA, 642 bp, Klebsiella oxytoca
atgacggaactcgcgcaatacctgccagcctacattcaggccctgggcgtgaccctgtggataagcctctgcgccgcatgcggcggcatgctgttggggtttgccttaaacggactctgcggcagacgtggtctggcgtttcgtctgtggcgcgcctacgtgtgggtgatccgcggcacgccatttctggcgcagctagccgttatctactttggcctaccgtccatcggcatcatgctgagcgccgttgacgccacgctgctgtcgttgacgctgtatagcgcggcctatttcggcgaaatttttcgcgccgcgtggaacaccattccgccgggacagcgagaggcggcgctggcaaacaacatctctacggtccactgtttctggcatatccagacgccgcaggccgttcgttttgcgctaccgctgttgggcaatcagttcattctgacgattaaagagagcgccgtcgcatcgatcattaccgtaccggaactgaccatgacgacgagtcagatcgttgctaacacctacagctatatcttgccttataccttgctgatcgtcagctactggctgctggcgcagggggtgagtatgagcataaaaacattgagccacctactacggaccggagaataa

SEQ ID NO: 195737 - DNA, 816 bp, Klebsiella oxytoca
gtgggcaatacatctgtgccggtgctcgaaatgcgccatgtaggcaagtcattcgcaaaccatgtggtactgaatgacatcaatttacgcgtcgatcacggtgagatagtcacgctgattggcccgtcgggctccgggaaaaccaccgcactacgctgcatgaattttctggaagcctacgacaaaggggacgtgctgattaaaggacaactgctcggctattccggcacgcagcgtggcctcgcgcatgccgacagcgccagcctcatagccgatgtgcgcaaaccgctctcgatggtgttccagcagttcaatctctggccgcacatgacggtgcaggaaaatgtcgccgcgccgctggtactggggaaaaaaatgtcccgccaggcggcaaaaacggccgcgatggctgccctcagccgtgtcgggatggcgcaaaaagcgaatgactggccggtgcgactctccggcggccagcaacaacgagtgggtattgcccgcgcactggcgctgaatccggagttattgctgctcgacgaacccacctcggcgctcgatcccgaacgtgttgaagaggtgctggacgttatccgggatctggccgggcaggggatgaccatggtgatggtcacccatgagatggcgtttgcggcccatatctcgtcacggctggtgtttatggccgacggcaacattattgaaagcggcacgccgcgacagatttttacacagccgaaaagcgagcgcctgcggagctttctcgcgccgctgtttcgtcggcctctgcaacccgaagaactggagaaactaccatga

SEQ ID NO: 195738 - DNA, 1254 bp, Klebsiella oxytoca
atgatggaaacaggcttacgggttgcccgacagctggatgaggattggctgaaccaactgttggcgcagcttgcagaatatggaaagttagcgaatggcggcgtcgatcgccaggctttgagcgcggcggaactcgatgcccggtcctggcttattgatgtcgcccgagagctcgggtgtgaagtctaccgcgatgcggcggcgaatttattcttccgtcgtccaggacgcgttgctgtatcgcccgtgaccaccggtagccacatcgatacgcaaccgtccggtggcaactacgatggctgttacggcgtgatggccggacttgcgtgcctgaaagcgctcaatgaggcacgggttgtcaccgaacgcccggtcgaagtggttatctggaccaatgaagagggcagccgctttgcgccgggggcgatgggctccagcaccttcgtcgaccctgcgagattgtctgaccatcttggcgcgatgggcgtagatggcgtctcgtttcgcgatgcgctggcagaccaccaggcccgctttgcagccatcccgttacgcccggatcgcgagatggcctgcttcgtggaattgcacatcgagcaaggtccggtactggaaagtcgccgcgtgccgctggccatcgtcagaggtatccagggcgtgcgctggtaccagatcacctgccatgggatatcggcacatgcggggaccacgccgatggcgctgcgccaggatgcgatgaccctggcacgagaacagcttgcgatcattgagcaggcgatgggtgacacggcagatgacgagttgcggttgacgtttggccgttggcaggtcatgccaaatgccatcaacaccatcccgtcgagcgtgcgttttacccttgatttccgccacccatcggccgaaacgctggcccggttcgacgcggtgattgcctctctggcaagcgaacaagtcaccatcgagctgctactgaataaagcgccggtcacctttgacccgcgcatcaatcatgtcttgaaagcggccggaaatgcgctggatattgcccatatggagctgttatctggcgcgtttcacgacgccatgtatctggccgaacactgtccgaccagcatgctttttgtccccagccatcaaggcattagccacaatccggctgaatataccgatcctcgttcactggcggcaggtgcccgtacgctggcctgtgcactgactgagctatcccaatcacttgaaggagttaaatcatga

SEQ ID NO: 195739 - DNA, 702 bp, Klebsiella oxytoca
atgaccgcaactgcacactacccaatctgctgcgataaagacaatggcgatgccctgggcctcaacccaacggcaacctcaccgatttcagccgatggcgcaccgacgttaaacgaactgtataccatcccgccgcgctgcggacgcgccgttttgctgaaaaaagggcaggtgattaagatcatcaataccccaggcagccaggtctgcgacacgtggtttttcaataccggcgatctcagcgagtttgcgtccatggaacatacccgtgcctttatcgacaaaattattccgcagccaggtgatgtgctggtgaccaaccagcgccgtgctatcgccactctgctcaccgatacctcacctggtgtgcatgacacgttgatcgccgcctgcgatctttaccgctataccaacatggggattacggagtatcacgacagctgcgctgacaatatgcgcatggcgctgaaggcgattggcctgcgcgcgcgtgaagtgccgcagccgcttaatttgtggatgaacacgccagtaaatcctgattattcaatttcctggttgccaactgtcagcaaagcaggtgattatgtagagattcgtgccgagctggattgcgtggtggtgatgtccgcttgcccgcaggacattgtgcccattaacggctgctcaccgaaagaaattcagttcaccgtgatggcatga

SEQ ID NO: 195740 - DNA, 600 bp, Klebsiella oxytoca
atgaagcagacagatgaaaaaaacgctgacatcaaatctaccggaaccccgctgggaatgaggttgcgccacgcacgtctggtgcaggagctgaccctcaagcagctcgcgcaaaaggtggaatgctcggaaagtctgttatccaaactggaaaatgacgctgcctcgccgtcgctggcgatgttgcaccgcctggcaaaagcgctggagaccagtatcgccgacctgatggccgatgactggacggccgatcggcctgtactgaagcctgaacagcgaaaccgtaagcggttcctgcagcgcagtaaaaagggggggatcgaactggagaacctgacctggcaccacaaaggcgggttgctgcagggtaatattcatattatcgaaccgggcgtcgccagcgatggcctgattgagcaccacggcgaagagatgggctatgtgctggaaggcgcgctggaattgcgtctgggagaccatatctggctccttgagcagggggattcgttctattttcccagccagatcccgcatggttaccgcaatatcggccccgttgtcgccaaagttttgtgggtgaatactccagttaccttctga

SEQ ID NO: 195741 - DNA, 663 bp, Klebsiella oxytoca
atgcttcgatacgaattaacgcctaacaatgccggatttgtactgtggggcgattcagaggcgctggatgagttacaccagttaatccatttccttgtcgatgaaagccctctgatagaaggtaaggatggctttatgttgtctcttgcttatgatatccgcaaggccagagaaggctgtcgcagaactgaacagtatgagtatgagagtcaagacacataccatatttatggggtcgagcttttatggccacttattctaatccagttagctttattcaggcgttcaatgagctacatccaagtgaataaaaatcacttgttacttatgtattcatttgagcacatactggaatctgctttaaaagagttaatgccagagtgctgggaagatctgataagaatcgccaaatgtgccgccgattcagattttaagtctcttgaagacaatatcgacagcaggtgttgttattttataaatctgcaacctaaaatcagaaaaaaccaattaagaaacattctctgttcgtttgattcgctatggggaaaatatgccctcgataaacaggacgtaaaaatgctgaatgaaatgaatagtacaacgggtattggccagaagatattacttggtaaatcagaaaggggagtcagagctcccctgtga

SEQ ID NO: 195742 - DNA, 579 bp, Klebsiella oxytoca; identical to SEQ ID NO: 111904

SEQ ID NO: 195743 - DNA, 429 bp, Klebsiella oxytoca; identical to SEQ ID NO: 185642

SEQ ID NO: 195744 - DNA, 222 bp, Klebsiella oxytoca; identical to SEQ ID NO: 185646

SEQ ID NO: 195745 - DNA, 360 bp, Klebsiella oxytoca
gtggactactgccatgaaggggcttatgtcctcgctaaagggcgcccggtgccacccgaaaaaccgctgccggacgtgctgccgtttccttataccggcaatccgctgcatcccacccagaaaccggtggaggctctgcaaccgctgattgagtcattcagcgccccgggggcgattgtccttgacccctttgccggcagcggttcgacctgtgtcgccgcataccgtgccggacgtcgctatatcggcatcgaagtgctggcgcagtaccacagagccggagccggacgactggccgccatgcaccgggccgttaataccccggcggcgaacgatgaatggctcccggaggcggcgtga

SEQ ID NO: 195746 - DNA, 228 bp, Klebsiella oxytoca
atgcaggatccttcattgcgaacgtatcggatcgcatttctgggaagcaatgccagcggcaatctgccgatgtttacccgggtgcaggccacgaccggaaaacgggcgataaaagcgtttattgaacgctgtgaacccgtcaaaggctggtttctgggcgaaccggaagacattaccgatcagcttaagaaggaggaagaagaagcgggaagcaaaccgcagatatga

SEQ ID NO: 195747 - DNA, 231 bp, Klebsiella oxytoca
atgatcttttctattttttcaccttccgcaggcgctgtaaagccccgtcgtcattcgcgcattctgcgcgcagatatcaccgcacctgagattgatcccgctctcagagctttcgggcgtcatatcgccagaagtcaccgcaaagggcgcggtgtccacatccccgcgatgaaaaataccgccctcgggcaggtactccgcacgctggaactgaaacgcgcatttaactga

SEQ ID NO: 195748 - DNA, 975 bp, Klebsiella oxytoca
atgctgacagcgactccgactccgacagtgactcggattcggacagcgattcggattcagacagtgattcggattcggacagcgattcggattcggacagcgattcggattcggacagcgattcggattcggacagcgattcggattcggacagcgattcggattccgacagcgattcggattccgacagcgactcagattccgacagcgattcggactcggacagcgattcagactcggacagtgattcggattccgacagcgattcggactcggacagtgactcggattcggacagcgattctgactccgacagtgattcggattcggattcggacagcgactctgactctgacagcgactcggattcggacagtgactcggattcggacagcgactcggattcggacagtgactcggattcggacagcgattccgactctgacagcgattctgactccgacagcgattcggactcggacagtgattcggattctgacagcgactcggactctgacagcgactccgatgcagacagcgattcagactcggacagtgactctgattccgacagtgattcggattctgacagcgactcggactctgacagcgattctgactctgacagtgattcggattccgatagcgattccgactctgacagtgactcggattctgacagcgattcggattccgacagtgattcggattcggacagcgattcggattcggatagcgattcggattctgacagtgattcggatgctgacagcgattcggactctgacagcgactccgactcggacagcgattcggattcggacagcgactcggattcagacagtgactcggattcggatagcgattcagactccgacagtgactcggattctgacagcgactccgactccgattccgacagcgactcggactctgacagcgattctgactctgacagcgattctgactcggtag

SEQ ID NO: 195749 - DNA, 621 bp, Klebsiella oxytoca
atgcagcttcacgcagttgcgcccatcgcgcttggcgacgtacagtgcgctgtcggcgtcgcgcagcagaagattgtagtccgggtgaccggtgtggacggcgtagccgatgctggcggtaatcgaaatctcattgtcagcgccaacgctaaacgccagctggctgatttttttacgcagccgttcaaggatagtaaaagcttccgccgcgccggtctccaccagtaccagcagaaactcctcgccgccgtagcggaagatataatcgctggagcgaatattatcgctgagcagctccgcaacgtgcttgatggcccggtcgccgaccatatggccccagctatcattgatctctttaaagtggtcgatgtcgataatcgccaccgtcatcggcagttcatattccatcgccagcgtcacttcatgcttgaggacaaccggcagatagcggcggttaagcaggctggtcagcgtatccttaccgctttgcatctgcgacaggctgctaaacagcacccccatctggctgccgatctgctggcaattgatatggatcccctgcagcaaagcctgcgtgtttttatactcagaaccctcagacgaggatttccaggcggataa

SEQ ID NO: 195750 - DNA, 540 bp, Klebsiella oxytoca
gtgagttctaacctcgctgctgttgtagcgcagacaggacaaaaggttctatttattgatacggacatgagaaaaggctatactcataaattatttaacttagataatgagaatggcctttcagatatcctttctggtaaaactgaattaaataaggcagtgaaaactgtttcaaatgccggttttgattatatatcgcgaggtgccgtaccacccaaccctgcagagttgttaatgcatcgcagatttggtgagcttattaactgggcaagcgggatttatgatattgttattctagataccccaccgatattagctgtaacggatgctgctatcattggtcattatgttggcacgactttattaatcgccagatttgaacaaaatactacaaaggaaattgaagttagttttaaacgcttcgaacaaagcggtgttatggttaaaggatgtatccttaatggtgtaatgaaaaaagctagcagttattatggctatggttataaccactatggttattcctatactgacgataaataa

SEQ ID NO: 195751 - DNA, 675 bp, Klebsiella oxytoca
atgcgccagcatcgcctccgggaaattccgcctctctgcgcccggctcccgggggcggcgcttgacgcgccttgcccgggctacgggttcaccgccgtctgccaaacggtagcccggacagatgcgccagcatcgcctccgggaaatccccctctctgcgcccggctcccgggggcggcgcttgacgcgccttgcccgggctacgggttcaccgccgtctgccaaacggtagcccggacagatgcgccagcatcgcctccgggaaatccccctctctgcgcccggctcccgggggcggcgcttgacgcgccttgcccgggctacgggttcaccgccgtctgccaaacggtagcccggacagatgcgccagcatcgcctccgggaaatccccctctctgcgcccggctcccgggggcggcgcttgacgcgccttgcccgggctacgggttcaccgccgtctgccaaacggtagcccggacagatgcgccagcatcgcctccgggaaatccccctctctgcgctctgctcccgggggcggcgcttgacgcgccttgcccgggctacgggttcaccgccgtctgcaggccggtagcccggacagatgcgcagcatcgcctccgggaatgtccccttcccgacgccaaccgcaggcgcccggtaacgctcattttgtga

SEQ ID NO: 195752 - DNA, 804 bp, Klebsiella oxytoca
atgactattctttcaaatctaagtattgaccttactgattttacaggacggattcttatcgtcagtgacctatatggacattttgaactgttgctcaaaggcctttataagctgacccgttcgggtgaagaagtggttattattactactggtaatttatttgactggggcccttcagcctgtcagctgcttgaggctgttgtttacaaaaagtttggagacaggaaagttcatttttttacggttgtcggttttcatgaattgcttatgactgatgccattactcaaaagaacattaaaactttcaggtactttccggatacacatacgcgtaaacactggagaagtttaggtgggagctggcatgactcttacgaccagattttgcttgaacgagatatttacaaaatcgattatccactggtgattaatcttaaaacaaggctaggaacatacataattggttcgtcagatatcccccaggatggtagggactggaacactatcatggcaaccttgaacaagatgaataatctaaacctaagaattatggcgagcaatatcaccaggagtcggcattaccttgagtcagggaattctattaaggataaatcccttgtcgtgttaggtgtacatcaacctaagcaaatatacggaattttcaaaaatgaaatagaattagctaaatcaaccttgtgtctattccctaacgattgggatggattatcaaatgctccaaaggatttcaaaattcgatttcttgacatcactgaaagtgaacatgggagttgctatgacttttaa

SEQ ID NO: 195753 - DNA, 162 bp, Klebsiella oxytoca
atgagattagtgtgtactcatttaagcttcatgcaggaaatccttaccaaccacatatatcagaaagttatagtggtgatatttttattagctatttgtactatggaaatgattcttactacgagcgtaggcgtcaggagtacagaaaatatttatcattaa

SEQ ID NO: 195754 - DNA, 534 bp, Klebsiella oxytoca
atgaatgtttattatgatatcgaattggtttttaaatgggtcaaagaaaacttcattctgaagcattctgtttcccttgttaacagtccttggtacgactacgacatagagatagatttgcgcttagttaagcaatcgttgttaaacggtaattttgaatttttatatgttgttcgtgatcatggcacaatgttgcttttgctttcggattttcactcctccagatctcttgactgggatggtagtgaacgctttgagtattatcattgccaaatgataagcaagcaaagtatgaaattatccaaaaaagaagcgtgtgaacttctagatcgtgggcctttactcaactccttcagtgccggtagtaaaaactcctatctgaatgagattttagagtttgttaataataaaggctttaactactcccaagcaaagtcactttttgactgtaaacgcataggggacgagttaaaccttccctcaatgagtaacttcatagcaagagttgaaaaacatatactccatatgaattaa

SEQ ID NO: 195755 - DNA, 3138 bp, Klebsiella oxytoca
atggatatgagagcacaggtaaataaaaatgcagcggcaagtcagcaggcagcatccacaccttcaggctgtaagtcgtgtgagcgtaagggggttgcgatatacccgctacgtgtggctgcagtcccggcttctctggtgaataccggctggcatcctgccgttcctcaccaggatgtggggctgaaggggggcgagttcaaatacgccctgcgaacactgcgcgagggctatgtgtatgttctggcagataaacaggtctggtatgcctaccaggtcaccccgcagggctttttgcgcatgttcaatgcgaacgaaatgccggaaggagggaaagtggagcctctgagtgccgcctgcctgcagcagaatcatgatatccgcagcagctttatcaatatcgatccgaagcatacccatgcagccgtggccttcagcaatgacccgtggccccgggaagtgctggcgaaatataaacaagccggagcccgggcaccgcgttttacgcaagtgactattgctgacgggaaaacagcgacaattgaaggtgcggggcgcagcctgacgcttgaccccacgctctcagctctgacaaagaacgtgctggagtttgcgacagaaaaattcccgagtattgtcggaaaagaagggcggcccggtggcgcgtatggtttttatccgcgaagggatatcaggaagcagacggcgctgggtaataaggttgcggagttacaggagcagtacggtgtggtgcatgccattgtgctggatgatgccatcgggatggttcaggaattgaacagtgccagaatggatgtcgttaaggtaatgaccgactatcaggctaagactgaaaatcggcataagaagatgatatcagatgccattatacaaattcgggccggaatagcggaaaaaatagctacagatcccaccatccgagcgattcccggaaaatatcccatcagccgtgccaaacgggtatccatgaaaacccaggatgcgatggagcgactggaggactattaccatgagtcaattcgcgctgaatttgcctcgggttatcagtcaacggtagatggctaccagcggaagctgaaatctgtcgtacaggatttaagtgcggcttatcagtcggttttttggcataccgtgatcgagcatgattatgcgccagagaccagtgttatcagttgggctgcacttctgggcatgctagccggtaatctccacggtggcatggtagggatggacaaaagtgataaagcgactgatggcggtaaaaccgtctggctttcatggatgcaggacccgaaaagtccaccttacagggctttgctagccggcagaaaagatctgccgacgtcggtctatgacgggacgatgacttacgccaatcttaaaacgctgctcaatagcgacgagatggggcatttccttaacagcgacgccttcaggcaaacaacagcaagcctggtgatgtcgctgaatggggcgttcagtcaactgagcaacgtgctttcagcgaaagcggaagccgggtttgtccggacaatgtcggccctggcctgtgcagcaggtgaagggcctgtggtggcggtttattccggagaaatgaccgtcagggattatcagaatgtcgtgcgtaagccattaaatacccacggacaatcagttctgactcaacgtcttgaaaatgctgacagtatcatcagtacttcccgggctggtcactggcctgaaatcaccgacccggtaatcctggaccgtaaaattcaggtcaaactggcggctcctttgaaaacggttgactcgttgatgtttaagcaggcagcacgcaaggcggggacgagcgcgtcggcgataaaatcggggaacttgcttaaaaatccatctcagttggcaggactgccggacctgacaccagagatagtcagccactctctgacaacaggggaaattcctttaagcgccgcagatatgcgcagagtcgcaggctttcagtctgaactgccgccgagtttttatgcaggcagcctgggactggtgctagccggagtcatgcttggttttcagatccataccatgcacgagaatatgaaatcgctgaaaacctggctacctgactcacaatctgtaatgtcgcttggctcgggaacgcttttaatgatggcgactggggcagaaatcgtcgggcagacctatacgatgttccaggcgagcaaagagatggtgcacccaatgctgaaagtggctggagtgatcggtggcgtggcggtggttattgatggtatatcattaattatgaagaatcatgatgttaagaatttaggggattctaaagcaggaaatcaatatctagctgccggatatgtaacattgacagcaggtggtttgggtatctatgcaggtgttgttggcaattttgcacttttcagtgaaacattaattttaggacctataggatggtgcattgctctaggaatagtggcactgattttgacatccgctgctgacagcaatgttcgctcgccgctggagcgctggttgacccatacctgttttggcgtggttgaaaagcgcggcggtaaagagaaagcctggagtgccgccagcctgagtgatttgcaggaagcgatgaaagaattacataccattgccagcggtgtttcagcgcagctggttcgcgaccggatcactgagttcttgttcaattccacgatatcgggaaccgagatggtgtccgttctggcgacccttcccgattatagccagtccggttcagactggctggttgagttagctgccattgggagtggtgggcgtgaggtgctggcgcgtaacggttccccgacaaagcttgcaggcctggccaaaccagtgcctcaggctgttgaattgactcatatcatgagcatgaatgcggtagtcgttccacctgccattaaaatgacctctgcgcctgcactggatgaaacgctagtcacggcgggtaccagtaaaatactgcagctgagtggagaatacccactaaatacccggcgcttcacgggcatggagctgaaagtcagttactggccagacaaaacgtatccagaagaaattttgcaactttcagccaccatggacagccaataa

SEQ ID NO: 195756 - DNA, 144 bp, Klebsiella oxytoca
atggctagtattttcattcagaaaaccatatttgaatatttcaaacatagtgtaaaacttaagtgctataatattttttcttccatgcttcatgtttctcttttgatggaaataagtagtatccttcatctgcttgttgagtga

SEQ ID NO: 195757 - DNA, 2550 bp, Klebsiella oxytoca
atgaaaaataatcataataaatggcggcttaaccggatagctggcgctctggccgttgcgctgctaccgctgtgtgaagatgtcctggcgcgggaggtttttaacccggccctgctggaaatggacggccctcatacgggcgtcagggatttatccgcttacgagcaggctggcggacagctgccggggacctatcgggtagatatttatcttaataacgtttttatggacacccgcgatgtggtttttcagcagagcaaagggccgggaataacggaattacagccttgcctgacggtagacgatttggccgaatggggcgtacgtgtctcccaatttccagagctgggccgcagaacgcctggctgcgcggatatcagcgtgataccgcaggcaaaatccgattttcgcttcagtcagcagcgcctgctattgagcttcccgcaggcggcggtagccagcgccgcccgcggctgggtggatccgaaacagtgggatgacggggtgccggcgctcctgctgaattactccttcagcggggcaaataactggtcacgtcagaacgatacgccggacagcgataaccaatacgttaacctgcgccccggtatcaacgtcgggccgtggcgtttacgtaactacacgacctggtcgcgcagcagcagcgggggagagtccagtaatagttgggacacggtttatacttatgcgcagcgcaacatcaaatcgctacagggggggatgacgctgggcgatagcagcacggacgccgacgtttttgagggtgttccctttcgcggggcgatgctggcttccgatgacgatatgctgccggaaagcctgcgcggctacgcgcccgtcgttcgcgggattgcgcgcactaatgctcaggtcattattcgccagaacggctatgagatttaccagacctacgtcgcgcctggcgcttttgaaatcaccgatatgtacccgaccggcggctcgggtgatttagccgtcaccatcaaagaggcggacggcagcgagcagaacctgatcgtaccttacgcttcgctccctgtcctgcagcgcgaagggcggctgaaatatagcatgacctccggcgtgtatcgcgcctacgacaacagcattgacgaaacgcccctcacgcaggcgacggcaatctacggcttgccctgggggttaaccctgtacggcggcggccagtttagcagtaagtaccagtcggtggcgctgggaatggggaaaaacctcggtgaactgggcgccgtatcgaccgatatcatccaggcctggtcgacccgacaggataaagataaagagagcgggcagtcggtacgtctgcgttacagcaaagacctcccgggcctggggactaacgtaagcctggcgggatatcgctatgcgaccagcggttactgggatatgcaggaagtgctggatacctatcgggatgacaactacacgccttctattgaacggaggcgcaaccgcggggaggtgacgatcagccagagccttggcgaagaaatggggtcgctgtcgctgagctatattcgcgaagattactggaataccggccgcactatggagtcagtgggcgtcggatacaacaatagctggcgcggcatcagctatagcatgaactacagctataaccgcaatacgaccgaccagaacaccggtaagcgtaatgatgaagaccacctttttgccctgagcatcagcgtgcctttgggggaatggctaccgaagccggtttatgccaactactccctgaacagcagtaaaaatggctccaccagcaacaatctgggcctctccggcaccttgctggagcgtaataacctgagctggagcgtgcaggaaggctacaccagccagggaagaggggagagcggcagcgtcaatgcggactggcgtgcaacctatgctgaacttaccggcggctacagccatgataaatacagccatcggctgaactacgccctgcgcggcggagcgctggtacatgaaaacggcctgacgctggggcagcctttcggcgaaaccgtcgctctcatcaaggcgcccggcgccgccggcgtcggcgtgaatagccagacaggggtcagaaccgactggcgaggctataccgtcgtgccttacgcctcgccgtatcgtaagaatatcctgacgctcgataccacgacgatgccggacgatgtcgacctcgagttggcgacgcagacggttgtgcctacccgtggggcggtggttcgcgcaaattatgccaccagcgtgggtaaccgggtactgatgacggtacgccaggagaacgggcaacccctgcctttcggggccatggtcagcgtccccggggcggcatcctctgagcaggcgttcatcgttggcgatggcggacaggtctacctgaccggactggaatctaacggcgtactcaacgtgaagtggggctccgggacgcaagaccgctgccagatccactatgcgctgccgtcagcaaaagaacttaccggcattattgtggcccaggcgcaatgccgataa

SEQ ID NO: 195758 - DNA, 1092 bp, Klebsiella oxytoca
atgggcttttatgttaagaagagcattcgcgttggaccgatgagattcaacctatccaaatcaggagtcggtgcatctattggtataaaaggactgaggattggtactggcccaagaggaaattacatccacatcggcgctggcggggtctattatcgtgcttcgctttcaccaagtatgatcccacaggacggcaagaaggttcaacgtgtacctgatgaatccccagtagaacatgacaatacgcatgcacctcttgaggaaatcgagtcatctcatatctcggaaatcgttgattccaattcccgagaactgcttgaagagttgaataacaaacgtaagaagttacaaatatggcccttcgctattttcctttcgattgcaattttactttacggtttttcacaggcatggcctgagtggtgcctggcaataggatttatcgcagggggagctgtttccgtttttgcttacatgtacgatcagctaagaaagaccactgttcttttttatgactttgatgacgaaatgatggcatgttaccagcaacttcatgatagtggggctatgcttgcaagctgctcaaaggtatggcatgtagaagcttctggagctgtttatgaccctaaatatcatgccggagcaagtaacttgctacgtagaaaaacaacctctatcagcaaatcaaatcctcccttcgttaaaacaaatattgagacgattgccatcaatgtaggtcgtcaaacattacatttctttccagatagagtactcgtttttgaccgtgacggtgtcggtgctgttagttatgaccaactattcattaacgttggtaatagtcagttcattgaaagcgaaagtgtgcccggagatgccttagtcgttggcaggacatggaagtatgttaacaaatcgggtggtcctgacagacgatttaaagacaatacagaaattcctatatgtctatatgaaaatctttcgttcacaagtcattctggactaaatgagttattacagctgtctaaaattgggtatggggaatgtttttcacatgcaattgaaacacttagcaagaaagtcatatcttcttag

SEQ ID NO: 195759 - DNA, 600 bp, Klebsiella oxytoca
atgaatttacactttacaatttttcccaaaagaatacaaaaagaaccctatttccttcgcgaatccacggtaaaactgaaccgagttggcaataaccgagtaaagtcgcaattcatttttaaacgttctttcagccaaatagcactcattctggacctcgataaaagtgaagtggaccgggtcagaaaaattaaacaacggcttcctgatcataaattgatagggattgcccgctggatcattgcaccacttgaaaacagccaatcggctttatgttatctttttgtctgtgaagacaatgtcgcgtacctatctgcacctgagatggtttttactaatgacatcatatcaatagactcatcaaccagacgttcggtctataaaacaacttacaacctaactaaccccgatacgaaatatgggtatattaaccttcgttttcattctgaatacaaactggttacaaaaagacgtggtccatcaaaaactaaaaaattatccgaaggtaaaccgccttctgactatgcatctttgttggttgagtatgaagctttacgcaaggaagtcgagcggttaaaaaaatatgataacgcagaatga

SEQ ID NO: 195760 - DNA, 741 bp, Klebsiella oxytoca
atgaatcgtttgactgagattggttttatcaaggtgggattctggcagattatagacggtagcctgaagtaccatctcgatgacagattcacagatgttaagaacaacctctatgcatttgtttgtgatggtgaggtaaaatacgttggtaaaaccactcgtctactacgtaacaggatgtaccattattcacgtccaggcccttcccagactacgaatataaaaaataacgctaacatcattgagatgctatctaataatgttgccgttgatatcttagtgcttccagattcgggactgatgcactacgggcaatttcacttaaatcttgctgctggtcttgaggattccatcattagtgccattaaccctgaatggaatggaattcagaggccagaactgaagtgtgaggaagtaatatcaactgaagctgaaatcatcacacatagcagtattaaacaattcactttcaacatgacagatacgtactggcgaagaggattctttaatgtgccggtagtaagttctcaaaagtttggtaaagacggtgagaacatcaagattgttcttcatgatggcatgtcttccatcacggcaatgattaaccgaactgccaatcagtctggttcaccccgcattatggggggcgttgagcttaggcagtattttcaactcaattacacaattggtgatgttgtacctttcgaggtgctcacacaaaatatgatgaagctaaaatga

SEQ ID NO: 195761 - DNA, 597 bp, Klebsiella oxytoca
atgaaatcacgaattgaatatcgcataaaacaatcagtcataactgttgctatcaccttcagtttttacgtatttcaggggattgcaataactccatgccaagcaaaatcaactgaagtaaaaccgactttacacgcaaatactgtttctttacagcaaatctcgcaattatctagaccatctatcatcgatatacttccgagactttatacagctgaagaggtttattcacgatttaaagaacatgagtttagggcaactaacgatttcaaaaagtgccgattgatggttacaggtaaaataaaaaaaatcggtactgttacattcagtaagaatccgttagttacattgtatatttctggttcaaatgaaggactaaagtttatttttgaaaatacggattataataacgataaggtagcaaagttaaacgttggagatacagtaattattgcaggatggaatgcacgtcctggaacatttgaaggtatttttttagatgattcgcaaatcatgactggtatgatttcaaaaaagaaaaggcaaatgttggctgtgaatggtggagtctatgatcgggagatttgtcttaagtaa

SEQ ID NO: 195762 - DNA, 369 bp, Klebsiella oxytoca
atgaaaaataatgccctgactttggttttaaaaaacgactggataacttcgtcttctagtcaaacctataacggaaaatacatggttggacattttcacctgacagatacgtttatcgttgaatatatgaatctgatacatggagtcgaaatacctgattcatgggtcagcagcggcttcactaatacatcagataccaacacccgtaaggttatgtatatggaaggctgcggtatgttatctaacgatacaatgaatgagatccgtaatgcagtgaagattccgtctgacgacgtgaaaatttaccacaatggtaataagattgttaagatagaatttatggaagattacaatgaaatcacgaattga

SEQ ID NO: 195763 - DNA, 765 bp, Klebsiella oxytoca
atgactatccttataaaaacgttaaaaatcatggcatcaggcgttgttctcatttcagctataaccgccgcctccagtaccgtctatttcttgccagaggcgaaatcagcaggtgtcgccagcaacgacaaaaacgccctgatgtttctcggaatggacagggatgtaaatctgaagggaatatgcttcgcgataacaaagcaatcatcctcgatcgtgccgctggtagatatcactgctacaactgataacggcagattcacgatgcacggactacgcccaaagaataacgacgatacgaaggaattagtctgttcacttggttcagaagctggggatttcttgactggcattgcgaagtcaaccaccgtcaacgtgaaactagatttcaatggcgagatccgcagttacagtttcaacactacagagttcagaaaaatactgactgccaatggtcaaggagtgtgggacaaagcagctaaagattatgctcagggagttcgtgcacccattttctataataacaaccgcgaagccaccaaaaacaatgcagtaacctcaaatgtcgatacacacagttataaagcaagcgatgagaaactaaattcggtctggaaaaaccttagccctgaaactagaaaacgattactcccttcccaaagagaatggataaagcaaaaatccggttgcaataatgaacagaaatgtcttaccgacatgacgaaaaaccgtattcgtgaactggagtctgaaaatgaaaaataa

SEQ ID NO: 195764 - DNA, 435 bp, Klebsiella oxytoca
atgtttgattcaattctggttatatgcacaggtaatatctgtcgttcgcccattggtgagcgtttattacgtagggcgttgccgaataaaaagattgattcagctggggttggtgcgctagtcgaccatgccgctgatatttctgcgactcgggtggcggaaaagaatggtctatctctgcaagggcatcaaggaaagcagttcacttccacgttggggcggcagtacgacctacttctcgtgatggagcaaatccatctagaacaggtgagtcggattgctccggaagtgcgtggtaaaacgatgctatttggtcattggctaaatggtagagaaattccggacccgtatcgtaaaagcgatgaagcttttgagtcagtatatcaactacttgatcaggccagccagagttgggtggctaaattaagtggataa

SEQ ID NO: 195765 - DNA, 2172 bp, Klebsiella oxytoca
atgacttcagtcacaactaacaaaccggcgacgccggactccgatgaacttgatctcggtcgcctgctaggcgagttaattgatcatcgtaaattaattatttccgtaaccgccgtatttactatgctggcgatactctatgcgcttttagcaacgccggtttaccaagctgatgctttagtccagatagagcagaagcaagggaatacgatattaagtagcctcagtcaaatgctacctgatagccagccacaatcggcacctgaaattgctttactgcagtcacgaatgatcctaggcaagacagtagatgatttaaatctccaagctcaggtcaaacaaaagtatttcccgctgggtggccgcggattggctcggataatgggagagaaagcggggaatattgaggtcagccgtctatatttacctaatgatgatagcaatagctataatgtacctcagattattcttacggtgaaagataaaaatcactattcagttgagggcgaaaattttagtgctaacggtacagttggagtgctattaaatgagaatggtatttctcttttagttagtatgattgaagcgcagcctggtgataaatttattgttagtcaattaactcgattacaggccattgcagatattcaggaagtattcaatgttactgaccagggtaaagatacaggaatacttaatctgacattaactggagataatcctgagttaatttcacggattttggatagtattagtcaaaattatcttgctcagaatattgctcggcaagctgcacaagatgctaaaagtttagattttttaaatcaacagctacctaaggtccgaaatgaacttgatattgctgaggataaactaaacgcatatcgaaaacagaaagactcggtcgatctgaatatggaagctaaatcagtacttgatcagatcgttaacgttgacaatcagctaaatgagttaaccttcagagaagctgaagtttctcaattatataccaaagaacatcctacctataaagcattgatggagaaacggcaaactcttcaagaagagaaagtgaaactaagcaaacgagtgagcagtatgccatccactcagcaggaagttttgcgtttaagtcgagatgtggagtcaggtcgtgcggtttatctgcaattgcttaatcgacaacaggaacttaatatcgcaaaatctagtgcaataggtaatgtgagaattatagatagtgctattactgaaccgaagcctattaaaccaaaaaagttatttgtcattgccattggttttatcttgggcggggttatttctattggtttagtattaatgcgaatcttcctgcgccgtggtattgaatcaccggagcagttagaggaaataggaattaacgtctatgccagcatacctgtatctgagtggctttcaaaaagcaatcgtaaatccaacagtctccataagaaccagtccgatactttactagtggtggaaaatccagcggacttggcggttgaggcaatccgtagcttgcgtaccagtcttcatttcgcaatgatggaagcgaggaataacgtattgatgatttctggtgctagccctaatgcaggtaaaacttttattagtagtaatttagctgcaattattgctttaaccggtaagaaggtactgtttatagactctgacttacgtaaaggctatgtacataaaatgtttggtcgaaagcaggataaagggttatcagagattttatccggacaggtggcaacagaatctgtaattgaaaaagtgaccgggggggaattcgattatattggtcgtgggcaaatacctccgaacccggctgaactgctgatgcatccgcgctttgaacatttgttaacatgggcatcacagcactatgatttagtcattgtcgatacaccgccaattttagcagttacagatgcagctattattgggcgttatgttggcacctcccttcttgttgcacgctttgagaaaaatacggtgaaagaaattgaagttagtatgaaacgttttgaacaaagtggcgtgacaataaaaggttgtatccttaatggtgttgtgaagaaagccagcagctattatggttatggctatagccattatggctattcctattccgataaaaagtctgattaa

SEQ ID NO: 195766 - DNA, 918 bp, Klebsiella oxytoca
atgaaatattatatagcaatacctacttataatggtggggaagtatggcaaaaagcagtggagaatataaagaaattttcgccacctgatgtttttgttcatgtgatagattcgggcagtaaagatgatacgacatcaatagctcaggaagccggatttaatgttgtgactatatcgagtcgtgactttaatcatgggggcacaaggaataaggctgtcattgaatttattgaaaactatgatgtagttgtatttctcacacaagatgctatacctgagtctggttttattgacaatataatatcggtttttcaggacgagagcgttgcttgtgcttatggtaggcaatgtcctcatgaagatgcgaacccgctagctcaacatgcgaggaaatttaattatcctgataaaagttatatctgtggtaaagaaagtattcccgaaatgggattaaaaactgtttttatgtcgaattcgttttctgcatatcggttggatatatttaaagagctttgctttttcccttctaatactattttatgtgaagatatgttttatacagctaaggctatcttagcaggttataaagtagcttatgtttcaaatgctatagtacgtcattcgcataattatacagctattgaagaattcaagagatattttgatataggggtctttcattgtaaagaatcatggattcgagaaaagattggaggggccggtggcgaaggtaagaaatttattatttcagaactgatttttcttttaaaaaatgcaccccattggataccagttgcatgcattaataatttcatgaagattttaggttacaaaatagggaggagatataaggttttacctaaaaaacttattaagatgtttagtatgcataagagatactgggattcaatatattga

SEQ ID NO: 195767 - DNA, 183 bp, Klebsiella oxytoca
atgtccagacaggaagggaaacagaacgacccggttgtatcgaagtttctggactttattgaagatgacatgaagaaaaacccgcagaacatagcacctgtgccggtcgtattctgggaaggtatcaaagcattaactgctggggttgaagtcgatttggacgcactgattaccgataactaa

SEQ ID NO: 195768 - DNA, 432 bp, Klebsiella oxytoca
atgtttaactatccggtaaaactggaacgcgacgaaagcaccggcgcgtatatcgtatcatgccgagatctgcccctgtttaattctgtgggcgatactgtagaagaggcgctgcttgaagccagcttcggtctggtggcagctgtagctattgagatagaagagcgacgccccgttcctgttggaagcaagcctctggaaaatgaatatgtggtctcgctacccgtcttgcctgcaatgaaggcggcattacacaatgcaatgatcgagacaggaacacgcaaagcagagctggcccgtaagcttgggaaaaatggaactcaaatcgacaggctgctcgatgtcgagcactcgtccaaagtggaaactattgagctggcattacatcaattaaataaaagcgttggtgtgtcagtcacttctatgcggtaa

SEQ ID NO: 195769 - DNA, 288 bp, Klebsiella oxytoca
atgaaagtagaaggcatcccatttaaccaggtcaaagaaagtctgctcaacaccccggaggcaatccgggcttaccaggaagcagataaagagctggcactggtcgaaatgctgtacgacatgcgagaaaaggctgggttaagcaaatctgccctagcggaacggatggggatcactccatctgctattagccgcctcgaggggaaccctttgggggccagcatgaagacactgagcaaatacgcgcaagcatgcggcgctgaaattaacatccaggccgtgtactga

SEQ ID NO: 195770 - DNA, 279 bp, Klebsiella oxytoca
atgaatgctgattttgttgctgattaccttgccgactacaaatatctattttatttattctgcctggcagttctcgtctaccgctacatcacggttggacgtaagtacccgctattcaggaaacatcagcaatcccctgagtactcagcaaagacgtcgtattctctttcagatgatgacaggagagtgcgtcatagtgatatctctgacatgcgttctaacgagtaccattactacatgaaaaggaccgaagaaatctttagtccggatgacaaatga

SEQ ID NO: 195771 - DNA, 279 bp, Klebsiella oxytoca
atgataggccatagtaagagactcagtgtcgttaaaagaccctcctgtttgtatgacacgaaaaatgtgaacagcctacaaagaggcataagtatttttcacaatgcctcgttacctcctatgaggctctcccaaaaagtaactttccgacaaaagttacttttctcagtagtgctgcaacggtcacattcaacaactgacatcgttctcaccaaagattctacgtatcttatggacgtcagtttccctcaatctagaggcagggaggttattaaatga

SEQ ID NO: 195772 - DNA, 852 bp, Klebsiella oxytoca
atgaaaaaaacactcatagctatcctcacctgcacttttctggccggttgcgcctctcaatcaacgagtccagataaccgtatgtttacaaaagaacatggtgtttactggcatgctgatccccaaaaatcagttgcattgaacgcatactctcttgctggggttcaggttaacgtcgaagaagctgagaaagcttcagggggagttgatgaaggtcttgcctccaaaatgctcttgaatacggcaactggagctatcactggtggacttaaagcaggtatcggtatgtttacagcttcactatatagtgaggctgatgctgaatacattcaggtcatgcagtatgtagtttttgttccgaatgataaaaatttaccaatcgacgacgagtctctggttaaggcaggggctaaaaccataatcgaagcattgaaaaataaaccccaaataggcgaagcttcctacacacctcaaatacaagcattggataattgcaaaataagtaaggctataattgggatgtgggatagctgtgaaacttcaacacatatttctggctcaggaagtaataaattaagattttttgatttccaggtgatacgaccagctactggtgatgaacttactcagctcggattaaaaaaacggagttattctgttattcgttacattgatttttttcctatagggctagagtttgacactaccaacttccctggtttcatattgatgcctcaaacaccgaaaactgcacctggctttgcgagtgtatctataaatggaggcgagtattatttcatcaaaggacgtttaggatataaaaaattccctttaaagaaggctgttaattaa

SEQ ID NO: 195773 - DNA, 351 bp, Klebsiella oxytoca
gtgttccaagtgttcaagtcagggacgcatacactaacctgtcaaaggcacaaaataagggaagcgtttcaacgcgctgccgaaaagctggaaattgaaattctggaaatggacggggaagcggatcacttccatgtattgatcgcgtacctgccgaaactttccatcagtgtgctggtcaataatttgaagttgatcagtagccgccgcgtgcgtatcctgaatacgaatttacgcaaggtgagtgatagcggggtgctttggtcacgctcctatttcgcctgttgtactggcggcgcaataatcgaaactctgaaagcgtatgttgcatcgcagaaaacaccagattag

SEQ ID NO: 195774 - DNA, 1092 bp, Klebsiella oxytoca
atgaacactcagaccaaaactttatctgtccggattaaagacaagcacgccgccgttttgcggcagatggcctttgaggtcaatcaggtctttaatctggcaaacgagataaccagcgcggcatacagcaacgctggggtctttggtgcgcaggttccaaagtggttaaccgcgtttgatgttcagaagatgacaaccggcatacagcgtgagcgcggctattccatcggcagcgctacggtgcaggaagtgatcgctcaccacggcaaggcgcggaaacagttcaggcgttcacgcctgcgctggcgtgtcagtagcggcgctcgccgttcgctgggctgggttccgtttaaatcccgtgcagcgcagtggcaaaacggctgcgttaagttcgcaggccactactttaaagtctgggacagctatggccttgcaggctataaatttcgcgctggtagcttttcagaagacagccgggggcgctggtatttcaatatctgcgtagaggtagaaaccgtcccgaccgcaggcaccaccgccgtgggcgttgatctggggttaaaggactacgccaccccgtcagagggtgaaaagctggaggcagggcgtttctatcgcgacctggagtcggcattaggcaaggcgcagcgggcaggcaagaaagcccgtatacgtgccattcatgccaaaatcaagaaccgccgcaaagataccctgcacaagttcagtacggcgctggtaaacagccatgcggcaatattcgtaggcgacgtgagcagcagcaagttagccaaaaccagaatggcgaagagcgtattagacgctggctgggcgatgctcaaaacacaactggaatacaaagcgattgcgcggtcagtagtgtttgaagtggtcaacgaaaggtattccacccaggcttgttcgtgttgcggggctatctccgccaacagtccgaaaggtagagcagacctgcgaataagagaatggacttgttgtgagtgcggaaccgctcatgaccgcgacgtaaacgccgcaaagaacatactcgcggcagggcattgccgtctggctgcaggaatccccgtcctttag

SEQ ID NO: 195775 - DNA, 411 bp, Klebsiella oxytoca
atggagttaacttatcgggctgggcgacattgcattttcatgctccactgccatttaatcttcatcactaagtatcgcggggcggtattcaacgccgcacatctggaaacgttggagggtatttgccgcaacgtatgcgagctgtttgaatgcgaactggtggaatttaacggcaagtcggatcatgttcacatgctgcttaacttccctccaaaggtgtcaatcagcaagctggttaacagcctgaaaggggttagcagccgcaagatgaaattgcatcatccagacctgcataggcctgcctggaagtcagatgcgctctggtcgccgtcgtacttcgcgggtagcgtgggcggtgcgccacttgaagtcattaagaaatacattgagcaacagaacggccctcattaa

SEQ ID NO: 195776 - DNA, 204 bp, Klebsiella oxytoca
atgacgatactgatgtttgtacttctgacgattgccctgataatgaaatcgctatgccagacctacttaattactggacagttgatgaagtggctgaatgtctcgacggcgtgggtgatgatctttacagaaagctatggtcgtacattacagcagagactgatggtaacccgccactggctaaagttgcctgggaagcgttga

SEQ ID NO: 195777 - DNA, 162 bp, Klebsiella oxytoca
atgattactgcgctgattatcatttattcgttcatggctggcatgactgccgaatatacgcacaccagactgaaaaaaatgtctgcctcagggggcttggttctgaccgctattatcttagggattttgtggccttatgaaattttctggaggtccaaataa

SEQ ID NO: 195778 - DNA, 531 bp, Klebsiella oxytoca
gtgggtaatgaacctgaatggaaagtagaacgccagcctgcatggctggtggccgcgataagaagaactattgctgatttatcgggtggatatgacgaagctgctgaaattctcggggtttataagtccgatgacgtaactccggctaccgacccattgcataaccggcttcggaccaacggcgatcaaatcttccctctgggttgggcgatggttttacaagctgctggtggctcaaatcacatcgcaaatgccgttgctcgtcactccaatgggctctttgtgccgctagctgatgtggaagatatcgataacgccgatatcaaccagcgtctgatggaatctattgaatggattggcaggcactcgcagtacatccgaaaagctactgctgatggtgttattgatgctgccgaacgcgctcaaattgaagagaacagctaccaggttatgaccaaatggcaggagcacctgactctgttattccgggttttctgcgcccctgatgaggtttcccgaccgccagactaa

SEQ ID NO: 195779 - DNA, 261 bp, Klebsiella oxytoca
atgtccaattcacccaccgaagccgcgattaaggcagcagggcggtctttatcagaggtcgcgcgtagctttggtttcaagtctacccagtcagtagccaactgggtcattaacgatcaggtcccatctgagcgcgttttgcagctatgcgaacttggcgggtggattgttactccccatcagctacggcctgatatctatccgaaccccaatgatgggctccctgacaacaagactcaggttactacttctgctgcttaa

SEQ ID NO: 195780 - DNA, 705 bp, Klebsiella oxytoca
atggtagaagaacaaaagtatccagattttgccgcccgcctgaatgggctgatttctatgagcgatatctcaatcactcagttatcagaaaagactggtgtaacctatgagatggttaggcgctatacgcttgggacggcaaaaccaagaactccaacaatgcggaagctttctgcggttttgggggtggacgcggcatatcttgagtatggcgttggtaagccctcggagggtgaagcggtgaagtctattgccagcaatccattgcaggatgtttatcgcgttgaagtacttgatttaacagtcagtgcaggccccggaaactacatgatttccgactatgttgaagtgctttacgctattgagttcactacagagcatgcgcgggtgctctttggaaatcgtgatcctgcagatgttaaggttatgaccgttaacggcgatagcatggcccctacccttgtgtcgggcgatcggctgttcgttgatgtatcggttcggaattttcagactgatggcgtctactcatttgtttatgggaagactttccacgttaagcgcctgcaaatgcagggtgataagctagcggttctgtcagataacccagcttatgagaagtggtacatcaacgaagatacccaagataacctttatgtgatgggtaaggcattgattcatgaatcaataaaatataaccggctatga

SEQ ID NO: 195781 - DNA, 1035 bp, Klebsiella oxytoca
atggaagcttcagccttaccaatcaacataaactcacttggcgaccttgaaactgtttttaacagcttaatggcaggcgaagacatacgcattgaaaatattaagctaaattttttcaatagcattgatttcaaaatctatggcgatgaaaacaaatacaatggtacattgccatcaagtcttgctcagggtatctgtgagtttcagacagaaatgtataaagtttatactctgataaagtataaaacttcaaacttacagaaattaaccatagaagatcgtgaagctgctgagttggttttcaccattaatccaggttgcaccgagataatcgcctctttaaaagagttgtttgaggcttttggtgaagcatttgcaaaggtaacccaaggtatgagcccaacacagaagacaatgtgtttcctgtttgctctggccgtattaggcgggggctggatcggcacgtcataccttgaaagcaaggctagcattgaagaaaagcagcaagaaattcaattagaagatgtaaagcaaaaagctgaaatcgaaaggatgactcttcttaaagatggaatgctttctgcaattaaagagcatgccggagtagataccattgaaagagcagaaggcattcaggaacatacagcaaaagcatttacgggcgtcctgaagggcgcttccgatgccacccacataacgataacgggtgtggataaagttgagctgactcacaacgatatccaagaaatcatcaaaaaccctattgaaaaagctaaatctgaacagcttactcttgaggttttaatagatagcatcaaacgctctgcggacaagctgactcttagttgccacgaaccgactggagaaacgtcctttcctatttatgttgatactagtttcatcaatgatccagatgaaataggtataatctttgatgctatgaagggaaataaaacaataaaaatattaggaagttacaaggtaaggtctggtgttattgagcagggaaatgcctcaacaatatctcatccgtag

SEQ ID NO: 195782 - DNA, 207 bp, Klebsiella oxytoca
atggaaagcgattgggaaattgagcggcccgcattcatagctggcgaggtcggtgaagccgcaatctggctaatactgaaaggcgaagaggtcaaccgagccgcgatggcagaatatttggagaagaagcgccgggaggtgggcaacacgatccacaaaggtgtcttgcgagatgcagccaggcttgtgagggatggaaaattttag

SEQ ID NO: 195783 - DNA, 207 bp, Klebsiella oxytoca
gtgactatcaaagcattaagcgtaaaaactaacagcagaggtattacatattgcctgcgatcctgtggggatgaattcgaagtttggaaattatgcgaaaactattgtcgccttacaaaaggcgggattcgtaagacctggcgttatgtcgaaaagggaatgacgctggagagtgcgcaaaaactgtttgagcgccgcacgaaatag

SEQ ID NO: 195784 - DNA, 129 bp, Klebsiella oxytoca
atgaactcagaatccctcagcaagcgccctcttaggaaggcgttaattctgaacggtatagcgctgatcgcaattatcgttctttcagcattgggtatctggctggttaacgaatgggtggcagcatga

SEQ ID NO: 195785 - DNA, 309 bp, Klebsiella oxytoca
atgaaagaactgaaattttacggtgccagtgatgatctttttgagtgcgaaggcgcaattcgtgaagagctctgcatgtacagcaaccctggcgtttatcacctcaaatcatctgaaggtgagatgctcgttattgcctgctatacggacgagggatgctgggctattggcgctggtcaggtcaatgaagaaacccctcttcctacatggcctgcgtcatatagccaacatgagcgcggctatagcgtggtcttaacgctgcaggtacctgacgacaccgagttagtgctggaggatagcgatgattga

SEQ ID NO: 195786 - DNA, 318 bp, Klebsiella oxytoca
atgattgatatcaccgaactgacaggcgcacccaagcacgcaaatcagcatcgtatctcaagaataatcgtcgaagcacctaacgatgaattgcgccaattggcatcagaggttgagcaatatacggatcaactcatagaggcgctggagaaggcgcagcagcggattggtgagctggagtcaaaactagctaatccggtgcaattgccaaaaacaaacggctactggactgagcaagaaaaggcttatgaagaagctattacgctcgcgaagcggcaaattcgcgttgccggatttcgctgtgagggggatgagtag

SEQ ID NO: 195787 - DNA, 177 bp, Klebsiella oxytoca
atgcatcaggttgccgataccctgatgctatcccgtcacctgaaaggtaaacctgtcgccatcgtggcgcgcaccaccaaaggttccggcgtcagctatatggaaaacaacggcgactggcactcaaaaaccccgagcaaagaacaatttcagcaggcgatggaggagttacagtga

SEQ ID NO: 195788 - DNA, 264 bp, Klebsiella oxytoca
atgcatttatcaggtgaatttaccttcgcgtccatggatggcagcgccccggtcagctacagcaatgctgtggcagttatcactgaatcgccgtccattttcgtcaacggtctttataaatcggttgtggcgttttattcggacgaagccaaatcgaccgtcattttctcaacagatttgttttctgaaaataacacggaggagtcggcgttaaccgccgctaaaaggcaatatgcgcggaacatggtcttaatccgcggatga

SEQ ID NO: 195789 - DNA, 1881 bp, Klebsiella oxytoca
atgaccagacttccagagtcctcatcgtgggaagaagagattgagctgatctcccggagcgagcgtgtcgctggggggctggatggcccagcaaaccgcccactgaaaagcctcgcaaaccgaacgcggtatctcaaagaccgggctgacacagcaggtgaatcgatcgccgaaaaagtcagcgcggtaaagacattcgccgagggcgcgaccctggaatcgccgcgtgaagagatcctgttcgacagttatcgcctggtgtggacaggggggtttccgaaaacggttctggctggcagtacgccgcaagggacgggcggaattggtgccggatgctgggcgtatacgtcggatgccgtaatccgccaggatctgggttcaagagaattacccggcgctatcttagtggcgctgccctacgggactgtcgcatccgccattcagttttttacacctgagatgtgggggtgtgtcggtgatggcgaaactgatgattacgctaatttccaggagatgctggacgctgtacctccaggggcgacaattcatctcgatggcagaaagacctattacaacgcattccccgtatccggaagggatggaagctggacgatttcaaaaccgctgactatccattgtaatggagcgaagataacgcggcgtgtcgctgataccagtgatggtcagtcctcattgttttttattcacaacgcatcaaacgtcaaattactgaacgttaacattgacgggaataacccgctcggatatccatataaaggcgacggtacgcagaatacatccggcaaacagacgtcgctatgccaggccattgactacggaatttatatgctgggttccagtgatattgaaatcaccggcaaaatccaaaaatgtgcgtttaatatttgggcaaaatccagcagccggtttcgtttcaatggaacgctggattacggcggccaggtcgttcccaatgtcacgtcgagtgacctggcgtacggcgcgggagttaaagtttccgacagctccgactactacatcaacgtgaccgggaagggcaatgccaacgcgaccgtggaactggagccgaacgcgaataacggacatgtcgtttgccgctcctggaataacctaagctccggcttgacaataacgaacagtagtaacatcgagtttgaggcgtatacatacggagccagcatcgggacgcagataactcaaggagcggacgctcaggtgtacggcattggcgggctgtcgatagctgaatcgtgctcgtgggggcttctgctgaatcaacgctccgatgccgcctacagtatgaagatgctgaatatcacggcgcagagcaatgcgtgtacctcgtatggattgtacatactgaacaacagcggcctgccactcaactcctacgatattaactacactggcgacggtaactattcgcagggagctggggcaagcggcaatgacgttgtagtgaccggagattgtcggggcatagtgagggggaaaagcgccaactgctacaacgcatttctcgttagtggtacgcaaaataaggcactaccaccacgtttcaatatggacgtcagggaaacgtccagcgttgactattacatttccgcaggctcttatgcggatatttccgggacagtgacgaaaaccacgcacgttatttcagggggcagcaacatcacaaaagcgcatgtttaccagctcggcgcgggcggtgctcaatcggcccttgcggactggatggttaagtccgatcattattattacattccgatgcctacatcgtacacattcaataattcgctttacgctgttctggattcagactcaacaaacacctacacactcaaagttagaatgtaa

SEQ ID NO: 195790 - DNA, 597 bp, Klebsiella oxytoca
atgaataattcgctgatggcgaacgggtcatctctgctggaacagcgagcagccgcagcatgtgcctctatcagcgatttatccgtgccgctgcgtgacctgtggaacccgtggaaatgcccgttaagtttcctgccctatctggcgtgggcgtgttctgttgatagctgggatgaaagctggagtgaacaggaaaaaagaacggtcatcagtgagtcattccggctccatcagtacaaaggaacgatagccgcaatccgtcgggtggttgagaaaatgggctattcattctctatcgctgaatggtgggaagtggctgaaccggcaggaacattccggcttgaggtcgatgtaaatgatattggtatcacatcccggattctggatgagctgacacggttgattaacgatgcaaagcctgtaagtcgacaccttgctcaattcaatatatccacacaggtgcgaggagatattcatatcggcgtaacactgtgcagcggcgacatcatcagcatctatccggaggattttgaaccggaagagaacattacttacaacggcgtgatttttcacgatggcaattttaattacgggtaa

SEQ ID NO: 195791 - DNA, 885 bp, Klebsiella oxytoca
atgaaattttatactccattaagataccccggcggaaaaggtaagctatcttactttttgaaagatgtcattgaacaaaactcgttgaatgatggggcttatgctgaaccatatgctggcggggcaggggtagctttagagctattattagaggagtatgtccgtaagatttacattaacgatgcggatttcgcagtttattcattttggtcgtctgttattgatgatacagataacctttgtaagcttattagttctgcaaaaataaatatggaagagtggtgttttcatcgttatgtgatctctaatccttcagaatttactaagctcgaaattgggttttctgcattctttctaaatagaactaatcgctctggtattttaaaggctggcgttatcggcggtaaagctcaaagtggaaagtggaaaatggacgttcgatttaatcggtgtgatcttatatcaagaattgaaaatatagctaattataatcagcgaatagttgttacgaaccttgatgctttggattttcttgatgcgttaaattttatggatagtgtgggtaaggctgataaaaataaaacgcttttatatttggatcctccgtattatattaaggggcaaggcctatataggaatttctatgagcatgatgatcatgttttggttatggaaaaacttagagatataaatttccctaaatggcttgtctcttacgataatgctaaggaaattaaagatatctatagtggttttcctcaggttgagtactcattgcaatatacagcacaacaaaaaaaatctggggaggaagtgatgatattttctcctggaatggctatccctgacactcttaaaggtgtctctatgccaatttccgcataa

SEQ ID NO: 195792 - DNA, 1500 bp, Klebsiella oxytoca
atgaatcaaataaaatcaatgaatatcaataagttgttattggatgttgataaccctcgtttccctacatcagcagaaaaccagcgtgatgctatagcaaaaatgcttgagttacagtatgaccgtatctatcgcttggctaaggatattgttgctaggggactggatccatctgaaaatatcttagtctatccaagtgaagaggaagacggatttttcgtggttgcagaagggaaccggcgagttacagcactaaaacttttattatctccgaaattagctccgagcgaaaaagcaaggaaagcttttgaaaaacttaaaattacgcaacccaatgatattaaaattataaataactgcgttctctttgatgacgatgattacgaacattgggttaatctgaaacacactggacaaaatggtggggtcggtagggttgagtggactgcgccagaaaaagcccggcatatggctcgtatgggtaagcagtcatttggcaaccaagtacttacttttttagaattaaattctgatttctataaagatataatagataaaaagagattgttaagaattacaaacatcacacgtctttttggtgatttaaaagttagagattactttaacttaaaaagtatcaatggaatattatattcgtttcagccttatcaacgttttcgagaacagcttaaaaacatcttgattgtaatggttgaggaggatgaaaaaggtaaggcttgttttacagttaatagaattcgtagtcaggatgatagggttacattcattattgaacaaaaaattaaggcatctgaaaaccttcttaataaaccgtggagcttacttgatccgaatcccggtgtttctgaagaggatggtaaggttgaattagaagaagatgactcccctaataccaaaggaggtgactttccaggaggtagttccttcggtggggaagatgaaaagggtgatgaatattttaaaggtgaggatgaaaaggaatctaaacctgagcaggatgaagaaccaaaatcgaaaggcaagggtaagaatccgcctaagatggatcgtaataatttaattccttcttatgtgaaacttaattttagaggtcataaaaagtgttctcgcatattcaatgaacttaagagccatttaaccttcgatactactcccaatgcaatttcaatattattgcgcatatttattgatctctcagtaagtgcttttatcgaagataataaaattgaatcgaaggatccgaatagaaacccagggcttcatgataaggttataatgtgcgctaactttcttcgtgataataaaaaattaacaggaagtcaatgcacagctgtaataactcactctagtcaaataactaagaacaatggttctttgcaacagtatgtacataatcctcatttgattctttcgaaagaggctgtgaacactgagtgggataactttgagttgctgctcagccttatctggagtgactga

SEQ ID NO: 195793 - DNA, 1005 bp, Klebsiella oxytoca
atgattgattcccgctgctttgccaaaagtaccataaatattgtttctgtctcaggtggaaaagacagtcttgctgactggctgcttgccattgaagcagggattgcacatatgccagcgcttgccgataccgggcatgagcaccctcaaacgatggaatatctggaatatctggaatcaaaactcgggaaaataacccgagtgaaagccgatttttcgcgccaaatagaagggaaacgcaagtttatcgctgaaaaatggccagtgtcgttggtggaagagtgcgggatgtctcacgatgaagcggcagaacgtattgtgcgtgcgttggaaattcttcacccgaccggaaatcctttccttgatttatgtatgtggaaggggcgatttccaagcactaaggcaagattctgcacatttgaccttaagcatgaacctattcgcacgcagattgtattacctgcactggaggaatacgacgaggtaataagctggcaaggtgttcgtgctcaggagtcacccgcccgggctgctttacctatgtgggaggaggatgcagataatacccccggtttgcatgtgtaccgcccaattcttaactggacgcatgaggacgtatttgccttagccaaaagacacggaatcaaaccgaacccactctatcaacaaggctgtagcagagttggctgcatgccatgtattcatgcaagaaaatctgagctggcagagatttttgctcgctggcctgaggaggttgcgcgagttgcagagtgggaacgtcttgttgctgcctgttcacgtcggggaaactcaacatttttcccatctactcacgacccgcggcgagcagaaaaacgtattgaagttattaccgtagaagagtatgggatagcttcatatcgtgactgggcgatgaccacgcgcggcggttctcagttcgatttactcgctgctacaaacgacaaaactgtgtgcagtagcgtttatgccggtgtgtgtgaatga

SEQ ID NO: 195794 - DNA, 279 bp, Klebsiella oxytoca
atgggtattcgtatcgaagtcggcgacaaatgggttatcaccagcgaccaatatcaattcatcctgaatgaaaagaaagtcgttaagtcaggtaacaaagctggtgaggaatggctcgatactatcggctattacccaaagattaatcaacttatttccggtttggttcatcaccatattcaaactgcaacgattaattccattattgaaatggctgcggaaatagaaaagttatcttttatctgtgaaagcgcgtttaaggcggtaaaaaatgattga

SEQ ID NO: 195795 - DNA, 510 bp, Klebsiella oxytoca
atgcgcgcgtctccctccatatccacttttgctcccgggggctgcgctcaacgcgccttgcccgggctacaggttcaccgccatctgcggatcggtagcccggacagatgcgcagcatcgcctccgggaaattcagctactctgcgctctgttcccgggggcggcgcgcaacgcgccttgccctggctacagattcaccgccatctgcggatcggtagcccggacagatgcgcagcatcgcctccgggaaattcagctactctgcgctctgttcccgggggcggcgcgcaacgcgccttgcccgggctacaggttcagtgccgtctgcgggccggtagcccggacagatgcgcagcatcgcctccgggatcggtctcttacgccaacagtttctccaccagcgccgtccacagcgccacgccgtgcgggatcagcgcatcgttaaaatcatatccggcgttatgtagcggctttgatgccgtctcgccatcggtgccaatccagaaatag

SEQ ID NO: 195796 - DNA, 246 bp, Klebsiella oxytoca
gtgggctcggagatgtgtataagagacaggtttatcggctatgcgcactacgccgcgcagatggcggcgtgcagcgatctgcgcacgctgcttattccgccggcgtggaatgttcgctgcgactacctgctggcgcagattgaacagagcgccggggcgcagcggctgtgccgctttatcctcggcgcggaggggcagcgcttactgaaagacgccggttttttgcctatcagcgacgaatcgtaa

SEQ ID NO: 195797 - DNA, 357 bp, Klebsiella oxytoca
atgtattctgctggtgacaagggaaagcgccctttctgcgaccagcgttatgagttggccagaacgcatctcagacgtatggttgagtctctggacaagtcacgggtcattcatgccggctacggcagttatgctgtactggagatggatttgggcaacggagaaaagctctattactatgttgtgtttaaggcgttcagggaaaagaaaaagctgcgcctgcacattaccagcgcttacccggtaaccgagcgacccggtggcgcgccggcaaacttcttcagcattgcctatgcacttagggctaacagacccctgcctgtcccccccggtcagaataaagggcgccgtcgatag

SEQ ID NO: 195798 - DNA, 546 bp, Klebsiella oxytoca
gtgtttggcaagagaaacactggctttttttgccagactgataagcgcgggggctttcccttccagttttttctccagactgatccgggctggttgcgttggggtatcttctggttgtgcgacatcgacaccatagctgacggcaagtggctccagtccaccgttaaacccctgcccctgagcacggagtttccattgcccctgatgacggtaaatctcgcccataatcaccgctttctcactacggcccttcaggtcgacattgaattcagcgatgccggttgccgtcagccggagttgcgagagtccgctgatcgtgtcattgccatctatcaccagcgttatagcgattttctgaatggtttcgggaatgcgttccagcgcaagctgaaggttcgcatgctggtggccgggaagcagttttacagctccaccggcagcactccgattgttgtagaagataaagtctgcgtcaccggtgactttcccgtcagcattcagcataaacaggcaggtttctggttcactactaaaactgtacgatga

SEQ ID NO: 195799 - DNA, 1767 bp, Klebsiella oxytoca
atgagcgaattgagtacgctggagcataaaattgtctctcttattctggaagagtcagcgggaaaatcagaacctgaggtcgcactacaactaagcaacgacccggccatttgcaagcttataaatgatttaagaggctgtgtgataaacttggggaccggggtagcgttatctgactccaatgctcataaagaggttgacgccgcatacgtcagcgagcaggtaagcagcttagttccattcagtgatgaacaatccccatctccccttcagaacgatgtaaaccaagaccacgaacatgatgcacaaatggatgttgtacaaatcaacccagaaccatccaggcatgagatgaatgaacctcccggacatgagaatgctgacacgactaatcagcaatcttcagtgcaggcagaatcagcgattgctgaagcacaaccggctttgtcaactgcatcagaagcagagatgtcgggcattacagatagtgacgatacatcggaaacagctgaatctcacagtcagtctgaggcgatcttactcagaccaggggaaataccccacaaaaagactgaggagcgttctcctgccatccagaaagcacctgacgtgtccattattcttgcaaatgccagggtcggtgaatcttttgatgcactggtagatatcattactgacagtggcgttacggcagaagtgaccgatattcactttccccaggatatcggtctgctcttttgtaaaaacgagaagcgcctaaaaggaacaccagcattcagcggaaactttgatatgacagttaaatggtcatgtccctcatatccggataatgaaaaaaagttactttttgttgtcaatcccgacccaaaaagcctctggaaagtgattgatccccctaccgacactccttttttcaaaaagagtatcgatcatcggaatatcacctctccaactgtaaatatcgttgctgcaagtcgacgtggacgttcccatgaacatgcaggtaccttccgcgacgatgatttttatatcaatgtcagtgatgaatccggatggaacgtgttgctggtggcagacggagcaggtagtgcccgattttctcgtgaaggctcacgcattgtggctgacaccgttggtaattaccttttcagccaactaaaagcagaaaagggtcatgaaatcaaagacagagtgctgcgctggaacagcgaagatcagcgggctgtatgggatttcatgaatcaccatttcaggcaagctgcgttactggctgtgcataacatcagtagtgcagcaatcatggcccaggacaaagtaaagtcattctcaacaactttgctggcgaccgtcacttttcgtgagggctctgaactgtttgctgcgtccttctggcttggcgatggcgctattgctgcatatggaccggtcggaaaggtcagggtcctgggagcccccgatagtggagaatatgccggacagacacgattccttgacgctgaggccgtcagtgacactggattcagtaaacgcatcagtataggtaagtggaatgatgtctctcaccttgttctgatgactgatggtgtatccgacccgtggtttgagacagacaacggactacagaatccgacgaaatgggacacgttaatgacagagctgaatccccttctctctgttcctgatctggcctcatcgcagctggtggagtggttaaactttttctccccgggtaatcatgatgatcggacaatcgttgttctctggtga

SEQ ID NO: 195800 - DNA, 2205 bp, Klebsiella oxytoca
gtgactttagaacttaaacaccctcgtgagatctatcagattatctctgaagagctggacaaaatcatacattcattacagagccaaagcggtgataaatatttcgatgacacccaggccgacgcgctcaaacaattagatctacatcaggcagagttacgtgctcagctagtccggttggaaaagaatgccgagtggaatacgtttactgtcgctttttacggggaaaccggggcagggaaatccagcatcattgaaacgctgcgtattctgcttcgcgagcccggaaaactgaatgatcaacttaatttccgagcatttcaggaaaagtacagtttaagcgagagtagttttcagaaacttgcacaagatacggaacaagcagagaagaaacttaccgggatcattaagcaaatcgcaggcgttagacaggtttttgatcaacagcatctggccgacctgaagcatattgagtctctgcaaagtcaggtcaatgaacataaacgtacggcttcgctgtggcagaagctactcttctggtttcgaaagttgccacaggaaatcgaactcgacacggtcagacaacatttgcaggataccgttgcctcacatgaatgcgctatccgcaagttactcaacgttcaggaggaggcccggcagaaaaaaaatgagttaattcagaagaatctggagtctaaaagccacctgccggaattgggtgcaatggccgacggtgccatcatcggtgatggtagctctgacttcactcgacaaactcagcgttataacgtggagcttgatggttataagttcgctttgctggacgtccccggtattgaaggtaaagaagggttagtgcttaaagagatcgaagatgcagttcaaacggctcatgcggtgttctatgtcaccaaccagcctgctccgccgcaaacaggtgatgatcaacgtcagggcacactggaaaagatcaaaacacatctcaaagatcaaaccgaagtgtggacgattttcaacaagaaaattatcaatccgatggcaatcatgaaacagccactgattaaagatgatgaagaaaatagcctagctgagctcgataaaagaatgcatgaaaagttaggtacaaactatcgttgcgtgtttcccctcagcgttctgccagcttttttagcctctacggatcattttgctcccgattcacaaaatgctaaacgacgcaaaaaatttcttgatagctttaatgccgatgaacttttggaaatatctcacatgcggtcctttatccggatgctcagtgaaaagttactgggtaacagtgccgaccgaattaaagccgctaacttcagccaggccaaaggcagggttgatgaaagcaatgccaaagtacggcatattcacgagatcttctctactgtggccgaacaactggaactggacagtgacaattcctgcaaacagctgcgtcaaagtttcagtttgttccggcaccggctggaagccctcagtgccaaattggttgatgaactggtcatctccgtacgcgcttctgtctactcactaattaatcaagatatcagcagcgatgaattcaaaagtaacctgagaagttgcattacacagcagcaggatgcattcagcgaaaagttaagaaaaggcattcaggaggacgtagaaatattccagcaagattccaaaaatatactcacacggtttgaacaatacagtcaggaattgttcaacacctatggcaagctcggtgctacaaagttcaatttagactttgatatcaatatcaaaatggataacggtgttaatggatgggggctgctggctgggctggcggggattgcgcttgctcctttcaccgcaggagcaagcctctgggtggtcggggcggctgtactgacatctctgatttccgtcggcaaggccctagttggattttttagtacttcatacaaacaatcccaacaacgtaaagccacaaatgaaaatctggtggtgatacgctcacaaatacagacagccattgattctgctctgaaggacatcacgccgcaaatgcagaaaacaattgaacagattgaacaggctctaaaatccccgggcgagcaggtcgcggctaaagcctggctccttaaaagcgctacccaaaaacttgaccttctttcacgccagatcagtaatgcaggtaacttgccatga

SEQ ID NO: 195801 - DNA, 1695 bp, Klebsiella oxytoca
atgaacgaaacaatcaacgcatttaatgcccaacaaactcatgctttggaacttctgcaaaagcttgaagccttcctacagcaaggggctctggcgggagttcccatcgatccagtgctcagcgggaaaatacacaatgcaatcgccagtttagctgatgaaaaacttaaggtagcactcatcggcggtttttcagaaggtaaaacctcaatcgctgcggcctggatggaggagctcgataagtcgagcatgaagatcagccaccaggaatcatccaatgaagtgaaggtgtacgacgttggtcaggatttcgtcctgatcgacactccggggcttttcggtttcaaagaacaggtaaacgacgataaccattccatagaaaagtacaaagacatcacaaaaaagtacgttagtgaagcccatctggtgctttacgtaatgaacccgaccaacccgatcaaggaaagtcacgaggaagacctgacatggcttttccgcacactcgatttattgccacgcagcatattcgtgctcagccgttttgacgaagtggccgatgtcgaggatgaagatgattatgcgcacaacctgaatatcaaacgaacaaatgtggcgaagcgcctcggcgaaatgatcagcctgaccgcgcaggaacaggaaaacttgtctattgttgcggtagcagctaacccctttgatctggggactgagcactggctggcgaatggcgagcagtttaaagcgttatcccacatcaccagcctgcaagccgcaactactgataagatacaacacagtggtggcagcaaggctctggctaatgacatgcgcagcagtgttatccgcgatattttgcacaaccagttgcccgtcgcgattgataacgacgaaaaaatatctcatgaagtccgcaagctcgacagcctgtatagtcgtatgaaaacggagctggcacaggcagatcgggaaatcgaaaacaccgtgattaatctgcgagaatttgtcatccgctacttcgccgatctaatcgtgcaagcccagggatgcagcatggaaaccttcagcgagttctttgaacgtgaagtgggcgatgaaggtatcatcgtcagcatgcgactggaaaacgaattcagccgacagattcagcctatcgaactcaacatggagaaaatgcaactgagttttgatattgaaattaatcagttcaataccaccatcaaagcgcttggcaaacaaggtatcaatcatgtccttaagggggatctgatcaacaacaagaccgtgcttggcgcccgcgatggtatcgtcggcatgggtaagttgttcggtaaagatttcagcagtgtattaaaattcaaaccctggggagcgaccaaactggcgaaaggggccaatggtgcgttgatcgcagtcggtatagcgttggaggtgtgggacagttaccagcaatatcagcgagaacaagcattccagaaagccatcgcaggtatgattgagaactttgaacagcatcgtaagaatctgaaaatactgattgaaaaaactcagttcaaggagcagttctttggcgatttgaaaagtaatgccagagaacttgaagccagtctgaatgcgagcagggagagtcagcaacggttccaggcatggcgtgcaatggcagaaactatcgaaggtgaattcaggaagctggactaa

SEQ ID NO: 195802 - DNA, 1071 bp, Klebsiella oxytoca
atggacctgcctgctctggaagaattactgactcgcctcaagtcactgcctgttgctgaaaaaagtgagaccaatatattttcggttggtgcccgtggacactatgaaaaccctgtcagcgatttactcgctttctttattgatccggatgcgccccatggactgaatacactggttcttggggcccttctggagtgcctgccagcccatgttgatgcatcacttctctctccaccagcccgtgaggttatgacccagaaaggaactcgaatcgatttgctacttgagtcgaaagaatgggccatggtattggagaataaaatctggcaccagctgaacaatcctttcaatgattacagtgggtatctggagcaaaaacatccagataagacaccgttcctagtggttctgtcgccggaaggactggctcctgccggttggacaggaataagctacagtatgtttatttctgttctgtcgcccaggctcggcatggcatgcatttcatccccgctcaataaatggcaggttttgctgcgcgaattcattctacatctggagacactgatgggtaaaaatacgattgcagcagagacagaaaccttcgttctcgaaaatttgcgtaatattcaggaagcggtgttactgaaaaatgctgtggtgaaatcacttcaggaggaaggcctacggtttctgacagagcacttttctgaacgtggttatgaggtcacaacggcacttaatcattgggaaggttacccggcactgcgcttcgggttgtcgcactgggtgagtaaatctgatgtggtactttttctagacaaaacacctggaagacagtttgaagtacgaacgtacatctgtagtctgacgactcctgcattgcaacatcaagcaagaaagatgttgataccagcacttcatgacgactgctggcctgagagcagcggaagtgtgtttaccgtcgtttctcggctgtcacagaagcatgaggaaaaacatctgatgttccagagtgtggcgaaagcgttagagcagttgaacgaatttgaactgtgccatgagagatag

SEQ ID NO: 195803 - DNA, 954 bp, Klebsiella oxytoca
atgataatagatattcctaccaagaatgatttttatacaatggctgatcatatcgtaaatgaagcttgggaaaaaattgctgatttagcttatgattatagggaactcgatatatggaatgatttatataaagaatctgaacttttttcagaatcagatgtaagaaatacagaccattattggtcgtttgctagacctaagttaatcactgcttttaatttgatacttcaatccatcgaattcaggttgaaagggctaattgttgaaatatcaccttacctcattattactaatgcaactcgtaatatgccaaaggctgacagtgatggtcatatttcattttcggaatttcatactttagattctcaagacttaattagggtgcataatacatacgcttctaaagcattacccgaccaattcactacttggtttaacagtatacgtaacttaagaaatcgttttatgcattctgttgacaacaaaacagacatcatgccccatctgatatttacctcgataatacaagcgcacaactatcttaaccccgaatcggcacactggatatggcatagatacaaatatagagcagctcatgcttccggcggtgttaatgtgggtattgaagagcatgaagaattttcaggtattgtatggtccatgcttcaaactcattatgagtttactgccgccatatctgcttgttcaaaagagtcagtgagagaattatttagatatgcgaaaaacgatgctaaagataataataaaaagaaaagcttttactgcaagaagtgtgtttcagttatggagaaaggatggaattttgatgataaacacctggatggggctctgaaaacagttcagtaccaccgaggaaaaaaaatgtatatttgcgcattctgtttagatgaacagaaaaccaagccgcgtggaatatgggaggaagatgattaa

SEQ ID NO: 195804 - DNA, 1077 bp, Klebsiella oxytoca
atggctaaaatcaaaattgctgctattgccgataccactcacatcagcaaatccgttcaaactttcattgatcgccatcctgaacttcaagatggtgccgttatcattaaggtagatgtcgaaggttcgcagggtcgccgtcgtactaatgaaataagacagttttttgttgaagatgaagtatcagaccagtccagcgttagcaaggttgaaattcaatggatttccagcaaggctttgaactttaaaagcgccgtgcatacgcgactaagtaatttaaagcgtaaatattgcattccattcagctcaatgaacatacttccgacatctaaactggaggagtacttaattgaagttgaagccgtccgagagtacttcaaagaaggtatccagaatgctttagaacgttatgaagagtacattcagatggaaaaagatagaagtcccaaaattgcagacttgattgaaaaattgagaatgacaaagacagacttcgaaaattcttttcttttccaggttagccaccctatacctttcacaccaatatcaattgatggggaggatttaggtgaccgctatacagtgggtttaattaaagatatcgcggcgactgctgaatctatttatgcttcctgcactaagccaaagattgaccagacttttgtagagaaacttgctaatttgaaggaaaaggttgttagttttatgtttatggataatcgggcaactaaaattgctgattcaattcaaagcgtattaaaccaccttccgaatggaaatttggattcggcccttcacatgagtttgttccgcgagtggttattacttttaagtgatactgaccgtttgaacaaaatcatggatggagatgatttagtaactagtttcatttccgaaattaaaaatagatttaatgatttagatgataaattggtcaataattcaagcttgaaatttgtcgatccgtttgcaactaaatcacctcaggctaatacccagagtagttcattacctttagtgtcaaaaaatgatggcgtgcagaaaaaagtaactttcggaacgtcactcaatttttga

SEQ ID NO: 195805 - DNA, 204 bp, Klebsiella oxytoca
atgaagcgtatcaaagccaaaggtatcccggtcattatctacgaaccggttatgcaggaagatgagttctttaattcccgcgtggttcgcgatttcgacgcgttcaaacaagaagctgacgtgattgtctcaaaccgaatggctgaagagctgtcggatgtcgctgacaaagtgtatacccgcgatttgttcggtagtgactaa

SEQ ID NO: 195806 - DNA, 1464 bp, Klebsiella oxytoca
atgataacacgcagaatgttaattcaatcacttcttataagtcccttactccccatagaaaaagcaatatcaaaaacattgaccaataaaaatactatagccaactcttatgacgttttggaagaaatggttcctagcgaaccaggacaaatagtaacactaaaatcttatcacatgggtgaaaaaaaaggaggtggtatttttatagctgtccaagacaaaacaaaaaaaagcgataagggaacagttatacaggcagtaaatggtttgtcatggataagaattgatagcttaaaaaaaataaaaaaacctgagtggtttggttgttatggagataatgaaaatgatgatacatcagcatttaaccttatgctccatgcactcaatacaggtgacaatataatactagccccaaactccatatatttcaaccgattaaaaacagaaagtgacgagtgggtaataacccaaaataatataacaatcattggtaataatgcgacactgtcaaggagggctacgaaccccaatgatgtggataacatttccacaataaaaataatgggcgcaaataactttaaaatcaaaggcaagttattaataacaactaacgaacccaattttccattaacggatacaaataataatataatcagcgatgagacttttccaagagcatatgttagctcccatggcttatatctaaaacaagtcaactatgtatctttatcaaaagaacttacatgtagcaatgcagtattcccctgttatatttttaactgtaaaaacttagacatcaaaggaagctatactaaatcagggcaagtgcatccatttaaaagccaggatttacaactaggttcgggaataaaaatagcaaaaacagaaaatttcaaagttagaataagaacatcagatactgcatactgcggttgtgaaatagagccgtacactacgcaggggaatatagatctcatttcagaaaaatcatttatgcatggttgtatcatccatagaaatagtaataatatgcaagtaaatgtcacttgcaacaatgcaaaaagggcggctattcaaatcagcgcaggaagttcagaaatacgcggtgatatatattccaataactgcaaatatggctgtattattacatcagaaaaaaacaatatatgtaagaatatagaattaaatatccactgcacaaatacaaaagatatgaacttggtagttagaaacagtgatggtaactattcaagtataaaaaatgctactatacagttatttttcaataatattaacatacaaaacgaagtgcgaaaaaccaccaactcacccagaactccgcttatcaaaataagtaatgctgagaaatgtaaaatattaataccatcaaatactgatagcaatgctataagtatatccaatagcactgactgcgatgttattcgtaaaaaaagatacccgtag

SEQ ID NO: 195807 - DNA, 492 bp, Klebsiella oxytoca
atgattagaaatgttgtctctattttgaaaaaaaactcttatttctttgttgctgttaggtttttaattaaaatttttcggattagattgtctacttttgtgagatggcttaataacagatattatgcatatttttattttaacagccgttcgttgatatacagttgtcacattactgttggaataaaatatttatatgagaaaaatactcatctcccacatcctattggcattacaattggtaaaaaagttatccttggtacaggctgtactatatatcaaaatgtaactttaggggttaaaaataacaagttcgaagattacccaacactgggggataatgttacggtttatgcgaatgcatgtattctgggaggcgttacagtaggtaataatgtcattgttggttttggttcgttggtggacaaagatgtccctgataatgttattgttgcgggctgccctgcaacaattattaaatatttaaaataa

SEQ ID NO: 195808 - DNA, 1299 bp, Klebsiella oxytoca
atgaaatcgtatgtgaagaatgctggctggatttttgtagagaaaattgtaagaaccattattacatttatattatttgcattgatctcacgacagttaggccccacagatacaggtatactcaattttagtcaaagtattgtgttaatgttgctatgtataacaagtttaggtttagatagcattcttattaatgatttttcaaaaaatagctcgaacgatgatgacaagatactttactcgacagtgatgctagctaagttcatcgtttcttttgtagttttatttatttctatattactaataaacttgatggatatgtcctttaaagataaaatggttttttatctttcgcttttaggccttatttttcaaacgcaaactacttttttttcttattatcaagcaaaatcaaaatcatcaattgttacactctatagtttaataagcttgattatatcgtcgttgattaaattgatactcataatatataaagttgacgtcgcatggtatgcattatcttataccttagatgttatgatttcctttataattattgtgaatcaaataaaaaaacaagggatggttatttctgcttccctttttgataagaaaatattggtttctcttattaaaaaatcttatccaattgtgctatcttctctattggttgttttgtatacacgtttagaccagtttatgattttgaaaatgatgggggccgaaagtttaggtgtttttagcgttgcagttagaatttctgatgcttattcatttgtacctgtagccgtcgcgacgtctttctttccattactggctcatgacaatagtagaaataatttaaagctatattttgatttggtttattttagttcgtttttttctgctcttttagtaatattattctcttgggtgtttttggaagatatttttggtgaggcgtatgctggtagtttttctattttgtctgttaccgtgttttcaacagtttttgccgtcatgggaggggcgtgtactaactatttaataactataaaccttacttttatgaggcttgttagagcttgtcttgggttgctgattaattttgtattgaatttaatttggatacccaaatatggtttaattggggccgcctatgcatctctcattagtcaactattttctgcttttttaggcaaccttttaaataaaaaaacatgggagtgtttttatcttcaattactgtctattgtgacattcgggatttttggggctacctcgatggttttcaagatattcaggaataaatatgattag

SEQ ID NO: 195809 - DNA, 549 bp, Klebsiella oxytoca
atgtatattgatgcaaatataaaaatattaaatgatccgtattattttattgaaagatactctaactcatatgggatttgcgttccaaaacactttgagagggaatgtatttatgatgaaataactcaatgtgtaaatctaaataaaatatcaaaagaagaaggcaacgtgatatttgatatgttgaaggcggataattatccgtcgaaaaacggattaggtgagaataatataattattcgacgacacatggaacctgagattgttttattaatggagtcttggtgggaaacttttaggaaaggtgcgaaaagagatcagcttacgcttctatatttagcatggaaaaataacattccggtttatctaatggatgaaacatcaagaaataaaaataaatatttcaggtataacttacataagggagataaaaaactaccctttttaaaacgaacttttttgtatgtaaaagctaatagattccgatcttccttttttgattccatctgtaatattcatgaattgataactaaagtgacctctaggtaa

SEQ ID NO: 195810 - DNA, 726 bp, Klebsiella oxytoca
gtggcaaaaattttttttagcttaaagttacatgaagcgatctcttcgatacccgtcatgaaaatgcttgcggagcaggcagaagcgaatatatcccgtactctaattgatgctgataagccagaagccgttgagtcaggggaatttccggatgaacaacaacatgaagatgggcgaattacaacgtttcaatgcacttactattcatgcggctcttgctttggctatgatgaagatgaagttaggtctgaatacaaacatctgatcgcgcagctgacccgccgctccgtatttcttaccatttttggtctgttcgaacaccgtatggttaattgcctcgaacttatggaccacctttcgtgcaagactacagacaaaacacacaagacggttgaggattgccacaagcgtctcaaacgcaattttggcggtaaaagcatcaaggatgtcgatcacctagcagtgatccgaaacatcatggcccatagtgatggtgttgcagacgactataggacactttcctgtaaacaaacaaaaaaaactgaatatgaaaaacgtctcctgcgtgctattccacgcgctatggctgagaacgccggtgtgtcaattaccatatttaataacgtacttatggataatcggtttctgatgtattccgtcagtgaatttgagcgctatgttaatgaactggacactgcagttcgcacttatcaaacgcagatgtga

SEQ ID NO: 195811 - DNA, 573 bp, Klebsiella oxytoca
atgcggattaaaaacacccatactgcgtttggcctaatatctattgccttacactggctaacagccatcgcagtttatgtcatgtttgccttagggctatggatggtgacattaggatattatgatgtctggtaccacaaagcgcctgatttacataaaggcatcggtatccttttaatgatgggcttaatgataaggatcgtctggagagtcctgtcacctccaccagctgcgttaaaaagctattcacggttgacacgggcgggagctggtatcgctcacctgttcctgtatgccgctttgcttacaattgtgatcagcggatatctgatatctacagctgatgggaaacctatagatgtatttggaatgtttgaagttccggcaacattaacagatgaagcctttcaggcagaccttgctggcacgatacatctctgggctgcctggtcagttgtcgttgtttctgtaatgcatggattgatgtccgttaaacaccatattattgataaagatgaaactcttctcagaatgcttgggaaatcaaattcaaaaaccggagttaaaaaatga

SEQ ID NO: 195812 - DNA, 1218 bp, Klebsiella oxytoca
gtgaagccagcgccacactggccactgcatccggcacccaaggaaggcgaagccctgtcctcatggctcaaccgggtcgccgcctgctaccagatggacgtgcacgagctgctggcccacgatcttggtcacagccaacttgatgacctggataccgcaccatccttgtcgttgctgacggcgctctgccagcgcagtggcgtcgagctggagcggttgcgcagcatgagtcttgcaggctgggtgccgtggctgctcgacagtctcgacgattcggtaccagcagccttggaaacctatacattccaatgcgcggtgctcctgcccaagcgcacccgcaaggtgcggtccatcactcgctggcgtgcctggctaccgagccagacgattcgccgggcgtgtccgcagtgtctgaacgatccaacgaatcaagctgtgctactcgtctggcagctccccttgatgctgagctgcccgcagcatggctgctggctggagtcctactggggcatgcccggccggtatcttcagtgggaaatcgccgatgctgcgccgcgccctgccgatgacgcaatcgcctgcatggaccggcgcacctggcaggcgctgacgacgggttttgtggagctgccgcgtcggcgtgtccacgccggcttgtggttccggctgctgcgcaccctgcttgatgagctgaacacgccgctctcgcactgcggcagttgctcggcgagcatccgccatgtctgggagcgctgcggccatccgctgcgcgccgggcagagtctgtggcgtccctacgagattctggccccggcggtgcagtggcagatgctggaggcggcggccaccgccatcacgctgatcgagtcaaaggcgctgatcccgcgcggggaacaggccgcgctgtttcagacggagccgcacactggtttcaccaacggcctgccggcgaaggtgccgaagccggaacccatcaaccactggcaacgagcagcccaggccatcgatgaggccatcattgaagcgcgacacaacccggagacggcccgcttgctgttcacactggcgtcctacgggcgacgcgaccccgaatccctggaacgtttgcgcgccacgttcaccaaggagggcatcccgccggagtttttgtcacattacgagcctgaatggccgtttgcaggtcttagactaaatgacgggttaagtgacagtttttga

SEQ ID NO: 195813 - DNA, 1257 bp, Klebsiella oxytoca
atgaaaaacattgctcttactccaccaaaaggctggaacagctggaacatttacggtgcatcggtaactgaacaggaagtcagaaataatgcccaggtgatggcggaaaaactgaaagcctatggttgggagtatgttgtggtggatattcagtggtatgagccaaccgcctccacttcgctgtataacacctttgcaccgctgtgtctggacgagtacagccgccccgtgcctgcggtcaatcgctttccctctagcgaaggcggactggggatgaaacccctggcggattatgtgcatagcctgggccttaagttcggtatacatatcctgcgcggtatcccacgggaagccgtacatcggcgcatgccgctgaagggaaccactctcactgcggaccagattgccactaacaccatctgcccgtggaattcagatatgtacggcgtgaatacccgtcttcccgagggacgtcagtactatgactcgctgatggagatgtatagcgcctgggatatcgactttataaaagtcgacgatattgccttctccaaaatttatccggacgcgcatctggatgagattaaagccattagagagtccatcgaccgcattaacccgaatatcattctctcgctctcccccggtccagctaacttacgtgatggcagcttcctgcaggagcatgcaaacatgtggcgactgaccgatgatttctgggacgagtggccgatggtgcttgagatgtttgagcgctgcaatcagtggtccccctttattcgtccgggaagctggccggactgcgatatgctgccgcttgggcatattgccatccgctcggatgagcgcggggtttccgaacgcgatacgcgtctgacccgcgacgagcaacggaccatgatgacgctctggtccctgttccagtcgccgctgatgtttggcggcgagctgactctgctggatgactggaccttcagtcttctggcgaataaagagttgaccgagatgcaccttaagctgaagcatcagaaacaggtatggcgtgacaatacctggatcgtctggcaggccgaagcagatgatagcaactataccgcaatatttaatatctcggacacgcatgcaattctgccgcacgacatcgccgcgcgatttatgcctgcagctggtgggttggagatgtggagcgggcagagtactgaaagcgtcagggacgccatcccatcgcacggatgcttaattttccgggcgatctga

SEQ ID NO: 195814 - DNA, 1461 bp, Klebsiella oxytoca
atgaaagcacaagcctcggtcggcagactgcccttcgcaaccaaaatgtcttatggcattggcggttttggcaaggacttcggcctggttgttgttaatacgtttctttttttctattacaccgacgtggtgggcattaaagccgaaatcgtcgggcttatttttctggtcgcccgcttctgggacgtgattgccgatatcttcattgcctatttaataagcaaaacgaaaacgcgctggggaaaatataaaccctggatcctggtgggaaatgcacttaacgccgtagcaaccgtttcgctattttcggctcactattttagcggcgatgcgctcctggcctacatcaccctcacctatatcatctggggaacaacctacaccctttcggatgcgccattctggtccctgctgccaacgataacgctggataaaaaagagcgggaatcggtcatgccctggccgcgtatttttgcctctgccgcaaactacattgccagcgccgtcgcgatgggtaccgtacatctgttcggcggcagtaacgatcggcttggattcctgctgctcgctgtgttttgtggcgttttaggaacgatcagcgccaccattacctgccgctgggtgacccgaaattataaagaagatgatatggaggacggcaccccgttcagcctcagcatggcatgtaaaatcatcgtaaaaaataatcagctgctctggctgttagccatagcgatattctttattatttccaccaacattacgcaggcgatcaatatttattacttcacctatgtgattggcgcacagagtctgttttccgtctttatgatagtcggcggatgctttggcctcgcttccattgtctttttctctaaaacggtcgatctttttggccgcagggcgatatttataacctcactgctttgtcctgtcgcatcctgttttctgctctacgctgcgtcgctgctgagtagtgggtgggcggtaaacgccattattcttctttccggcgtatttatggggctggctaacgccctctactggctgatgattttcattatggtggccgatacgattgattacggcgatgcccgcatgggattacgtgcagaagccgtttcctattcagcacactcgctgatgatcaaactcggtgccgcgattaccggttatctggtaggcactatgctccatgccattcattacgtgccaaaagccgtacaaactccggaaacgatttcaggcttccatctgatatatgttgccccttccctgctttgcctggtgtctttatttatttactgccggttctacacgcttaacgatgaaaagattatttccattcagctgacgctggaagaaaaataccgcgatatacggtctgacggctcggcatccgccctttctgacaatatcatcgcaggcggcccggctcgcgaaaatgctgtcaggttatga

SEQ ID NO: 195815 - DNA, 612 bp, Klebsiella oxytoca
atgtgcttccgcctcgctgtagcccacggtggcgacctgcgggtcggtgaacaccacggccggcattgcggtcaggtccagggccgcatcgccgccagtcatgttgatcgccgcacgagtgccggccgctgccgccacatagacgaactgcggctggtcggtgcagtcgccggccgcgtagatgttcgggctactggtgcgcatgcccttgtcgatgacgatggccccctgcgcattgacggctacccccgccgcttccaatgccaggctgcgcgtgttcggtgtccggccggtggcgaccagcagcttgtcggcgcgcaattcaccgtgcgtggtggtcagcacgaattcaccgtccatatgggcgacctggctggcttgcgtgtgctccagcacctcgatgccctcggcacggaaagcggctgtcaccgcctcgccgatggccgggtcttcacggaagaacaaggtattgcgcgccagggccgtgaccttgctgcccagccgggcaaaggcttgcgccagctccagcgccaccaccgacgagccgattacggcaaggcgttcgggaatggtgtcgctcgccagggcctcggtggaagtccagtagggtga

SEQ ID NO: 195816 - DNA, 378 bp, Klebsiella oxytoca
atgtccggactggaaaagaaactgccacccctggcgctcttgctgctgtttgcgctactgttgcaactgacatcctattacttaccctcttcaaacctgcatccgacctttagtttggggctcgctgtttctctgttgactgctgggctggttattcctttggcaggagtactgagcttcaaacgccatggaaccacgccggatcccagggtgccggaacagagttcggccttggtgacctcaggtatttaccgctgctcacgcaaccccatgtacctggggtttgtactcttgctgctggcacaggccgtctttctcaacagtctctggttactcccgatttcagataataagtgcgacattcatggaaaggtgtag

SEQ ID NO: 195817 - DNA, 135 bp, Klebsiella oxytoca
atgccgttatggtcgcagaaggcatggcatgggcatatcgttatcaggggcggcttacggttcctcagtatggttctcttgagcaaaatgcacgtaacgcaggtaaagggttatggtctgacccacacgcggtag

SEQ ID NO: 195818 - DNA, 555 bp, Klebsiella oxytoca
atgcttgcgcatttgtccgggttaccgatccgcagacggtgtgaacccgtagcccggtcagcgcagcgcaagccggggagaaaccgcaccgaggtttcagacacagcaccttccccggaggcgatgcttgcgcatttgtccgggttaccgatccgcagacggtgtgaacccgtagcccggtcagcgcagcgcaagccggggagaaaccgcaccgaggtttcagacacagcaccttccccggaggcgatgcttgcgcatttgtccgggttaccgatccgcagacggtgtgaacccgtagcccggtcagcgcagcgccaccgggaagaaaaccgcaccgaggtttcagacacagcaccttctccggaggcggcgcattgcgcctgtccgggctaccgatccgcagacggttgtgaacctgtagaacccgtagcccggctaagcgcagcgcaagccgggaagaaaaccgcagcaaggcacccggcagcgcaccttctccggaggcggcgcattgcgcctgtccgggctaccgatccgcagacggttgtgaacctgtag

SEQ ID NO: 195819 - DNA, 186 bp, Klebsiella oxytoca
gtgcaagcggtggccccggaagcgggtgaactgatccagacggcggtgctcgccattcgcaaccgtatgaccgtgcaggaactggccgaccaattgttcccctacctgaccatggtcgaagggctgaagctcgcggcgcagaccttcagcaaggacgtgaagcagctttcgtgctgcgccggatga

SEQ ID NO: 195820 - DNA, 186 bp, Klebsiella oxytoca; identical to SEQ ID NO: 150912

SEQ ID NO: 195821 - DNA, 468 bp, Klebsiella oxytoca
atgggcaaggatacgaataccctcaacgatctgcgccgcgcaatcctgcatcagacggtcatcggcggtgatgtagggctcgcactcggcggcgttgataatgagtgtgtcgattttgtcgccgccgccgcgcagcttggcgccggtcgggaaacccgcgccgcccagtccggccacgccaaactggtgaatacgctcaatcagcgcttcgcgggatttattctgataatcgtaccagccatcgcgctcaatccagcgatcttcgccatcggcatcaataatgacgctcatttccgccagcgcggaagggtgggcggtagagtggggggcgatggccgccacgatcccggatgttggggcatgcaccggcaacattcggccccagccgcgcgtcaacggctggccgcgcaggacgcgatcgcccggctgcacgcacagctcaccttccgcgccgatatgctgctttag

SEQ ID NO: 195822 - DNA, 237 bp, Klebsiella oxytoca
atgaataagaaaaaattagagatatttttctccagtcctatcgaatatgaagagctcactcttgaaatacagttagaccgtgagcgtattgttgaaatcaatcaggatcgtggtcttgacaatcttgaagttgagctttttggatcagacaagaagtatggttttgtagcgaagatgccgcttgatgatcttataaatattctgatcgaagcaagagatacgctgaagaaaaactaa

SEQ ID NO: 195823 - DNA, 561 bp, Klebsiella oxytoca
gtgctttacttcgaccgttgccaatccggtagcgataacgcggcgctgattggcctgcgcaagctggtgcgcaacatcgagctgtcggtgagcgagccgcacaatctggcggcgaagctggagatgctgtgggcctcttattatggcggagtggccattaaccatgcgggcactcatctggttcatgccctttcctatccgttaggcggcaaatatcacctgccgcacggcgtggctaacgccatcctgctggcgccttgtatgaaggtggtgcgcccgcacgcggtggcgaaattcgcgcaagtatgggatttgatccctgacgccgatctgacgcttagcgaagaacaaaaatctcatgcgctggtcgcctggctggccgcgctggtgaaacgcctgcagctgcccgacaacctcgccgcgctgggcgtgccgcaggagagtatcggcgaactgagcgaagcggcgctgaacgtcaaacgtttactgaataatgcgccatgcagcgttaaccaggagcaggttgaggcggtttaccgcaccctgttcccagcacaataa

SEQ ID NO: 195824 - DNA, 1395 bp, Klebsiella oxytoca
gtgtattcactaaagcagttggttatctcaggccgtaaaaggcgatggatcctgatggacttggaaacctctctgccgttgctgtatccccttaggtaccatattgaccatttggctttccgctcattgtccacacagtcagcttcacttcaatctgtgaagtttttttacgaattctggaggcaaaagtatggtgtctcgttttgctacagcttctattcatctgaccacaatccagacattgctgtcggtgaaatgcccgcattttggatgtatctagaaaatggccacaacgtccagtcaaatgtgttgtctttaacgagagtcacaaaagccaatagcttaactcatacagttagagttcgtgctgtgatccatttcatttcttttttgattaacacctacatatcacctgcataccgggatgactctcccaaagcattatcacttttggcttcgcgtttacacacccgtttacagctttgccgggagaattatcgaacgcttacatcaaacaaattttcgcaacatagtcacagcagccaaggatttcagagtttgtctggggcaatggtgctcagcctgtatggaataataaccccctcttctgcccaaaagcataacccgctaaatcctttcccttccgggcatcttcagttccgcaattttttgattattcgtctgttgttaaattatggtttacgaacaggtgagctattgttgttagagtgcagctcaattaaacctaatttaaaaggtgataagtttagtttgattgtgacaactgtcgacgaggcatacgaaccaagaaagaatgcgccatctctcaaaaatgcatgggctaatcgtgtgttggagctcgataagcaggattatatttttttaagcatttatatagcaaagcttcgaccaaaaactgataaacacgatttcatctttacatcgagtcaacagtcagcgaagcctttgtcctacacatcagttcattctattttttcgaaaatagatcaggtcttcactaaccaatatccagagtacaaatcaccgttgtactctgactcgttgcaacgattgactccgcatacaacccgacatacttgggcctttttgacattgcaaaaaatatggcatttaaaatatttgaaaagccagcaaaataaaacacactttattgctgaagtcccttccctctcagggataatggaagaagccaaagatgaactacgactgatggggggatggagtccgacaagtcaaatgcctgatctatatgcaaaacgtttcctgtctgagcaggctaatgctgccaatgtccaacgaattattcaagacaatgcagcgctacataatacgttagatactataatggatagatataacgatgacatcatttga

SEQ ID NO: 195825 - DNA, 1566 bp, Klebsiella oxytoca
atgacatcatttgataatgcattaaaatctgacgaagggaactcagtttaccctcctgatttagctaaggctatctttgaactcgatattcctgatcgaatttatctaaaaacggcaatggagtttgatgataaatatattgttaacaaaggaaataaatggactttcgattattcaggcagtcggcgatatcttgttttcaatcaagattatatctcaaataaattaaacaagtatatctgtttcaaatatgcatcgacgagatttccaaccaagcttccagcgttgcaccttgattggaggaatatcatttcatattgtcgagaacatggtgggttttcgcttggtacgctccgattatttatcgaaaaagaggatattgataatgctactttttattccgtgttattcggattaaaaatactttgtgctgaaacattcccaggtttcaatcttgaagattacgatgatcttgagttcgtccctcgaccgtatctcgaacattggggggtttaccaagaaatcgataatattcttgaccctcttgaaaaaaacatgatttgcaatggactgtttgaaatggcttcgttgttacgcgatggcaaaagtttcagtcacagcgaagtgcgcaatgcagctatccttgggttggcttatgtaacgggtgcacgcccagtacaactcgctaggctggcggtcaaagatgttcgtatcgatacacgaaatcaggaatctggtctgattcgatacagtgtttttttaccatatgctaaacaaagacgagtgacgacagagcggttatttctggcgatccccccagaaattggggagttaattatgaactataccgtgagatacaagaaaaaccccgaagataaactattcgatttcagcgtttcagctccgcattatgtgtctcaggcaattaatcaggcaatcctaaatttctgtcctcctgaatatcaagccgccgtagcatgtggcgaagctgcattgcccacaattacacccactgatttacgccacaatgttgggcactctttggcgatgcaaggtgctagcgctgaagagatagcacatgtactggggcacacctctcttgccgtagctaaatactacattatggcaactcccgcgttggccttgatccgtgctaaagcgcttgggtcgaatcccgtttggcaaaatatggtggctatgatgctcactggggaactggtcgactcagcacattggaaaggccatccagtggtgggactcgttggtgacgagttgcatgataaaattggtggttgctccaggaacagtagtacatgccctttcagcgaagtgcgttcttgttacggctgtctgtattatcgcccttttacggatggtgaacatcaggctctacttgaatgcgtcaaaaaagaagtcgatgaactaatcgctatttcagacggtgtaggtaattcccgaaatccgctcattttaatccatgaaaccacacagtttgaaattgagtctgttatcgcccgctgccgttttcatcaggaacaggtgaagtccaatgaaaaatcactttga

SEQ ID NO: 195826 - DNA, 2367 bp, Klebsiella oxytoca
atgaaaaatcactttgagcattttcaggcttttattgaagagcaaaaaaaatggttcgaacagcacctgtctgctgattttgcccaaacatggaatgatcatatctgggtaagtggtaaccagggaagtggatggttgcgagggaacggcagaaatacattacgttttgatgagatgaacagattcaaaggtattgtagaacatctgcccatcgacaaagaatatagtcagttcatgaaagctatgctggtagtggtttaccgacagggaaataggagtatgtcgccagcggtggcaaaggcaactttgatgattctgaaacgatggtaccatgcgatgctttatgagacaggacagacccatccatcttacctgagcacagttgtcattcaacgagcgatggatcttctcagtagcgtttcatctcctagtgaccccaatacagctaactataaagggcggtgcgttagccttcaaaaattggtcaatcacttcacatttacgttggttaaactgcaatacaactctgatgtgaagtataccaacaaaaccaacttgacccgcaaagcccgggaaaccatggcgctgaaacagcaggccaagctgtctgataccactaccgatggtgaagatgcgttgattaccattcgcggatttctgaacatagttgcattaatccagcgggtggaaagtgatgctgagaaaatcgcgttaaattgcctgttgttattggttattaccggctttcgctccattgaagcgtttaatctcagacaggatgccctgtttaaacgccagattgatgatccggcaatctgcaaacgatttcaggacaagggattacccgattattttcttggtatccgttatgttggtgtcaaaggtgctggggagcgaacgcattgggtagaaccgctggcagtaccgctggtcgagagtatattcagtaccgttaaaatgttgaccgcaccaatacgcagccatcttacctatctacgggcaaaatcttttgctgattacctgccacaggccatcagcaacatgcccggtgaacgagtcgaactggacgatgtggtgaagtacatcacccaaactacctcaagttttcggggccgggcaggacaacgggacaaaacatccaaagcccttagcaaaagaggtgtgctgcccgttcaagaaataccaggcccgaaaaacagcaaatctatctattattccaagactgctctcaatcattacattaagaccgaatttggcctggcgaatgccaacgaaccctgtacacacgcctggatggaaaatggcaaacgctaccaagttaactacgaggatctgctatttctacacgagaagggttcgctggcattaaagcgcacactggctttgctggctacaccgatacccttcactaacacacttatgaataaattcttaggcaacgttgagcctgatggatcagtattcagcaaatatcaattactggaggaggatggcacctcgacgcggatgcgtacccacattccccggcacaacatcaatacctttcttgctattgcggatatctctgaccacttacaggcaatgttgatgggtcgagtggacatcacgcagaatcagcattatcaacatctggcgcttgcagaacggcgaaaagccgcctcgttggtgcccttgcagccgatttcgacagcactaactgtctcgccctcttcgtcctccattgctacgccactggatatcgtcaaacggaccggccaactggcggtcacggaacacatgactttggacaataccatcaaagccaacctgcatacttttgacgatcgggatgatgtagccaggtttgtcgaggcgtcatttgctaacggcctctttgaagatgttgctgccgcctttgaagaaatccgcgacgcagaaggaccagagcaagcctctgacatggtggcaagacatgccgtgctgtatccgctgaaatttggctcctgtatgcgggaagttaacctctggggatgtccttatcgactgaaatgccagagtgctgccttttgtgaacatttcacgctgacaggccggatagatgagctaccaaatctgattgccaaaaaacaggctttacagcaagcacattcgaagttaacccaacttactcaacatcagcctgattaccagaccagactggccgacatcgaacgacggttacagcaactcgaggcaatacaagcacaatggcatcgtcgtgccaagactcaacaactggttgctgctgagagtgtgttgtctggtggagtaatcaccgagggcaaagtccgtacactggcccagctttttgcacttgaataccaacaattgatgcaggagaatgattga

SEQ ID NO: 195827 - DNA, 435 bp, Klebsiella oxytoca
atgcgcggcaaggaactgaacacactgattgagcacgaattacaactgatgctggttgaaggctttgacaagtcccctatttccgccaaggccctgcatattaggctcaaggcaaaaggtatcgttaacggtggtttaagtacgctgagcagcctagagcgtaaacgcctaattgctgcctatgttgaccagcaacttggcccattgaatctacgcccaaaagaaaaacagcaatacgtcaaccgcaaaacccgtcaggctttgctggccagaaaccagcagttgcaggctgaagtaagtgaattgcgagaccaattagcgcaaaataccctttcgttgatagaaattgtcaaagcggtaaaaatcaattcggttataccggtggaaagcctgttggccaaccatatgattcgggaactacataagtcgtcataa

SEQ ID NO: 195828 - DNA, 561 bp, Klebsiella oxytoca
atgaatagtcgagtatccaacgctgagtcgtacatattttccgcaataatctatattgctaaagataacttcaccagtaacgatgtggctcaaattcttatcgagcgattttcacttccgaaaagttattttaaggcaaaagcttttgcttataaccaaattcagtgtttagttagaaaaggattattgagtaaagtcagaaaatcaggcgcgtatcaatatgtatactcagtcacatctgaattcaatgtcgtaaagaaaagcgtagagttaattgaggcacccaaaaaaaattccagtcaacttgttttaagtgttaccagtcatgaatacagaaatgtaaatattcaaataagaactcttattgaaaaatacagcagcgagttggaaaaagtatcaggagcaaaggagatttatgaagagttgataattgccgtgccgagcagggaaaatgaattcagaaaactttctctcgagcaagagaaaaagcaaattaagataaatgaaaaaataaacacattgattgggatttttaataaaaccattgcaataaggcaatga

SEQ ID NO: 195829 - DNA, 195 bp, Klebsiella oxytoca
atgacttttaaaaaacatttaaagttaaataagtccatgaaagagagagggcaaagcagagtccgccctctctcttcacacactgataagcctcattacaaagaggataacagcgtacaccactatatgctagtccttaataaatataatcccagccagcgcgagatgcaacctttaaaatttgagcagtattag

SEQ ID NO: 195830 - DNA, 561 bp, Klebsiella oxytoca
atgaatagtcgagtaaccaaccctgagtcgtacatattttctgcaatcatcttaattggcaaagataacttcactagtaacgaagtagcaaaaattcttatcgagcgattttcacttccgaaaaattatttaaaggcaaaagcttttgcttataaccaaattcaatccctggttagaaaaggattattaaacaaagtaagaaaaacaggcgtgtatcaatatttatactcagtcacatcagaatttaatatcgcaacagaatgcgtggaattaattgaggcaaccccaaagtcttcctgtcaacttgtttcaagtgctaccaaccatgaacacagaaatgtaaatatccaaataaagtctcttattgaaaaatacagcagtgagttggcgaaagtatcaggagcaaaggagatttatgaagaattgataattgctgtgccgagcagggaaaatgaattcaggaagctttctcttgaacaagagaaaaaacacatcaagataaatgaaaaaataaatacattaattggaattattaatcaatctgttgcaataaggcaatga

SEQ ID NO: 195831 - DNA, 5769 bp, Klebsiella oxytoca
atgaaagttaaaaattctgcgattatctatacaggttatgattatcagactctgcagggagtaaagctacttgctgaatggcttcatagtccgactcagtatgatagggtggcatttgaagccgacatggatagtaatgaaacgcctgaaggtatagacgatattgtctgtgaacgaccagatggtgttagagattattggcaagtaaaattcaccccctccccggagaaggatgaaaaccgcctcacgtgggaatggttgttgaagatctcaggtaaaacagcaaggtctcgttctattcttaaaaagctctatgatgctattagtgctgtgtctgctgaaaaactcggggatgttattcttttgaccaacaaacggccggacagatctatggaatcctgcctgctcggttcgaaaatagactttagtcaaattgatgataactcacagcttgagattactcgccaactaggaaataaagaagctgccatttttcttttttcgaaattgactgtccagcatagtgatggtgactatcttgcgataaaacgtagtcttcgggctgagcttctgaaattttccgacgatacaggcgtcgaacggcttgtagcaagagcacgtgaatgggcaatgtttaaggacaatccaccagagcaaggttggatttatcttcatcatgttagagaggtcttatcacccaaaagaccagagcctatacctgaaattttttctgtgcccgaagactactgcctccccgattcagactttcacaaacatctacttgctcaaattaaccgctcaaatggggaagtcattactctaacaggtaaacctggtgtaggaaaaagtacatatctatcgtacttgtgtcaaaagctggaagagcatggagtcccgttaatacgtcaccactattttttatctcttggagacgcaactgaagacagattaagcccaagagttgttgcggagtccctgttgcatcaaatcaatagctttcataaagagtcaaatgccaacacatctcaaccggaaaatttacgtgatgcactcataacctgcgcaaattactacaaaggtaaggggaaaccatttgttgtgttgattgatgggctggatcatgtttggcgagataatgctaaaaataaaaaaccattggatgaaacttttaggcaattacttcctgcaacagacaacttagtggtgcttgtcggaacgcaaccagttgataatgaattgcttccttgcacactgcttactcactctcctaagaatgaatggcattggttgcctgaaatgtctggaaattcaatatatgaatttttaaaacttcatattgaatctggtcggttgtacttaaattgtcatgaaaatcaagttgatgaagagattcagaacagtgctggcgctttattagaaattacaaatggctaccctttgcatgtaatttactcatctgagtatctgtctcatcatggattagcactttcttcttggcaaattgaaaagcttcctccgtgctccgatggcaatattactacttactattctgaactttggcgtaacctcaattatagacaaaaagatgttcttcacctatgcagtggctttcagtttgcgtggccgagacaggcgatcggtgtcgttgtaaaagacaatcatgaatatgcaccgagtgtagatgcggttgcacatatgctctcggagggaatttgtggcgtaagacctttccacgaaagcctagtagtatttgttcgaaatcaggaagagcaccaagagcgaataaatgctttgttaacacctgtatgtgaatggcttagttttagcgccccaacacatctcaaggataattggctttggtctagtttggctcgaggtggcgactcttccaagttgcgacagggggttactcgagattgggtgcttgataggcttataattggcatgcctgttagatcatgtattcgactgttatctgaggctgaaacttatgctttccaggcgcttgattatgcggaggcatatcgacatagagctctaaaaactaggcttatcaatggccctgaatttcagacatgggactccattaacttggagatgctctcgctactgatcgctgatgagcagtctctgaacgaaataatctcaggacaaaacgagtattcaccaaccaagttatctatattggcaattgcattatggtatagaggggcggttgctcaagcagagctattatcgcagaaggcaattgatcgatatcgggctaaaaccaaactcttgtcttcacgacactctcaggataatgaagctgaagcaactgcattgataaaagcaggagtattaactaacagtcttaactatgatgcgatttttgaagaaggaaaattctctaattggcctgatggatatgtggctagctttagacatgcatgtcgcacaaaaaaagaacttggtctgctcttcagggcttggcagtgcttgccccctgattcaaatcatattggtcaaatcgaacttgatgcaattagattaagcataatagagggtgctgatattacctgtaggccagaatatggctctttttcctcgcagcagctatctaagttcatagatatcttttctaagaaaatcttcaccaatattgagactcattatttttatggtcagtcggcgaaagtcttcaaagttgaagctacaggcagctaccattgctggtttttttcttcactatgtatcaggttaaatgcagaaggtgactattcttggttaccagtaagtgcaacctcagacagagcggatgtatcagctcattatgatttactcaatgagttggcagatttagtcgcaaatgaacttatcgcaggaaataaactaaactttgacgtggtttgtgcgatgtttccgcttgttccaatattagatgagacccaatgggaaacacggagagccgacatagttttaaagcgcgattggattgaaattgcagctgattgtcacctgataacaaccaaatctgaaatttcgcgtgatgaactaaggcaaacagttgatgatggtttatttagaattgactggctaaggctatggtataaggacgcagggcttaagctgttagacgatgatgccgcagagctacttatcaagcttgaagataatcgacaattaaatgagttagagcaaacaattgagaattctaatgcttatcttgagctagcgcaaatagcatttcaacatgataaattagctctttttgaaaaatatttgagaaagacatgggactttgtgcttggttatgggcatcacaaagaccccaccatctttgatgtattgaaagctgtggaatacctttctgaatctgacccaggctctgccttggaaatattagaacgaatatcaccgatagttttcaatatatccaactttactgatggggatgaaactaggcactctaagcattccatatcttcattattagcaaaattaaacccgcaaacagctgcttcagtttatgagcaagagcttagcgatggcgaatggtattatgctgaagagacaatttctaggttgcttgaaaggtgtgactttgcttcgccgattacaaaacatttatatcttacaggtttgcactctagctgctaccgagtgctcagagaaaatattgagaaaggagaacctcatgccatttgtattgccgatgaaatagagagccttctgggtattaatgttcaaaatatatctgaagaaaaacattcatcaactgataaatctgatggaaaagttttgttacagccatcggattatccgcctgaaaagttcgaagaactgactgtattgctcaaagaaaaatatagcattagtgaattttggaaaaactggtacacatattggtgtacccaaggtaaggagcctgagttattgcaactgctaattccacaggtgtcgaagcttattgattgttttgatgataaacgatacttgttagatcttctttttttcagtgttaaaaaattacacggtaaaacgaaagcctttgatcttttggttgcagctcacaaggcaatgagaggatggtctgattggtatgagcgttcagaaaatagcctcaatcggcttaagatagtggcagagcaataccctcaaaaaattgacgaatttattaaattaacaacatcacaaccggataattggaaagataagtttggcaacttaattattccgaatgacaagctagtttttttgctttctcatggtgacaggaaagatgaggcgcttaagctaacgttagagatggttacaagcttggaagaaagcgtccgcaatcttcaacttgcaaaaccggtatgggattggcgtcatgatgattctctcgaggatgcaattctcaagacgttagtttcgaggctaaagctacctataccctctgtaaaattgtgggtagtagaacagctttcacgacttttaatagctcaacacccaagagttgaagaattactaaaggaagacttagcaagtaggaagcaagagtctgagtgcgtagaagtgttatgtgtattttttattgcgaaatctaagggttatgtctgcccaaatgatctggggcactacataagagcaaggtccacactgtcagatataatactcacagagctagcacctcaaccaaaatactttggcgaatacgcatatttatttacaccctttgtctgcatggcacatgataataatcgattcgaatactttcaggggaaggatgtgcctttactttataatacattgttggaaaaagaagagagacgaacgggtataccttttaccgattattttcagtctgaatggaatagtacattcgaataccagccttctacagcaacaaatgttgattacttctttagcggtgatcgatatagatctaccggccaattttatacacaagcgagccatcgtggtcgttccgcatatttaagaacaatagagctggccaaagaatttttcggcatgccggattcttacgcgagacatttatcgataccagcactacctatcgaacctgcgtatatagagcttcgccctcaaaaacctaaatggttacctgtttggagtggtaacgactctcctaatgaagataatttaatcagctatgttaaagaaggattatccaacttttcacaaacagatgacagtaatgaccttttagctttttcattacccatcaagattgatgacaataactggattgatttgactgttgcaaaagtgaacactgaaattgagttaacgcctgacatgcagataatagagcgttccggttgtttgtctattggtaatcttctggataaggagctgtcttatgagtttggtgagagtcagatgcccagagttcctacactggctggcacttcgtatccagttatgagatatgggcactggcactccgatctcgaatcacgagggttctatattcccaaatgtcccattgataataaaaagattgtcggttcatcttccgatggtttgtttagttactctatcgatggatctcaagttggtttttcatcgttctggtataatgattggcaacctattcatcccaaaggaattcgttctttttgtggatcttataccgtagtcagcaaggaaagaattgaggaatggcatcgctcaagtggagcagagcgtaagagctattacttgtgcaaagccattgtgcttacagctgaagataactttagagaatttaatgtacaagagattgagttttttatacgttga

SEQ ID NO: 195832 - DNA, 420 bp, Klebsiella oxytoca
atgaagtatttcaatcaacctcttgaaaatgatatagataaaatcacaaaaattgcgaatgcaaattattccggttcaaagctgattgaaaataatctgaacattttcatcgagagatataaagaatattattcatgcaaaggcgctgcgctaagtattaatggtatgcttggactaaatgacgcaagagaaagcataaaaaagttatacaagagcaaaggagaacaattatctttcataaaagaattgcgaaataaaaatacaggaaaatgttgttcaatgtgtggggctaatttaagtacccaaatagatcattttcttccccaagaattttttccggaatattctatattaagtgctaatttaattccgatttgcaaatgcaatcaaaaaaaaggaaaatttactataggggggtaa

SEQ ID NO: 195833 - DNA, 861 bp, Klebsiella oxytoca
ttggctttaatttttcttataaaaaaacaccctcgaaacataataactattattggcagtaatggtaacgggaaaagtaggacgttaagtaatattgcaaaaatgactctgagtggctctaaatcttatggagatagaatagaagtaaaccggattttattattcgcacctagacatgagttgcgctcattcccatccgaacattggaaaaatccggcaacgtactatagaacatttccaacaacaagatcatatcaaacgcgaagtaaaaaaaccacaactgaaaccattttagacattgtccgaagcgaagaaactattgctggcaggtcacgatgggaaattttctctgaatctttgaatgggctaactaatcacggtgaaatttatctaaatggaagttcacccaaggagtattattctcttaaattcttaaacgatcaaaaagaaaataatagcctcctgggttggggtactgttcaagaagatcttgaaccaattcgacttattcaaggtaatgagtttaaattaagtagtggtgagattagctttctaaaaataatcaccaatatgacgatgcacatcgagaatgggagtctcttactgatagatgagcctgaaactcatttacatcctaacttcatatcgctaataatatctgctttacataaaatattgacagccacaggttcatattcaataatatcaacacactctgtttatattgtacgagaggtccctcaagaccaagtgattattctagagaggggtgaaaaaaacaatgttgtccaaaacaacaggaatgactacattaggtgcaaacttaggttcattatcatcatttatatttggagaaaatag

SEQ ID NO: 195834 - DNA, 561 bp, Klebsiella oxytoca
atggatgcagtagagttaatattctgtaaatcaattaattacttcgattatacttcagttaacccaaagaaaaccaattacatattaatatcgccaagtgacgataattttaatgactttgggaaaatcacctcggttttaatacgtgcacaatttgaagatgataaggttgagttccgtacaaaactagcaattctcgacgtaaaaggaagcaatcaagaacttactctagtagagtattttaacaaaacaaataataatgacactctaatatatccaaatgatgacgtgctttatttttcgcaatgccagcccctagagacttacagatatttgcatcgatgtgttggaaaagaaaagtcagacattattctgactaaaattaatgacctgagcactatacggaataagaaaaagtatctaaataaatttaggctatttattaaaagcaaaatatttcaaacgtccttaataaggacctcggagagttattacgccttcaaaaactcaaattttataagtggtgaaatagaatcacaagaaataaaaataatgaattag

SEQ ID NO: 195835 - DNA, 870 bp, Klebsiella oxytoca
atgcatatcataactaaagattttgtacatagaattgacgacaagttaatctccgctgatgtcgcgcttcatgctcgcccattttgtgttgtaattgaatggatgaaagaaaaaaatatcactggcgatatcttggataagaagatatgggaaccagtgatgaggatttacaaatgtctttacccaaaaggcaatttttctattccatcattaatggttggtggtgttgccctgcgtgatgcgatgtatcctgtgcatattaatgtcgcttatggttcttttagtattgagccacttagatgtattgatatctcgcaaagcgaattagaatttatttttcagcattatccagaacaaggttggagggctttttatggggtctgtgatctttgggattttggatatggtattgacgatcttattaatacagggtctccggcaagggaacttttatgtaatgcgagatcatctgctgttgcgaccccccgtattctatctggggcagatcctgatgctgctgttcaaacggcatgtttgatggctgaattatcaattaaagcttcactaactcacttaggatggactggtgaccaactaaaaaaattgtcgcatcatttgcccaaattagccgctgaattgattaagattagacctgcacgcaatgatgagaggttgttccatgcatgctcaaattttccaaattatgtagaaagccgttatgcctctcatggcatgactcgccttgaacttatggcactttcaatgcgtgcactatttgttgcttctgaggcgatccgtcgcatatctcaacgtaatatggctaacgagatggaagatagatctgattgcccttgccgaccagtgctctga

SEQ ID NO: 195836 - DNA, 801 bp, Klebsiella oxytoca
atggataagtgcaggttatgtgggagagaaacagtattagaacttagtcatattcttcccaagtttatatttaaatatgcaaaatcaacctcgttgacaggacacataagagcaacagaaaatccgaatcgaatcgttcaggatggaaagaaaattccatttctttgtaaggagtgcgagactttatttagtggttgggaaagttatttttctcaaaatatttttcatccatatcagaatgatgaaaaagatagctttgactatgattaccgattgagtaaatttcttgcgtcagtcagttttagagttttattatattcttttgagaatgacaaaaatgatttttttgatagcactattttaaagcatgctcctgttgctattaataacttaaaagaatacttattgggaaataatccacatcctaaagaacagcgacagtctctggttcttcttgataaaacgtcggatgaaattaacgataagaatatgtatctgacaagagcaattgatttcgatgttatgactacagatgattgctcatttgtctatataaaatatcttaaatttttacaactatgccccataaaacttaaaactaacagagggtggcgtacagccaggatcagtaatgcaacaggaaccctatgtatgaaagatcaggaattaccagattatgttttaatgaaaatgaaccaatccattaaattaataaaaagtcagagaggtgagttatcctctaatcaaaaagataagattgaggaacgaattattaatagtgttattgaccaattcaattaa

SEQ ID NO: 195837 - DNA, 1992 bp, Klebsiella oxytoca
atgaaattcatgatcgactcactgattctatggccaacaaaccctaagaatgaggttcgtgaaatctcttttaaaaaagataaaataagcattattcatggaattagtggtactggaaaatcatccgttatatcaattatagattattgtctcggtgccagtaagtgtgcaattcctgtcgggattattcgtgagtccgttatgtggttcggtgtaacggttgatatcatgggacataaacgcctcattgcgcgtaaaactccgggaaataaatctgtaagtaatgaattctacctttcatcttgcccggaagaacttcctcacgaattgattgctactgataacaatataagtttcaagaacaaatttaatcaacttgtccaattaagcgatctacctcaatcagaagacaatgaaaggcccggtttcgatgctagagcttcttatagagatatggccgcatttaactttttaccacagcatatcgtagcaaacccttatactctcttttttaaagcagattcttatcaaaataaagaaagattacagagagtaatgccctttgctttaggcattataaaccgtgaatatatgataaaagaaaaggatcgtattgatctgcaaaaaagacttgatacattgtataaacaacaagaagctaacaagaaagcattatctggttgggagtttgaagtcgatcgcttatggcgtgagtgtattgagttaggattaacatcagtcccagaaggacaagaaaaagacacaaattataaagttgaaagattggtattcatcaataaaacttatctcgaaggaaatctcgacaaactattaagcactccaaattatgaatatacgaatgaaaagataagatcactcaatgcaaatggtgaaaataaacaacgagagattgatgcgctacgaataaaaattcgaaattatgaacaactattctctaaaggcaaagactttgctcaagcaataaataaggaaaaagaacatatcatcggtttcgaatggcttaaagaaaatttatcacctgataacgaatgcattgcctgtggctcaaaaactaatgctctatccgttgttgttgataattttgaaaaacaagtatcaacaattaatataatgtcagatgcgctctttgataatcctattgctgataaagaattagacaaactaaagaaaaatttaagagatcatcaggaagaactgcataaaatcagaaaacagaaacttcaccttgaaaaattagacaaagcgacgaatgattcattaaataaagtatatgtaatgatcggaagaattcaggaaacattaacttcattaaagaaaataaagaatacggatgacatcagcgaaaatataaaagaaataaaaagtcagttagatcctcttgatatttatttcaaaaaatccaatcgagaacgtcacgaatatactgtatataaggaagttaattcacttattgaaaaatacgcagacaaatttaaccttgaacgcagaggaaatattagtcttgataagaaagagttaacattaagttttaaagagcctaagagcataaaaagcgaatatctatgggaagttggtagtggtgcaaactggatgggctatcacatatcagttttcctagctttacatgaatatctctctcacccggatagatataaattaccaccctttagttttttagtaatcgatcagccaagccaagtttattttcctagtacagcctctggtgaaaatatactagatcaagctaataaaaatgaaaatctacaaaaaacaagaaaagatgatattagtgccacaaggcgcatctttgaaatattatcatcagcaattaaagagaataatctaaatttccagattatcgttctcgaacatgctgatagctcaatatggggacaagttgataatactcatgaatcagcttgctggaaagatgaaggagatggacttatccctcaaaaatggattagataa

SEQ ID NO: 195838 - DNA, 489 bp, Klebsiella oxytoca
atgttttatacggataaaaacttaattaataatagttctctttcttgttttttatttgtactgtttgtggaagaatacgaaactatttcagttgataatcgtcatcctgatttaatacaacttttgattattcttccttttgtttggcataagctcagtagagacgcaataaaaacaaaaaaatcatctactccattagatgttgtaatattagagaatcaattaatcaagtcgaattttaaagagcgaattattgattatactggtgcaacacttcaagggttaaattttgctgtttcatctggcttattaatcaaaattgaagaaaataatagaatctggtttaaaagaagtgcaaccaaatggcctcctaatgtgaagaaaacattacctgcggatatgagcaaagcaataacccgtctggcaaactggttctatcatatggatacctcttcaatttattgcttacttttagggaaatcattatga

SEQ ID NO: 195839 - DNA, 1203 bp, Klebsiella oxytoca
atggtaactcaagaagccagttctaaatttttaggttttctctatcaaattgaacgcgcactgtatcgtatctttgccagtgaacacaattctgccatatttggaattgaaactgcggatgatgtggtagaagagatctcattcggtaacggtcagtttcatgtctcttttgagcaagacaaacacgctttgagcacaagtggacaaccctatcaggatagtagcaagaatctctggcatactatgcatatttggctttcaacaatgaaagatgctcgagaaaaatatgaggaaatttcatactgtttagtaactaacaaaaatgttggtgaaaacactcttgcaaattcactttctaaagctcaaacagacgaacaaataaaaattgcgttagacgagttgagggaacaagcggataccataacaggggctgtaaaagaaattgcagagcaagtgcttagttatcctgaagacgatttgaaattcctgatcaaaaatattgtattacttgataaccatggaacaatttcgggccttgaaactaaacctgcaacaataaacttatttcatcttccatcagaaataaaagaacatgctgaagtaatttattgttcattgctgggtcttcttgtaaataaatgtaaatcagcgtggaaaatcaaagagcctgcaatattaacaaaagaacctttttttaatttattatattctgaggtcaatagaataaaacgtaaaaattttattgatcaacctatactcaaaacttcgtatagaaagtatttagaggaagatcagactagtcatatttttatcgagcaacttcaaagaataggtaaaaccactgatgcttgtaaccatgccttattaaattattgggcattttatgctgaaaaagtccgattgcaagacacaggtgaaatccctctatctgcttgggaagatcgtaacgatgaactttatcatcgctggatggacataacatttaatttacctgaaccagataatatacctgagaaaaaattggctcacttccagaaaatatactcagacacaatgaatcccgattacaaggcatcccttagtggtaacaatacagcaaactcctattttactatcgggaattatcatgctttagcaaaccatcctgaaaatttattatttgtacactggcatgatacttataaaaaatgcaaggataagtag

SEQ ID NO: 195840 - DNA, 222 bp, Klebsiella oxytoca
atgatcatgaggcaaccggactggcattctgccgacattatcgcggcgctgaaaaagcaagggacgtcgctgtccgccgtttcccgcaagtcagggctggcgtcctccacgctggcaaacgcgctgataaggcactggcccaaaggtgagaagctgatcgccgacgcgctgggcgttgcgccagagcaaatctggccttcccgttatctcagaccacgttaa

SEQ ID NO: 195841 - DNA, 885 bp, Klebsiella oxytoca
atgggcaaattaggtggtgaaatgaaggcgctggcgaaaagggctggcggcagttttaaaacggtggatgaccgcattcacattgtacagcggttcagtcgccatttacgctcgctgaatatccagatccagcgggtggaacagatcaaggttcgccatatcgaatgctatatccaggcgcggctggcgcaggagatcggtaaacggacgctgcaaaacgaaatggccgcgctgcgtggcgtgctgcaacaggccggacgtaagcaggtggcggaacattcgcgactgaccaataaagcattagggctggctggcgcatcccgtaacggcaccaaccgggccatcacgccggagtattacagcagggtgctggaagccgtccgcgacaaagacgcagggctggcagcaacgctggaactggcgcgactgatggggctgcgctcgcaggaagcggtacagtgttgtcagtcattaaaaacgtggaaacaggcgctggagcgcggcgaaacccggctgacggtagtgtttggcaccaaaggccatcgtccgcgcgaaaccgttattcaggatattgacgcagtgaaaaaagcgctggataacgccctgtctgtcgcagagcaacgtaacggcagactgattgatcggcccagcctccagagcgccatgaattactggcgcaaagaaatcgcgaaggccgggctgacggggatttataccccgcattcattgcgctatgcgtggacgcaggatgcgctccgccaatatctggcgcagggattcagcgaaaaagaagcgctggcgctggccgcgatggatttgggccacggcgacggacgcgggcggtatgtggcgcaggtttacgggcgacgggaagaagaggaataa

SEQ ID NO: 195842 - DNA, 1356 bp, Klebsiella oxytoca
atggtactgaaaagttccgtcaggttttttgacatccagagtttttgggggcttaattgggggcctgttggttcgataaactctggcgcccccgctatgccactcaccgataccgccatccgcaatgcaaagccgctcgataaaccttacaagctcagcgacgcgcagggtctgtacctgctgataaaacccaacggttctaaactctggcaactcaagtaccgctttggcggcaaggagaagaaactggcgtttggcgcttacccgaccgttacgctggcgaatgcacgcaagctgcgtgaagaagcccgctcggtactcagcgcgggcgacgatccgggggtgaaaaagcagcaggaaaagcaagcaaagagaagcggtaatacctttgaagaaatcgcccgtaaatgggtggcagggaatatccgctggactgaggcacacgccgccaaagccctgcgctcgctggagctgcacgtttttccgctgattggcaggatccccgttgccgacctgaaaaccgccgatctgctgatcccgctgcgggtggcggagagaaagggcaatctggagaccgctgcgcggatccaacagcgcaccacggcgatcatgcgctatgcggtgcaggagagcctgatcgccagcaacccggccaacgatcttacaggtgccatcgcgccgccaccgaaaaaccactaccccgccctgccgctggagaagatgccggagttgctggagcgcttcgagagctattccggcaggctgttaacccgtctggcggtacagcttaacctgctgatctttattcgctccagcgagctacgttttgcccgctggacggagatcgatctggatggcgcaatgtggactatccccgccgagcgtgagccgattccgggtgtgcgctattcagaacgcggcgcaaaaatgaaaacgccgcatctggtacccctgtcaaaacaggcggtgatggtgctgaaacagctaaagctgctgtccggcaacagtgagttgctgtttcccggcgaccacgatccgcgtaagccgatgagcgaaaacactatcaacaaggcgctgcgggtgatgggctatgacacaaaggtggacgtgtgcggtcacggcttccgcaccatggcctgtagtgcgctgattgagtccggacgctggtcgaaagatgccgtagaacggcagatgagccatcaggagcgtaacaacgtgcgcgccgcgtatatccacaaggcggagcacctcgacgagcgaacgcaaatgatgcagtggtggtcggactatctcgacgcctgtcggcagaagtttgttgcgccgtatcggtatgacaggcaggttcaggtggcctga

SEQ ID NO: 195843 - DNA, 597 bp, Klebsiella oxytoca
atgaagcatgggaatgtattttgccacgggtgtagtgttaaatgcgaaattcttcctgaacaggaatttagggcttctcagtgtctgaataccagggtttgtatatggccggaagtaaatgttttttttgatgtaggggtaagatctgttattaattctatcggtattatcacctcttctgcagggtttgtttttgtggacttttcctggcgaaatattcggttttttatgtgtgatgagtgggttgaatacctggctggtacgaatatgaagataatactgctgacagatataaaaatggcagcactggccaactattataaacaaaatgaaaagagagtttcagaggtgctctacctgtctgaaggattaagtatgactctgattaacttcaggaagttgttcattggattacctttttttcggagatacggcagaacattaacaaaaaatgaaaaggacattctctatttgacgttaaaaaataggggggtatttgatatttctacgcaaatgtcactcgatgtgaagtcagtttataacataaagcagagagtcgaaagtaagataggaatgaaaataaggaggtttttttaa

SEQ ID NO: 195844 - DNA, 1389 bp, Klebsiella oxytoca
atgatggccatcataagaaaaaaagagaagcagaggatttttattttcctgcttgttccggtcattttttttggctggagccagacgagttttgctgcaggtacctgcacaagagtgacgtcgacaagtcaactatccgctgccgcgctgaatgcgggttatactgccgcatcgtggaccggtgccgcagatgccaatacggtcacaagcctcgggcttcccggtatcgtgactattagtggttccgagggttttcagccatcagggaccctgctcgccagttcaacggcttcctttctgacgtctggtcacaaggaaacatatacagcaaatcaaattttatttcgctgtgatcagagtgcggtgaatgcagggttgtatgagttttatgcaaccaatggtgtagaagactacagcggtaaaaatgcgaccagtgaggtagaaggtgcgtattacacttatgtacaaaatgttgctattagattaacgaatatgaagacaggggaatattactcacgcaactggaaatcccgtcagcttaccgctgatgactggtattcagatggtacctatacatatatacccgcgagcgcattcagtgatgtatctgttgagttatataaagtaaacggaacctacggcagtcagaataactctagcttgtacacctataactggtggagtacaggcaacgctcaggccgccggttttcttgcattccagggaggagacttaagctccgggctttatgctggcgctgacagtgcgagcaacttctcaggatggtatttgcactggcctgctggttttggtctgacgaactacgtgactttcgtcaggggggcagcatgtactgttaaggattttccttcggttgtattgttgcccacaatttcagtcagtgacctcaatgcggggaataccagccgcgccggattctccatcagtctggaatgtgaatcaggggcggtctccagtacgtcaaattcaacaagctcttcggcaaacgttgctatgggctttatggtgaatcaggcaaacgcggttagtaaagcgcaaagtttggggctggagacttccggcggtggtctcacctggctgctggatacaaattatgggcacggtgcaggggaagcctcgggggtaggtattcaaattcttaacagtcatggaaatgcgcttaatcttttgcctgctaaattatcatttggcgcaggaaacagttacggatggtatgggtttaaagatttactgacatttaccgggacgggaaatggcgcagatatttatacgggagatttcactgcagagttgggtgcaattaatggtcagacagttaccgcggggtctgtgaatgcgcagttacaggttgttgtcagctttcagtaa

SEQ ID NO: 195845 - DNA, 411 bp, Klebsiella oxytoca
atgctggaagccgccgggatcgccgttccggcgaaagcgccgcgcctgctgatcgctatcgtcaacgctgacgatccgtgggtcaccagcgaacagctgatgccgatgctgccggtggtcaaagtcagcgatttcgatagcgcgctggcgctggcgctgaaggttgaagaaggcctgcaccataccgccattatgcactcgcaaaacgtctcgcgcctgaacctcgcggcccgcactctgcaaacctcgatattcgttaagaacggcccctcttatgccgggatcggcgtcggtggagaaggctttaccacctttactatcgccacgccaaccggagaaggaacaacctcggcgcgtacgtttgcccgttcccgtcgctgcgtgctgaccaacggcttttccattcgctaa

SEQ ID NO: 195846 - DNA, 633 bp, Klebsiella oxytoca
atggataaacagcttctggaatcaacggtcagtaaagttctcgacgagatgcgcctgcggcccatcccgctgggggtttcaaatcgtcatatccatctgtccgcggcggattacgaacgcctgttccccggccatcccatcagcgagaaaaaagcgctgctgcagccgggacagtacgccgcggagcaaaccgtcactctggtggggccgaaggggcagctgaaaaatgtacgcctgctcggcccactgcgctcggtaagccaggtggaaatctcgcgtaccgatgccagaaccctgggcgttgcggcgccgctgagaatgtccggcaacctgaaggacacgccgggcatccgcctggtcagcccttttggcgagctggagctgacgtcaggggttatcgtcgcacaacggcatattcatatgtcgccgctcgatgcgctgatcctgcgggtcgcccacggcgacagagtgtcggtggccattgaaggcgacgagcgcgggctgatcttcaacaacgtggcggttcgcgtttcgccggatatgcgcctcgaaatgcacattgataccgatgaggctaacgccgctggagccgatagcccgcaggcctttgcccggctggtaggcccgcgatga

SEQ ID NO: 195847 - DNA, 672 bp, Klebsiella oxytoca
atgagtatttatggtaagtgttttttgagtctgttattgtttattctgtcttgttctgtgtttgcggaaagaactcgtgtattaacagcaaaaaatattgatggaagtgagtggtttatcgaaaaagatggaggtgagtacaatcttaagtatataaatgcaaaaggggatgtgtatagtaacgatacaatacttacatcggatattgaagggagtggcttatttttagattccaaaccagatggtacagtatctttggttatggattacccacgggatgtatatacgtttaaattcacctcaggtaaaagaccttttttaatatcagcatgtaagcaaataagactaccatcttcgggatatcaggctgacgcgttactaactttgtgttctaaagatgatgaaatatccggcctgagtttatcaacgctggatgcaagtaaactcctaaaatctgatagtttagtacttaaagataaggttaaaacgattgttagaggtaataaggcttttttatatgatgaaaataaaaaacaacagaaaaacaaaccatatttgataaaaggtgacattgtcgaggttttggcatataaaaattccatgttaaatattaaatacacatctgaaactagagttgttgttgcttggataaagtttatagatattttgtag

SEQ ID NO: 195848 - DNA, 2667 bp, Klebsiella oxytoca
atgacagcaaagttacccaaaatcagttaccccgtaccgtcaaacaaaaatggccatgccttttcctctggggaagagttgttatcgatgatcggaggggaaagctcaggactgtatctggtgggaagtcagggaatgtggcatggcggtatccatattactgatgccactattccctggtgcgccctgagtactgacagtgaagctgagaatgaatattgtcgcgagctctataaaggggaacaatttattcgttgtatggcggatggtgagatagttgcctggcgcgtcagtaaggactatgagagtgctgcgattgaatggcgcggtgaaaaactgttcctttcgacctcttttgtgctggtgaaacattatatccagccgggtgatacagaagagagcggactgacatttttcactctgtatatgaatctggcgccttatgctgcttataaacaacagggcagcctggcggacagaaaagtggcaggcgtccagctctattactccagtgcggaagatttgcaggcaggtcgcacagccggaaaactggagaaagacacggtagtcacgttgagtgacactattgtgacccgcagcagcgaccagcgtcagtttaccgaagtaaccattaccagagaaacgaaaaatgcagcaggaaacacgcttgcagcgggtactaaagtctggacggtatcagaccaggggaatctgaaagcaacagaatcggtgcccgttccgtcctggtgggcaaaatgtactccggcttacactaatgagtcagaaggcgttgtgaactgcacttcgcgtacaaactgggcgtactatctgagcagtaatgatgttctgcaatataaaaatgcaggtagcctggtagccgatttcccgctttcatacgagcccggtaataccgcacagcaggtcatccgtccaggtaagaatccaggcgatgcagcaagaacattcagtctggtcactctgggccgggataaggataagttgaaaaagggcgaccgggtatgggtagtatcagacggcgacagtctgacgccggttgcaccggcagcatccggtagtgaacccgtttttaatgatgtgtatgtaccttcagcgcctgtaccggtcaatgccggagacagtcttgggcatatgggtttttatcagctaccggaagaaaacggcaaacgctcgcgctaccaggtacatatagagtgcctgagcatggatgatatggagaagttcatcactaatcccggaagagcaggagaggatgcgccggtgtatctgacctggaaagctgatgcaccgttgtttgacaagagcgataccggaataacagcaggcggtcgaaaaacaaaggggccgggtattctgacactggcaaaagtaccaggcgttgatgctgaggggaacacgctgtccagtaaccaggatgcggcatactatcagatacgacctgaaggtggctggctggccgcagccagtgttcagaaagtatcgcaatatgcgcttggtgagctcggatttgttacgctgaataaggcttcggaaagttttgacctgattgatgggataaaacaaccaaataacgtggtgaagggtattctggagcagttgtataaagcagcagaggaggaaacccgcaccactcacgcgctgaacaagtataactataaacggctgctggaattgatagacagtaaccaggacgggcattactcggagcaggagtatcttcaggcggttcataatgtgtcgtatcgcgaccatctgtaccgtgtgatagcgaagcatgccagtgaatggtattacggcaaggatgacccgctctggaatacatacctggatacgttaaccacggacgcaccgttatggaaaacgtacctggaagcctttctggataagatgacatggatgaaggcagtgtccgaaaaggatgtggcgctggggccggacccctggcatatgcatccggtggtgtttttggcggcgatgaaagcagtaaataaacaatgttattgctataaacaaggtattgctgaccgcccgtgccaatccggggctgtagatgtaactaaagatgattttgaattgctcgctacacagcttggtgttgagcgagaagtattaagagcgatcgcagtggctgaaacaggtgataaggtgccgtttagatactatgtaagagatgagaggcacgcggcaattctttatgaaagacattatatgaagagaatctcgctgaatttgggggtaagtacagaaactgttcgtgaggtcgaatcttcagagccagacattattcattcctatgatagcagctatcgtcatggaagagatagtgagcagtatcagcgattgttgagagctcgtgaaattaactttgatgctgcaaatatgtcgtgttcttggggtaagtttcaggtaatgggtgagtattatcatcatctatatagttcaactcaggaattagtggatgctcagaactattgtgcgatgcagcacttacaatactttaagatctttcttgttaatgagaaaagaatgcttcagtcgatgaaggataaagattggctaacaattgccaggaagtataatggcactggtcaaataggatatgatgaaataattgagaatgcatataattcattaaaaaatgagtggtga

SEQ ID NO: 195849 - DNA, 1545 bp, Klebsiella oxytoca
gtgacgggcaacgactgggcgtggcctatcagcatggccagctttcatcttgaactcccggacgccgttggaaatctcaacgctgacgctaaggacgccagactgcgatcgcttgatgtttataccggtgtcgcaggggcgaaagaacacaatgcgcaagttcttcctgacggtagcgtccgcaccctgcggcctctggcgcggggggaggggctgaccgtggtctatacctggcctcggtcgatccttgccgacgctccggcgccggaggctgctttgcggctggtgcatctccttatccccaccttaaaaaccggcgtggtctggctacccttgctgcttatggccgcttattacctgatgtggtggcgaaaaaacgtcaccaaagccgggctaaaaatgccgccggtcgttgcgctttattcgctgccccccggcatgtctccgggatacatgcgttttatcacccggcgtaaatatgatgatgtggcttttagtagcgatttattagcgctggtggctaaacgcggaatggcggtcagcggggacagtcatcacactcataacccgtggcttgctgactccggcgtaaaacagcggttaacccgtttgcccgttgagggaaacaggcgattaaacagtgatgacctgaagctgttaagcacgctttttaaagataaacaaaagaatatcgatctcagcaaggcccatcaacgccccatgcaaaacgcgcgtgaacagctggagaaacgttgtgtggcgcagcggactaaggtgtttcgcaagtgggggcagccgctgcggcgctgcatctatatcgcactgctggtgccggtggtctgcggcatttgggttaatacgcaggccgcgctgctgacgataccggccgcggtttttatgctgattggcggagcgatgctcacctgtttgctgcgctttatatgccgcccgcgggaaatgtggcttgcctgggggccggtaccgctctttttattggcgttcttcggccccttcgcgacgctgggaggcgggatttttctctttggtatactgcccatcacccagcttccgtcaggatacattggcgcgcttatggccgcgttcgcgctgtgcgttttcgttgcctggaaaacgcctcgctatacgcagcacgggcttgatgaactggctatcgcgaaaggattgatgctctatctgggcaccgccgaaaagcatcgttatcagattatctatccgcctgagcagatgatttcccattttgaagcgctgctgccggttgccctggcgctggacgtagggaaaacatgggcaaatacctttgcccactacctgagtagtacaggcgccatgtcgcatgcgtttgccgccgccgactggggaagcgtcgaacacttcagcgaagcctgccgaaccgcctctatgtcaacgccggatagcggttcagggagcggttcatcatcaggttcaggttatagcggatccggttcctctggaggtggttcatccggaggcggctcgggcgggggcggcgggggcggctggtaa

SEQ ID NO: 195850 - DNA, 603 bp, Klebsiella oxytoca
atgccgtgcaggatgtctatctggacggcaaagtcactatcgcttaagcactcgcgtcgtctgccttccccggcggcgctgcgcttggccgggctaccggttcaccgccgtctgggggccggagcccggacaggcgcgtcagcgccgcctccgggaagctatgcagagcagggtgaccggttcaccgccgtctgggggccggtagcccggacaggcgcttcaagcgccgcctccgggaagccatgcagagcagggcgacgggttcactgccgtctgaggatcggagcccggacaggcgcgtcaagcgccgcctccgggaagccatgcagagcaggcgacgggtttaccgccatctgtgggccggtagcccggacaggcgcgtcaagcgccgcctccgggaagccatgcagagcagacgacgggttcaccgccatctgtgggccgccggtagcccggacaggcgcgtcaagcgccgcctccgggatcccgcttattcgcgaatcagccgcgccgtgtgctgtagcgttttatacgcttcatagcgccgctgatgctcggcgctatactgcgcaacgcagcgataggttttatccacccgcgtaa

SEQ ID NO: 195851 - DNA, 657 bp, Klebsiella oxytoca
ttgactggtagtcttacccggctcgcgctgcgcttagccgggctacgggttcacagcgttctgcgggccggtagcccggacaggtgcgccagcgccgcctccggggaatgcgcccggcctggtacctcggcgcggcttcttcccggcggcgctgggctgaccgggctacgggttcacagcgttctgcgggacggtagcccggacaggcgcgccagcgccgcctccggggaaagtgcccggcctgatacctcggcgcggcttcttcccggtggcgctacgctgaccgggctacgggttcacagcgttctgcgggacggtagcccggacaggcgcgccagcgccgcctccggggaaggtgcccggcctgatacctcggcgcggcttcttcccggtggcgctacgctgaccgggctacgggttcacagcgttctgcgggacggtagcccggacaggcgcgccagcgccgcctccggggaaggtgcccggcctgatacctcggcatggtttcttcccggaggcgctgcgccgaccgggctacgggttcgctgcgttctgcgaaacgccatcaggcagccgacaccaccgatttttgcagcagccactcgcggaatacctgtagatgccgggattccgctttatcctcctgccacgtcataa

SEQ ID NO: 195852 - DNA, 195 bp, Klebsiella oxytoca
atggctaactcaattcctaacaacggacgcgccgtgatgatgcgcaatcgccgcaccggcgccgcctggctggtcagcttcgactatcgcgacggaagctactggcatgaaccgcagggcaatctgcgccacattcgccggccatacgcatcacgcaatatcgagccgaacctggtaccagccgggacgcattaa

SEQ ID NO: 195853 - DNA, 783 bp, Klebsiella oxytoca
atgaatcttgagctacttgacgccccattcccgcataaggatatcgagtggcgtattcagcaggcagggaaaagcggatcgtcaatttgggcaaaggtcctggcctatgtcacaaaccgggcaatcatgaaacgccttgatgaggtttgcggaaaggctggctggcgtaatgagtaccgcgatatcccaaacaatggcggcgtcgaatgcggaatttccataaaggtcgatggggagtggatcaccaagtgggacgcatccgaaaacacgcaggttgaggctgtaaaaggcggacgctcaagcgctatgaagcgcgctgctgttcagtggggaataggcaggtatctctacgatctggacgtaggattcgcaaccatatcaggcgaaaaagcagaaggttttacttacgcacgaactaaagagttaggcgctttttactggaagccgcctgctctgcctgcatgggctcttccatcggcggtttcaagcagtgaacagtataagccagcggtagaaacaaacagcgaacagtttcagccagtaaaaccgtcgataaccatggaggaagctgacgatattctcgcggagttctgccgggaaatcgagagtgaaaacaacccggaagtcataactcaaaaatacagcgaagcatggttcgctctggacggattttccgaacatcaaagcaaatgccatgaggtaactggcatccggcgcagggagataaagcaggcgttaggaagctctgaaagtgcaggtggcagccatgaaagtaacagctga

SEQ ID NO: 195854 - DNA, 291 bp, Klebsiella oxytoca
atgaaagtaacagctgaatcaatcctgtccatcctgcgcaaggacgcgcgtaacaacatcacagcgtttcaccgctggcagacagcaaagggtgctcttggtcatacagccggaataactctcaactatcacgatccttattacgaaggatgggcgccggctcttgagatgcgcgaggtgttcatttcagcgcctgaacttgagcaggtgatcccctacctctctgtagagaaatggggtgacgggctaattggtggggaaatttatcgaatcccacggggggaagaatga

SEQ ID NO: 195855 - DNA, 393 bp, Klebsiella oxytoca
atggcgatcaatcgtctggtttgcctgtgtttggctttgtctattctggggactgctgctttcggagttcaagcggagactaaatctttcaaatgtgtttacccgaaatacagtgatcacgaggggattcataatgcaaaaaaacctatggtcttctcgttcatcatcgacactaagacgaacaaagtgtacatgactggcaatgttagctctgtggaggtgacacctgtccctaatggggtaaatggaaactctttcatagaaactacaccagtcggtaatgttactgttacaaccgtgatggctaatggcgagtcggtgcatagcaggagtatggtttatcctgatcgcattttagcttctcaatactacggaacttgcacagccaactaa

SEQ ID NO: 195856 - DNA, 171 bp, Klebsiella oxytoca
atgatgaccgggacgggattttgtacattggtatggctaaactgttctgccaccgtacaggtgatctggctcgttcatttagttctcaatatcggcagagtaaacaccagaccgggcagcgctattggagtgatgaacgatatcagcagcgttatccgtatgaacacctga

SEQ ID NO: 195857 - DNA, 213 bp, Klebsiella oxytoca
atgaaggagtggcaggggcagccaaccaccaagaagcccgcccccgccgtattcaacattaccaacggagagaaggaaatgccgaacagcagcattatggcgttagcgctcgcgatgtgcaaggtagaagccggaagacgggttaaagtgccagctatgacaggaagccagctacacctgttaatgatgtggctacaggctttgagaggataa

SEQ ID NO: 195858 - DNA, 558 bp, Klebsiella oxytoca
atggctaaaacatccgcagttaccccagagcaggctaaacaaatcgaagcggcattgcgccagcgtagcgaagttgcagctgatgcctggaagctaaatctacaacttgcgttgcgtatcagtgacctactgtcggttaggtatgatgatgtacaaggaaaattccttcgactcaaagaggggaaaacaggcaagcagcgtgagttagttttgaacactgaggcgctaagggttctcaagcgtcgccggaaacagaatccagatgacgtctttgtattccagtcaaaatccaatcgggtgaaaggcctggagcctaaaccagtgtcacgtgtatttgtagctcaagccataaaggaggcatcacaggggattgtagagcagggaatcagtgttgctacccactcagccagaaaaactcgtgctcgcgctctgatgaaatcaggaacgcctgttgaggttatctcccggatgctcaatcatagcagcccggcagttactatgacgtacctcgatataactcaagacgaagtgaatcagacctatcagatggtgatctaa

SEQ ID NO: 195859 - DNA, 174 bp, Klebsiella oxytoca
atgcgtaaacctaaatggcaaaccgtagagcaaattgtagccgctctgcatgatggaacagcacgactggcaaacattgaaaacctttactatgcggcgatccgcaacaactatccagaccgattagaactttttaaaaatgcactggaacagtacaaacaggagaaaaaataa

SEQ ID NO: 195860 - DNA, 165 bp, Klebsiella oxytoca
atgcaaatcagatttgaacctgaactattcacgaaactgtacaaactggcccacgaggaggatatgcatatcccggccctagtaaataaacttttaaacgaaatccttagcgaagaggaaaaaaatgaacaaaacggaacaatccctaacagtaaaaatcgttaa

SEQ ID NO: 195861 - DNA, 1470 bp, Klebsiella oxytoca
atgaacaaaacggaacaatccctaacagtaaaaatcgttaacgccatctgtggcagtggaaaaagctacaaactcaaacaatatataaaaaccaatcctgataaaaaggcgctgatcgccgtcccaactcacgatttagcctctcaaacacaatcagatcttcagaaactcggcatacctgcatatcataatcaggtagataagggggagagcgcaacacgatcattaataaacgcgctggatgatgattttgggcgaaacgttgttattgtgacccacgaatgcctgctacatttttgtcaatatgcgtatcgtgatgagaaaacccagaataaattacgtctatttgacatctatattgatgagatcccccctgcctggtacggggcagagatagactataagaatgaggaatataaaaaatcaaactttccatttttagagtggatagaggaacagaacggtttatattttgttcgtgagcaggacagagaaaagtttcttgcatattacgaaagtgaacacgccaacagcaaacttctgaaacaagctctgttctctatgctaacaggtcagggaatgctcttagaggaggacaaatatttcttctcatttactgctaacccaatcctgtatagcgccctgtgggctaaatcattcaccgtgttaggggctaatgtcggaattagtgagtttgcctacgccgctaaaactattctgaatgcagaaatctcgctggctgatgatgagttgcagccagacctgatgcgccgcgttcatactgacacaaaaagaattgaactgatcccagtgtttaaccagaaatgtactaaaaaactactgagtgactactacagcgatatcctgaacaggacacgcagagtactgagggaagaatttatctataccagcaacaacgatgagcagtacagcaacggtttttactacgcctcacatgctgatgacgtgttagaaggtggtgaacgtgtttcaatggcctcatacggattaaaccattaccagcacctgcataaagctgcattcttgggatgtgcaaacctcgacaaaacaaccattggacactggcgcaaatattgcgatctgaatggctgggactggcgggagttagaagaaaaacggcaggcagcgctgaactacgaaaaggtttatcagtttgtttcccgctgttctgtccgtgtcagagggaacaacaataaacaggtttatattgttcctgatgtcggttgtgctgaatatctcaaacaacattattttccagatgcagtgatcaaaccagaaatgataaaaactgagagaaaaaaaagaaacacaagcaaaggggatgataaatttaacttggttaaatctctagttgatcaaggtttgaagagaaaagatatcgtagaaaaaaccggattcaaaatagatactgttaaattttatttaaaacaaatcaaaaaagcagcttaa

SEQ ID NO: 195862 - DNA, 279 bp, Klebsiella oxytoca
atgattaattttgaacaacacaaaaacattgtagaggattttgtagaacagcattacccattggcacacagcttgatggtcgatagctatattgacccggaagcctattattcaaattatcaaatattgctggcggcgatgaataatctcccggagcatcctgaatactttttagaatggttactagaggatgacgcagctttgtatatgaatctgatggaattgatcgtcatcaccagaaccattcataacgtgtttgaacaagtttcgcctgcgtag

SEQ ID NO: 195863 - DNA, 366 bp, Klebsiella oxytoca
atgaaaatttctacatcacacctgtgggcatctgatatcgtcgcttatgctgctgatccaatcaattttgatgaggtcgttaaagtcaatgcactggcatctgaaattgtagcaggttcgctactcgataaaactacactggctctcgcaaatgatgccactacagcagaaaacctaattctggttttagatcctgcctgggttggtcaaaagtatttacgcatttgccgcaacggtctggctacttttgtacgtcgtgaaaacctggttgctgcatctggtgcagatatggaaaccttgtttaacaaattggctgagaatcttatcgtcattgctggcgatgaaaaaatgcttcctaccacataa

SEQ ID NO: 195864 - DNA, 1827 bp, Klebsiella oxytoca
atgagtggaacacagattaccgccagtacattggtaaataaaatagtttaccgaacagatttaaatagtctgaaaaaagtcagaaacgatatgaagaagttgcaaaaggatttcagcaaaacagagggaactatagccaaagcaaaaatgcaggctgataaacaggcgtacactgcacaaatgcagcagcagaggcaagttcaacaacaacagaaacaggcagctaaacaagctgctgtagacgctaaagcaaaagctaacgaacagaagaaattagcggcagcgcaagcccgcgctttaaaaattcaacagcagcaacagaccaaaaccgcaaaagtaagcgagaatgcgcgattggcagagcgcaaggcattatttgatatcggcagattgcaggggttaaatggtactgaacgttttcaggccatcaaacatgctcaggggttaattgattcctataaaaatcagactattaccttgagagacctcaatcaacaactctcacagtacttgactacacaacgtagtattgccagaaataattcaaaacaagctaaacaatcaggcaaaaaatcaaaatctggctcatctggctggctgagtcgccaggcaagcgcatttatccccggtgagatactcgggccaacagccgccgcttatgctgcccaacaggcatatcagattacggcggggacactggctggagcgattgaacggaaccagggcaggaaaatgattagttcgatggggttaaatcctctggaagctgacgccgccattcaggaaactctaaaacgaactggctttaatatgagttatgaaaaaatttctgatatcgcaaaagatacccaggacaagatcggccaattgagtcttggcgagtggaaaacagataagaaaacaggacaatcaacatattcaggcggtggagaaatgggagattggctccagatgatggttagtcgtggaggctatacccagcagggagcgctaaaaactctccaaaatgtgaaaggtccggttgagttagctgtgttactggaagggttacgtaaaagtgcaaaacttacagattctgaattcactgctttagccgaagtaataaacgacttctcctatctggctaaatcggtagattcttctggtaaaaacgtcatcgatactatgaatctgcttgtaaacagtggtcttgcacttaatagccaacagcagaaatccatcgataacctctcgcagatgtcgattgtattcgataacgccagaaatgcattaggtgatcagtttgcggcatcttttagcaaaggtttagaggatttaggaatcaatacacaaaatctatcttctgaaatgggttcactggtgcctttggtgaaggatttagggacgggaaccgctcagactgttaaaggatttaaagatcttcttgatgttctgtccattatcacagaatggaagaataaacttcttggaactgataagccagaagagcagaatgtttttcaacaaggtgctaattttgttggtgagtcgttattgccaccgggtgttttagatatggcaagtcggattaaaaatatagttagtcctggttcagattcatctgtcgcaacacaggtgcaaagtggtgggtggtataatcaaatgatgccagcaacgccagcgatgcaatatcagcctgttatcccggatttaaaagcggattttaatcttaccgtaaatccgtctcctgaatttggagtgatggtagaggcagtcgccgataagcggatagagtgggcttttgatgatcagaatttccaaattaatcaaagtattttaggggaataa

SEQ ID NO: 195865 - DNA, 1209 bp, Klebsiella oxytoca
atggcaatcaacagaaaaacccagtacctgtaccagttgcgtgagggaacctggatgtttcagatcttcatcccctcgtatctgcgccacctctttagcgggaaaaccctctggcgtcggagtacaggaactcgagatttagcaaaagcaggaatatttcgtgatcacctgctccttgagttcaatcaactcaaagaaaaatatcgagaggacaccagtgatgtaaaactgcgcaatgcactggctgaactgaatgcagaggttaggcagaacgcagaaaaacctcgtttggtcacagcctacaacatccctaccctccgtttcgtctgtaatgagtacgtaaacacctatacaggtaaacgagcatcagccacgataggaagggttcagtgggccacggatcgattcctggagagtataaaacgtgatgatattcgattagatcagattggtcggcggatggtttccctgttcattgaggaacagactcggagcgaacagctggctctctcaacgctgcaaaactggataatatccctctcgagcctctataaatatgcccggaggggttttgatgctctgagtcccgataacccatttcatgggcatggtatagatgggcgtggtacctcaattgaatcctatcagccgtttaccattgagcagatcaaaattttgttggataacgccaggtctgacatcagagatatgatcctcatctctctctttagcgctatgcgtttaaacgaaatcgccagtctgaaacattccgatatcataaccgttgatggtatacgatgtttgcatatcccagcggcgaaatctaaagcgggcattcgtgatataccaatccactcccgtttatatcctattattgattcatatctcaatcagaatcatggtgagtttttatttaaatcttccaataccctcaccaggaaagattcccggcctgggtcattattctccagcaaattttcagtattgaaacggaaatacttacctgatgcaggtgatagacaatgtttccatagtctccgaggaatggctataacacaactcgatagagcgggagtaccagaaaggcgtatagcccaaatcgcaggccatcagaaaggcaaatctgagagtatgaaaacatactcaaaaggggccgatatgcaggagttagcgacctatatcgaaatgattaaatacgaggggctttaa

SEQ ID NO: 195866 - DNA, 1068 bp, Klebsiella oxytoca
gtgggaagaagaagaaaccatgagaggcgcgatttgcctcctaacctctatgtcagaaatgaaggctattacagttatcgcgacccccgaaacggaaaggagtatggtctgggaaggaatcgacgacttgccgtcagtgaggcaatacaggcaaatatcgagttgctcggggatactggccacatccctctcagcgcgcgaataagccaggttgattccgtaacttttcattcatggctggagcgttacgaaaagatcctccaggcccgggggctgaagccaaaaacactcatcgattacgcgagcaagctaaggtctataaaggaaagaatgcaggacaacccaatcgcggaaataaccaccagacaaatagccatgatcctcaacgattatgcagctgaaggaaagaacgcaatggcaaagctgattaggtcgacgttaagcgatatttttagggaggctatagcggaaggtcatattacggttaaccccgtcacggcaacgagaaccgctaaattcgaggtaaaacgcacccgattgatgctggacgaattccgggcaatttaccgggcagcagaggcgctttctccgtgggtaaatctggcgatggatctggctgtacttaccgggcagcgcatcagtgatttatgcgcaatgagctgggaggatgtgcgggaggggtatctttacgtagagcagaaaaaaaccggggccaaactagcgatacctgtagcattgaggcttgatgcgttggatgtgtctctcgaaggaattctggcgaaatgccgcaatctgtccggcgggaaaaacattatttcatcgactgcaggtaaggcactttcacccgcaacagtatcgggtaatttcaggaaagcgcgcgagctgtccgggcttagtttctctggcgagccgccgagctttcatgagctacgaagtctgtcagcacgattgtacgataaacaggctggcgaggactttgcgcagcatcttctggggcataagtcgggtgtcatgacagcaaaatatcgcgatgacaggggaagggagtgggataagatcgaaatatag

SEQ ID NO: 195867 - DNA, 222 bp, Klebsiella oxytoca
atggcccttattactttaaaagaatggaacgatcggcagccgcggccgcgcagccttgaaaccgttcgccgttgggttagagaaagcaaaatttatccggccccgaagaaagatggtgtggagtatttgtttcaggaaacagccattaaggttgaatcggctcaatcatcaacctgtggccttttacggagaatgactagtgggaagaagaagaaaccatga

SEQ ID NO: 195868 - DNA, 579 bp, Klebsiella oxytoca
atgatttttaacgctgagatggtgagggctctgcttgctggccgcaagacgcagacacgccgcccagtgggactcccggtacatgataaaacccttgggtgcgagctggctggcaatgaactggctggagagctggcggcgggaaactatttgaatagcgcatttggtaagccgggtcatcgtatttgggtgcgggagacatggacgcccgaaagcatcgatgctgaggatggtagctattcccctgactatcgcgccacggccaacggccagcctcttgatgggcgatggacacctgcaattcacatgccgcgctgggccagccgcatcacgctggaaattaccgatgtgcgcgttgaacggttgaacagcattagcgagagcgacgctatagccgagggactggagaggtacaacgacgatggaattatctattacggccctttcgggcgaggagattgccgtcccgaggtcgcgtatagagatttatggctgtccatatacggcgccgaaagctggcaggccaatccatgggtttgggtcattgagttcaaacgcgttgaaggcggtgccgcatga

SEQ ID NO: 195869 - DNA, 159 bp, Klebsiella oxytoca
atgcaaaagagatgtgcgtactgccgcaagccgatcgaggaaggcgctgaagtgataatgaccatcctcatcatacacggctcgcagttggcgccacgagaaagaacgtattgctctaagaagtgcggtcagtacgaccaaatggccaacgaggcataa

SEQ ID NO: 195870 - DNA, 192 bp, Klebsiella oxytoca
atgagcacgatgttcgcgctgatgctcaccgtcggtatgttaactggcggaaatcaggatgtgctgatcggtgtttatgacagcgaactggagtgtaagaaagaagctgttgagcaaggtattccggaaaattgttacccgctcaagggcgttttggaagagcaccccgccgcattcacggcgcaaatgtag

SEQ ID NO: 195871 - DNA, 144 bp, Klebsiella oxytoca
atgagtaaaaacggcattcgctctatggtcatttcggtagttatcggccttctgttttgggccgtcgcttacaaaccaatggtaggggtaatttcatggttgattatgctcgccagcccgctcgtcagcaggcttttcgcctga

SEQ ID NO: 195872 - DNA, 882 bp, Klebsiella oxytoca
atgcttaactacgatgaacttttgaaatcagcaccgtcagcaccaagatacgaagctttctgggctcctgtgtatcttgaaccaatgatgggctcaggagaaaagtttactgtagtcatagctgcgtactccaaagatggtgcagtgagggtatgtagcgctattcgccctcacgttgtaaaagctatgtatggaaataagcataatcagtttaattcaattatagatcttcttattgatagccttgaaacccatctaaaatccaagcgtgaatttcaaggatgggttcctccatttatttcagcacaattgggttctgtatcgagagcacaatcaagtgatatgacaggggtgttgaggcaagcaattcaacttacggccagtctttcgtctttagatttcttttcttcagaagatgaacacgatgaaaggtattcctcagaaaacacatggtccaatcaattaaaagctaaaattattagtgagcagccttcgttcgagaaatatttcaatagggaatttaaagtagatgggcaagcaagagctgctaaaattttttatttaagtaacggcattgcaattaacactgatagattaataccaaccaatctttcaacgcatcttgaccgaaataaagcaagaatactggatttattatctgttaaagatcacgatattttcgaaagaagcgtttttgagtttctggtttataggccacaaaatgatgagccaacttacagcaaatctcaatttattaaattgaatgaggctcttcacgcgctagaagaaattggtgacaaacattctataagagttgtgcctgtaactactgttcaacaagcagcattacgcttaatcaaagcagaaaaacaggccgcataa

SEQ ID NO: 195873 - DNA, 729 bp, Klebsiella oxytoca
atgaaagttggagttttgcttgcaggcgcacgtccaataggtgaaggtatcaatggtgctctacgcgggttcgctttagtcgatgaagaagaagtccaagttatagctaaatatctctctgatagagagttactttgcgagattctatgtgcccaaattggccgagaactttcactccccattccagaaccaattctacttttcgataatcagaaaaaaccggtttttggaagcagtgatattggttacccaaacttaaatcactatttcgcgaaaaacactgaaaagagcatagtgatgtctaggttatcaaaatgggtttatctacagtctgcctctttctttgatgaattgatattcaacgcggatagacacccaggaaatcttttatatgatggcacggggtttcatttaattgatcatggactcacattgcatgagtcctacccaccggacacaccacctactgaatgggataaccagctcttctcgcttgccgtaagcctatgcaaaagtgatttagaaaaaacgaaaatatcgaataatggctcggcatggacagataatctcatctctaaaaacatcataagtaataaaagaaatagtaccactggcgataaattagttgttgactctttatgtaatttcttgtctataagacaaaacctgctaaaatcaatgataaatattcgcgtgggcgcgtctcaaacggacttcataaatgcttaa

SEQ ID NO: 195874 - DNA, 234 bp, Klebsiella oxytoca
atgaatgcattagagaaagccataaaaaatgccggtaacgcaaaaaagttggctgaaaaattggacgtctcctcaatgacaattagtcattggaaaaaacgttgtggggggcttgtgcctcagggccgtatctcctctatttttcaggctacaggcgttacacctcacgaacttcgccctgatctttatccgaaccccacagacgggttgccttcacgagagatggggggctga

SEQ ID NO: 195875 - DNA, 138 bp, Klebsiella oxytoca
atgagtaacatggccaccggactgattgcggtttatcagcctgggtctactggctccggtattctgttggaaatgaagtgcgtgcatgatcagccccccatctctcgtgaaggcaacccgtctgtggggttcggataa

SEQ ID NO: 195876 - DNA, 129 bp, Klebsiella oxytoca
atgttgaacgcgccggagcaccagaaattaaaagaggtcagtgaagggattacttcgttgttccggctaatgcctgagcaggcaggcgtgctgatgagcatggtcacttcgatgctggggggcatgtga

SEQ ID NO: 195877 - DNA, 795 bp, Klebsiella oxytoca
atggctaaaaattcgaaagacgcttacggcgccaacggcaaaaccaacgtgctgaaatttgaacccgaaaagctgcacttggtaaccgataaggcccacccgctttacgatgagcgtgttcacctaccgattgacaaagggatggtgctgaatatcaagaagctgggtgttctggagccgatcactgtctggaaagaccccgaaaacgggcttacctgtgtggttgttggccgtcagcgcgttcgccatacgctggaagccaataagctgctgttgaaagaaggtaaaaagccgttgcttgttcctggcgtcgttaagcgcgggtcagcaaaaaaaatgaccgagtacatggtcagtgaaaacgaaattcgacggcctgacacgccgttaggtcgcgctaagaaaatgtccgacgctctggatcgtggttacgacgaggacgatcttgcaatgttgtttggctgtagcgttcagaccgtgcgcgccaccctgtctctgcttgatgccactcaggccgttcgggatgcggtcgaatctggcactgtcaccgtctctcaggcgcgacagctggcatcaatgaagccagaagcacagcgggagaaggtagcagaaatcgaagctgcgaccgctggcactaccggacatgaaaaaacgcgccggcagcgtcaggttctcggcgacacaaagccgcgtctcaaatcccgtaaggaaatcacccaggcacttcaaaccgcaagcggcgaatttgccgcggctttgcggtgggtgcttggagatgaaaacacaccagtttaa

SEQ ID NO: 195878 - DNA, 900 bp, Klebsiella oxytoca
atgcgtgattacggcaaggtgcatacatcattttggattagcgatggaatgcggcgggtttctgatgatgcccggctgcttgcactgtacctgctcactggtcaacacacgaacatgattgggtgtttccggctgcctgatggatatgtttcggaagaccttgcctggactcctgaaagggtttcgaaagggtttgatgaactgtcggcgaacggtttcgcaacgcgtgattcgtcctcgaaatgggttctgatacgtaactttctggcctggaattcggtggagaacccgaaccaggggattgcagctctgcgattgtttgaccaggtaccggacaaatcctcggttaagccagagctggcgcgggtcatggcctcggccatatcccatatcagcatctcgaaactaaagggttccgaaagggttctgcaacccttccttaaccaggaacaggaacaggaacaggaacaggaacaggaacaggaacaggaagaagatagttcggggcatggctacgccacccccccaagcgatcagggtcagagcgaaggcgataaccctgaacagaaaaaaacatacccggatgagttcgaactggtctggtcgatttatccaaagcgtgcagggggaaacagtaagtccgatgcgtacaaggcctggcatgcccgcatcagggatggaacagctgctgaggaaatttactcaggcgtggagcgctacgcggcttttgtgaaatttgagggaaacctgaacacgcagtacgtgaaacaggcgaagacgtttttcggtcccggtatgcatttcagcgaaccgtgggcgattcagcaggcgccaggcacacgagatcccaatcagatttcggagcctgacaaaaccatcccatcgggattcaaggggtag

SEQ ID NO: 195879 - DNA, 750 bp, Klebsiella oxytoca
atgaaaaaaattgttggtaccggcagcgcgctggagcgcctgaaacgaattattccagcgagtgtgcaaccaaaattcggcacagtcgcagaatggcgcgcctggcaagagtccgaagggcggaagcgctgcgaggaactggagcgggaaaaccagaagactcgcgctgagaaaatttttgggcgcgcgggtattcaggatctgcaccgcagctgcacgttcgcaaattaccaggtgaacggcgatggccagcgccgggcgttaacgctggcaaaaagctacgcgcagaacttcggtgacgggtttaccagttttgtattcagtggcaagccgggtaccgggaaaaatcatctggccgcggcgatcggaaattatctgctgcagcgcgggcataccattctggtggtcacgatacctgacctgatgctgcgggttcgggaatgctacgacacgggaaaatcggaagcggaactactggacgacctttgccgggttgatctgctggtgctggacgaagtgggcattcagcgcgatagccggaatgagaaagtcattctgaaccaggtcattgatcgccggctttcgtcgatgcgcccggtaggggtcctgaccaacctgaattatgaatcgctggtggaaaccctcggcgcgcggatcctcgaccgtctccagatggatagcggtatctgggtcaatttcgactgggatagtcaccgcaaaaatgtgcaccatttgcgcgttgtgaagtga

SEQ ID NO: 195880 - DNA, 591 bp, Klebsiella oxytoca
atgactagaaacttaactgaaaaacgtatcgctgaaattctcgctcgcgcagaagtttgcgacgactctgttttaacagattacgctgatatagcgtcagcaatgcgcgagctacaggaacgccgcaaggctgagcaggacagggacccactagcctataccgatgagcgaaacataggctatatcaaccagggtagagatacagcgcatctgtggggcgagcagaactcagagccagcagatgtcgcgctctaccgccacgcgcagccagcgcgggtagagaccgaggatttatacaaactcgctaatcacatagccagcagcaaaagcgggctgcctgatgaatggctggactgggccaaggaactggaaactgatattcgccgcgccgccgtgcttcaggtaggcaactctctggtaattccggattctatccgcgacgctctgctcaaatcactggccgcgatggaattcatgggcgatacgctgaataacctcgacgctgtttgtaccgaagatgttggatttgtagccccagcattcgacgcggttcgtagtgtgctcgcagccgcccagcaggaggtgaaatag

SEQ ID NO: 195881 - DNA, 207 bp, Klebsiella oxytoca
atgactatgaagaaatcatggttcgcacataccgaatgcacaacagctcaggcagacgagctggtggctaaataccggcagcgggggatcaaggttgaacgcagtttaaacccagactttctaacttggaccgtcagcgcgcagctggtggaggacaagaaccctccgcgcccggattcccgctggcgtaatcggatgtgggggtga

SEQ ID NO: 195882 - DNA, 123 bp, Klebsiella oxytoca
atgaccagagaagagatcgcccgctaccaggaagaaagtgttaagcgcgccagcatgccaccagtagcaaagcacaaccagagccagaccaaaaccaaacagccaaagagggccgcagcgtga

SEQ ID NO: 195883 - DNA, 135 bp, Klebsiella oxytoca
atgggcggccctgttagcgattgcgggggtaggaatcctacgctctttaacctgcccggaatgggttatgagcccgtcagacagtgggcctgtatgaatggccgccagatggatttacgacaaaacatagagtga

SEQ ID NO: 195884 - DNA, 396 bp, Klebsiella oxytoca
atgtccgcagaacctatttcgggtaccgcagttgcgtcggcggggctagctggtgccagtgtgtttggcctggcaacaggcattgattacggcgtcgtttttggtgcctttgctggttccgttttttatgtggtaaccgcggcagacattagccgaatcaggctggctggatatttcctgacatcgtttatcgtgggcgtgcttggtgccgggcttgcgggttcaaagctgaattcactaacccactacgataaaccgctggatgcactgggtgctgttattttttctgcattatgcataaaggtgctcaccttcctcgacagtcaggatttgaaaggcctgtttggaatactttcccgaatatggggaggaggttcaaatggtaatagcaaatga

SEQ ID NO: 195885 - DNA, 333 bp, Klebsiella oxytoca
atggtaatagcaaatgatccggtaatgatgctcggccagatggtcaacgctgttctgattagtgataccacggcaaaggtgaattcgatcctctgcctgctgataatcggagcgttaatgttctatcagcgtcgaggcgcaagacaccggccagcaatatcgtttctggcttacctgacaattctggtgtacgccaccatccccttaaaactaatttttggtctgtaccctcagtcacactggctggtggtgctggcaaacattctcatttgcgccgccgtgctgtgggcacggggtaacgtggcgcgcctggtcgatacactgaggcactaa

SEQ ID NO: 195886 - DNA, 630 bp, Klebsiella oxytoca
atgaatcaatcacaatttcagctggcggctggtatcagcgccgggttagctgcgcgctggtatccgcatatcacagccgcgatgaaagaattcggcattacggcgcctgtcgaccaggcgatgtttattgctcaatgcggccacgaaagcacggggttcacccaactggtggaaagtttcaactatagcgttggtggcctggcatatttcgtgaaggtaaagcggctcacgccggaccaggccaatatgctcggccgaaaatcttacgagaagtcgctaccgatcgaacgtcaacgcgctatcgcaaatctcgtgtacagcaagcggttcggcaataagacagctggcgatggatggaagtaccgggggcgcggaattatcgggatcaccttcctggataactacatgaaatgcggtactgcgctgaaactggatttagtcagcaaccctgagttgctggagaaggacattaacgcggctcgcagcgcagcctggttttatgtgtctggcggatgtctcaagtatcccggtgacctggttcgcgtcaccaagattatcaacggcgggtcaaacggcattgatgaccggaacacccgcttcctgaaagcaaaatcggtactggtgggctga

SEQ ID NO: 195887 - DNA, 276 bp, Klebsiella oxytoca
atgggaatcgaaactattgccgggctggtgtttgtcctgctgggcgttatcgctagcgcgttcggtattggtcacgcacgtgggaccagcaaggcagagtccgaagccgaacaacagcgcaccgaagagaacgccgccgccaccgtcgccgcggcagaacgccgggcagatgcaacgaaagggtccagcgatgtacagcaaactgttagccatatgcctgatgacgatgttgatcgcgagctgcgcgaaaaatttacccgccccggtggtggttga

SEQ ID NO: 195888 - DNA, 201 bp, Klebsiella oxytoca
atgacgatgttgatcgcgagctgcgcgaaaaatttacccgccccggtggtggttgataccgcgtgcaactgggtgcggatcatctacctgaccgaccacgatatcgacgtgctggacagacaaacgaagcgcgacattctggcgcacaacaaatcagtgctggcaaactgcccaaaaccaaccgaaaaggctacgaaatga

SEQ ID NO: 195889 - DNA, 207 bp, Klebsiella oxytoca
atgagtgaagcaaaaccgcagtatggcagcaccgtaaagggctatcgcaccctaactccagctgacatcgagatgatgaatgaggtcaaggctgtaagccgtgagttcctcaaaaagctggattttcttgaatttgtacatgaaagcgaaccggatccagaccctcaaactctgcgctggctggcaatcgcccgcaccgatatgtaa

SEQ ID NO: 195890 - DNA, 264 bp, Klebsiella oxytoca
atgagctatcgagctactggcacaatctacaaaacgtacgtacttaagagtgaaagcggaaagcagtttaaatatgagattcttcagtggaatgacggatcatcaattacggccacaatctcatgtctggatgctttaccggggcaggtttcatcttgggtggttgttaaccctgaattgtatcttaatattcaaaatcaccatccagaatatgcgctggacgagatacgagagcatttttcagaaaattacgctcaagagtga

SEQ ID NO: 195891 - DNA, 243 bp, Klebsiella oxytoca
atgccagaaatcactaccgaacagaccaaccagttggagctgcttgccacgctgggttacgacactgcagcaacgaaggtggctgtagcatttatccagaacgacccgttcaaacatcgcctgttcatccagcagtacagccgtgtgtttggtgaagctgaacttgtagcccgagcaactaaagcggtgcaggaatctgtcgaagcactagccgtcattagcacctcagctcttgtcgagtaa

SEQ ID NO: 195892 - DNA, 567 bp, Klebsiella oxytoca
atgacgatttactacactggcgaccgcaggggtcacttgagccctggaatgacacttgatctaaaaaacccaccgaatgaaatcactcagtgcactcaaataacaaatctgtgttcttctggtgaaatgaatgttttctttcagaacaatttccccaatggaatatctagccatggtgttgaataccttctgagaaacaacaattatctttacgaccagaatagcaaccccctttcttatacaaatctaagctcatccattgaagttatttacgaatttgtcaggcaaacaaaattccctaatttaccttcaaggtttacttgtgcttttgcttgcgaaaccaagactcaacctaggatttttttcaacaacccgacacttcccgtttacgaaatctcaggtaactcacgaacatttaaagctgacatgacactattaaaaatagggcctaatcatatttcaacacttgttatggctgaaaaatattggtcaggcctaattgtcgatcctgcaacagtagaaatattgattgaatgtccagctttaataggtagcagagttttatag

SEQ ID NO: 195893 - DNA, 240 bp, Klebsiella oxytoca
atgaagatttttttaaggggcgggccaagagatggtgagtccgtgcccgctcacaccgatgactacggtgtaccattcgaacgagttcaattccctcagcctgtttctgatgcatccccaatgtttgacaatggttttgatgcctatgatctcgaacagggtatcctggtatatacgctcgaaaagatagtaatagacggaaaactgcatcactacgaatatcactatcaaggtcgttaa

SEQ ID NO: 195894 - DNA, 234 bp, Klebsiella oxytoca
atgcaaaatcctgatgtgcattatgccggtgatgggctcggccctcgcgatgtgtttgtgaatggaaacccgatcaattatgtcgtttacgcgaacctggtaaagggggttgttgagtttgcacctcatccattgcgggctaaacgaaatggtgaaatctatacccgtaggcttcgcggttctgtgatcgttaaattccgtcatagcggtggtgaatgcgatgggtatacgtga

SEQ ID NO: 195895 - DNA, 384 bp, Klebsiella oxytoca
atgggtatacgtgatgagttgcagggagaagtcgccgcagcattcgataccgacctgcaggatgcggttaaggcgttcaccggcagttacaccgttcgcggtgcatgggatccggtaacggaaaccggtagcgaaacggtggtggcctattcagggcgcggtgttctggcgcggtacaaactccgccgtatcgatggcgttaacattcttcacggtgaccttaaattaaccgccctggttaacgaggtgaacgataagccggcagtcgggcatttcatcatggcaccggacccgattaccaaggcgctacagcgctatgaagttataacggccgctgccgattccgccgcggctgcgtactccattcaactgcggagggcgtga

SEQ ID NO: 195896 - DNA, 483 bp, Klebsiella oxytoca
atgctgattatcaaccagaaaattgacctcaacggcgagcgctggttttttccatacaaaaagcctgagggcagcaaaaagaaatacacccctgaggaagagtcgttgtttaaactccgcttactggtgggcagtagcgagaatcctcaatatcgatcacttaatgcgctggtccgccgccatattgataaaatggatgctggttatcaggtgggtaccacggagtttgacctcgcggccgtaagcgacatcgattcagttgatgatctgctaatcgataactgtgcccgctatttgctgaaagggtgggaaggcgtcggcgagctggtggatggtgcggaggttgcaatcgaatatacaccggaacttggggctttaatgctgaaacagcacccggcactttactggcagatcatggcagaggctgcaaatattgctcagggtaaagagcagcagactcaggagaccgtgggaaagccttag

SEQ ID NO: 195897 - DNA, 684 bp, Klebsiella oxytoca
atgaaaaaaataatggcagtggcattaggggcggtgcttttatctgggtgtacaacgccggcccgcaactatgtacctcaaactaagcaaatcagtatcccgccgttaaacaccgtaacaactacctatgttggtgaggatatggttaggcagggagttgatgctagcatcgatgcaattcatttcaatcaggctgtggttataggctcaatcggtgtttatacaatcccggcaggggactacgttaagattggagaggattcaaaatccgaatttttctccaatgtagaaagaacatctggtgcagtagttccaaaccgtttcatggttaatgatcccacacaaagcatacagctcatgaagaatggcgaaatttgtattgtcacgatctacggtgggaccaagtgcgatacaggtaagtcatttacgaaagtaaaattccagactgagcaacaatcctccttccagcaaacccttatctacaacggaaaggtgggtaataaaattaatattggttatagagagttccaaggggggatggctcgggccgctttctctaatgaagtcgagtacgatctttctgagtccaaaacgatacgttataagggtgcgatactggacgtaatggatgccaataatcaatcaattatctttaaactgacgaaaaactttaatacaaattag

SEQ ID NO: 195898 - DNA, 468 bp, Klebsiella oxytoca
gtgaaaaaggttttggtggtcgggcttagtttaatggcattgttgggctgtgatgacaagtttcaaatatcaaagttgcttccccctaaagatccgctatctattgctgagatgatagccaccggtcaagaggaaatggcttccgaatgtaaaaaaggtgatgtttcttttaactgcgaatttcttactggcgatttgaccgggacaggaaaatggcatcataccaagctgtacctgcataatagtgggcgggcagatatgattattgacggtaatgcttactatcaaagtgatatcagcagtaacacctttgccggccaggagaccacttctttcacgatgaaaggcgtaggtggagagcatggcaaagtaaatgtcgtgagatccaacgaaggaaaatccttaaattttgaagcctataacagagatgataaacggtttgttatgggaggggttaagttgcagtag

SEQ ID NO: 195899 - DNA, 3111 bp, Klebsiella oxytoca
atgacagaacaaacatcccgtctggctattattatcgacagctcaggggctgagaaaaaagcagacagcctcgcggttgcgctcgataagatgacccaatccggggatcaggctgtcgccaccatcaccaaagtatcccgagcaactgatgaagaaaaggaagctcttaataagctgcgtgccgctattgatcctatcggcgccgctatcaataccgtcggtcgtcgttttagcgagctaaaaaaatactttgataaggggctaattgacgaagaagagtttcgctcattatccaaaatgctgaacgacaccaccgaggaattaagcggtgtagcccaagcccagcgcgaagcagaaaaggcaggaaaattagcagccgcacagcaggaggctcaggcgcaggcattccagcgcatgattgaccgcattgacccgctgacagcggctcttcgtaatttagatcaacagcaaagtgacctgaacgcggcccttgagtctgggaaaataaatccttcgcaatacgatacctacagtaaaaaaatacaggagactcgccgggaggtaaacggggctgctcaggccgaacgtgatgcagctaaagcccacgatgaacaggtcgcggcattgcgccggcttgaggctcagattgatcctgtaggagaagcattcaggcgtcttaacgaacagcaacgacaattggatagtgctaaagcatcagggatgttgtcaccactggcatacgatcgcctgaacagcaaactttcggagacccgtgagggcttggagaaaactcagacacagctgggtagaacaagtcaatccgccgctcagacagccaacgctatgcgcatgatccccgctcagatgacagatatcgttgtcggcctgtctaccggccaaagcccgttcatggtgctcatgcaacaaggtggccagttgaaagatatgttcggcggcattggaccagcgattaagggagtaaccacttacgttatggggctggttaacccatatagtgtagccgccgccgcagttggtttactcacttatgccgtctaccagaaccgacaggaaattgttgctgcgacaaaaatcgcaacaacgtcccttggcgctaacggtgatgcggccgaacgactggcgctcaatatggtcgctatatctgacaaagcgggtcaggcgattgatgacgtcggcaacatgtttatcactacgaatgacggcgccagtgaggcaataaataaattaatcgatgtcggttacagttacgacgaagcgcggcagaaagttgcccaatataaggactcggccaatttcacggcactgaatactgatatcgaccagcatcgccgggagatcctgaaaataggtgactcgtggacagctgcggcgattaaggtcaaaaactattacaccgcagcagataagggcaggcaaaacgtagcgcttggcggcgctattgaccccaccatgcgattcatcggccaagccattgatctgcaatccacaatgaatacccttaccatagaagggaataaggcagttgctgaatcagttgactggataaataaggaatatttggcaactgacagggtggccggcgctgaagcccgcttaaaagaagcaagggcacaagccagaaaaattactttttcaggaaataaagaggcgattgaacaggctaatgcgttgattgctgcgcgcgaaaaggaacttgagcaggctaaaaaaggccagcaaccaaaaacgccaaagggtaaaacctactcagatgatgctgcaacccgactccttgaccagataaaccagcagactgccgctatgcagtcgcagctagacgccggcgacaagctgaacagcgcgacgcaggcacgggttaagttcgaacagcagatcgctgacctcaaatctaaaacgcagctcacagccgaccagaagtcgatcctttcccgttctgatgaaattttgcaggcctataagcagcaggaggctctgcaaaactctgtcaagacgctggacgactaccggaaaatgcaggagcaggttaagtctaaggatgaacagactaacgatctgcttaaaacccgccttgagcttctggagaaggcaaaagcaaccgggcggctgaagcccggtgaatacgaaaagacccgcgcagatatctatcaaaacaccgataaccaactgccatctacagtgcgtagcgttgtgggcaatgccacaccgaccggcgggcaactgtctggcacattcggagggatgcaacagcaatatagccaactcgatcaggcccaaaaagatttggacgcctggcttgctcgtcaggaagaggcatatgcaaaggcaggtgtcataacggccgagggcgaggccaagatgcaaaaaactcgtgctgatgctgcaaatgctgctgcggttatagaagtccagaaaaacgccatcattaccagcactacgcaaagcatgatggatagcgggttgagtattctggctaatggttttggtgagcaatctggaatctacaaagctgctttcgcagccagtaaagcctatgccattgcacaatctatggtggcaatcaatgcgggtatcgctcaagccgcaagtctaccttttccgtcaaatttgatggctatggcaaccgtttccttggagaccgccaatatagtctcaaacatcaaagccgttgccgatacaggctttgctgccggtggctataccggtcccggtggtaaatatcagcctgctggtgtcgttcataagggggaatatatctttgaccaggcatccacgaaccgcatcggggtttcaaaccttgaagcgctacgaaacgggcaaccgcttgatgcaacgttgggccgctctggatttgggacgggagtacagaacgttagcagcgacaacagcaggcgaacctccgtacacgcacctattaatcaggagtttcatctccagggtattaccccggagcaattgaacgcgacactcaaccagaacaatcgacagctttccaggcagttaaaaggcgaactcacaaaggaggttatgacaccacaagggtcttttggcaacgccctcaaaggaaactatacccgacacggtccaaggtaa

SEQ ID NO: 195900 - DNA, 336 bp, Klebsiella oxytoca
atggaaacgttgttaatatttacatttaaagacttaatagcttttgcaattcctgtttttgttggggggcttatcttcaatagaaggcgtaaactaaaggaagtccgagtgagcttttcattcctttggatttttttgatagtgggatcctttttgggaatatacgatgatatttacacaacttattcctacaggcataatcacttatataacaatgataaatttactaccatctttaattatgatgtcgctaatattgttttttttgtgattttaatttttgtttctattgtactcttgcttcaagaactgcgtttaaaaaaacagtctaattga

SEQ ID NO: 195901 - DNA, 474 bp, Klebsiella oxytoca
atggctaacatctactatccacatgacagccttcctatgccgcttcaggatggttacggttttcagccagtaagcccgttaaagcgaacccagctaacgactgggcgcgcgcgccagcgtcgggcgtatacctcaacacctaccgaagcgagtgtcgcatggttcatggagaccgatgctcaggggctggcatttgaatcctggtaccgggatacgctttccgatggcgctgcctggttcatgatgaaactgcaaactcccgcaggggttaaattttacaaatgccgatttacggatatctatcaggggccagtgctggcacctccgctttcctggcggtattcagcgacgctggagctgtgggaacgtccccttattccggctccgtgggggaattaccctgagtggattattggcagctcgttactcgatatcgcgcttaataaggagtggcctaaacatgacgattcttaa

SEQ ID NO: 195902 - DNA, 483 bp, Klebsiella oxytoca
atgacgattcttaatcggctttatgccagtagtggctctgaggtcatcattgaaaccctacaaattaatattggttctacagtccattttttctgtaagggttatgaggatataacagcaacggttgaaaatggtgatgtgcttaccttttccgctgcgggcattgatatcgccctaccagctagaaatagtgacggcacccaggatttgcagtttgctattagcaatatcgatggcgaggtgagtactgctattcgcaaagctctcgaaaatcttgaaatcggctcgctgacatatcggcagtatgtttccactgacctgagcgcgccggcgactgtgccatacaccctggcgatcaaatcgggctcttggacggcaatacaggcgcaaatcaccgccggctatatgaatgttctcgataccgcatggccccgtttccgctacacgctcaatgaattccccggtttacgctacatgagttga

SEQ ID NO: 195903 - DNA, 381 bp, Klebsiella oxytoca
atgttcaaccctgacaaataccgttcagtcacctggctgaagggcggcagagtgtacccgcagctcgactgctttggcatcgtgaatgatatccggcaggatctcggattacccgaatggccagatttttccggtgtgacgaaagatggtggtggcctcgaccgcgaggcgagaaaactgatgcttcgcctcgagcgctgcgaaccttgcgagggtgccggggtggcttgttactcaggctccatcgtgacccacgtaggcgttgtggtgatgctggacaatcagctgcaggtcgccgaatgcaatcccggttcaaacgtaacgtttatacccgtatggcgttttaagcgccggtttatcaaggtggagttctggcgatga

SEQ ID NO: 195904 - DNA, 3081 bp, Klebsiella oxytoca
atgacgatccgcatttttccttcccggctgccgggtgagccgctggagaaacacgagcatggtacgctgactttgcacgactggatgttgaaaaacgtcaaggactacgcggaggcaaccaaacatccgattgccgttgaattaaatggtaagcctctgcctctaaatgagtggcccttgtgcctgttaaagccagaaagcgacattaaaatgttccccgtcccctacggtactggtcttgaaatagccgcctgggccgccatcgctgttgcggtcgcttcagcggcctattcaatctacatgatgtccacgatggataaagggggcggttattcatctacaaatggccttggactcgatttaaacccggcaaaagcaaataccgcaaaacttggcgatgcgatccgcgagctgtttggccgctatcgcatttacccagattacgtggtgcagccggttacacgctttgacccaaatgacccgactcgcatgatcgttgaaatgttggtttgcctgggggtgggtaatatcgcctttacaaacggcgatattcgcgttgggtcgagccctgcaacctcgcttggcgccaaattttcctataacgttttctcgcctggtgcggacgtatccggcgatcatcgtagcgaaaactggtttaactccaccgaagttggcggcacgtccagcggtagcgggctagatctggcccaaacgtcgcctgactcgtctgacattgacgctgacagcatgactgtatcagggcccctggtgtcgttcagcggcctgatcgacgacaatccaccgtcaggtggaggcatagggactctccctgaaataaacacgcttccggattcatgggttcctggggcgatagtgaccctcaacgccccggctaattatctggtttcgacatcttcgggttatagcgttatcgccagcgatacgttagccgaacttgaaccgtattccggcatgccggttactttggctatcaatggtgctgattacgatctgtttatcgcagcgtacacgccccatcaaaatgcggtccctggtgttggtggaacggcggcaagtttacggggaaacgctgcgccgaccacgtatgatttttctgtgagcggggagacgttcgatcttcactggcagggaatcacttataccatctcgctggtagcaaactatggcacgatgccagacatgctggttgcgattaacggcggcctgacgggctcgggtttgattgcgcatgatgatgccggggtagtgcgtatcgtagaaatttccagtccgtggaatggcggaagcatcacgtcctcagcactgccgatttccgtttttggtggtgcgccggtattcactgctggaacggcatctaccggcggcagtcctgcgataacagctaacgtgacgctggcgtatggcagtgcctcgggtgaggcgttctcaggcatccctgagggcacacagcgaatgtcactggcgcaccagggcggtgaataccagataattgaggtagacggcgtctccgcttcggtaacccgtcttgttggcggtgttgttgattcatcatggccgggattctcaactcgcacgatgattgattacagcgcaacagggatcagcgataacgacagctggatgggaccgtttttagcgtgccctgacaatgaagtcgttaacgcattcgaggtgaatttctcgtttccgtcaggtatctgcggtttcgacagcaaaggcaaaaagcgcattcgacactgcgaatgggaaattcagtaccgggtttatggttcaggggctggatggacgagcaaacagggggtttatgccctgcagaacgtcaacgggttggggttcactgaacggtttgaccttgaagcacctggcctcgttgaggtccgttgccgccggcggaatgagcagggttcgaataacgccagggattcgatgttctggcacgccctgagagggcggttgctggcccggccatcatcctatgctggcgtgatgctgatggcggccacggttgaaaccggcggcgtactggcggcacagtctgacaggcgcgtcagtgtagttggcacgcgaatttatgaaactggcgcagcccgcagtatttccggcgcgctgtatcacgtcgggaattcgctggggctggcaatggatgccgaggcgatcgatgtgctggaatcaacctactggacgcctggcagcgagtattttgattacgccaccggagacagtatttcttcgctcgagatgctgcagaaaatcactaatgcgggaaaatcatattttctgcttagcgacgggctggcatcggttggccgggaagggatcaaaaactggtccggtattatcagccctcatgaaatgacggaggagttgcaaaccacgttctctgcaccgtcggcggatgattacgatggtgttgacgtgacttacatcaatggcacctcgtgggcagaggaaacggtgcaatgccggacaccggacaacccgacaccgatgaaagtagagaaatatacgctcgacggcgttttggacccggaccgtgcttatcgaattggcatgcgtcgcctgatgaagtacctgcatcagcgacttggtcacacaaccagcacggagcttgatgctctcgtttatcagttcggcgatcgcatattgctcaccgatgatattcctggcaataaaacggtgagctctcttgtcgtcgatatgactaccgatggcggacagaccacctttttagtgacagagtcgctcgactggtcgtttgaaaacccgcgggcgattttacgttaccagaatggttgtgcctctgctttgctggtggccacgcgggtaggggattacgagcttacagttccgtggcagccggcctttgacgatatcctcctggacgatccgtgcatcgaaccaccgagactgattttctgtagctccacgcgcagtttttacgacgctatttttgacgaaataggatcgccgtcagacggcacctgcgcgataactgctcgccaatattccgagattttctatcagtacgataacgccacctacttcggcgacgtctcttaa

SEQ ID NO: 195905 - DNA, 2196 bp, Klebsiella oxytoca
atggctgcagatgacctgaatccgccgctgggcacgacgacgccagaaatcttcctggataacgtgaaacgcgccgacaggctggtaaacggcccggaagccaccattctcgatcgcggcggcgagccactggatacctggcgccagatgatggcgaaaaatgatgaggtacgccgcaatatcattccgctggataaacagcgtaaagacctggccgaggcccaggccgatatcgcgaatattccgccgggttcgactatctacgtccgtagtccagacggcagctcgctcgctatcgagtacatgaatgttagtggtgtgctgacgcccactggccgccggttcccgtctcaagaatttgttgatgcggtaaatgcgcaggttaccgagttggcgagcaacttttttcagtcaattgccggcgatgcggtgatgttagatgtggttgatgacgactggttttcatttttccgcgtgctgtccagcggcgcatttggcgcgattaactgcatgctgtcacccgacggtatccatgttcgagacctgacgattacacatgaggggggaacgccaggcctgagttatcaggacccggacggattttttgtcaggcttatcgggcccgacggaaaagtggcacccaactctcttagcggagacggagaatttaccacggaggctggcgattttggatggctgacgattgaggatgatgaggggttttatcggatactggccgatgccaacggcgagccaaccggagcaggcaacggcgtcggtaatgttgatgatggctttaatctcatcgctgccgacgcacaaaacaaggcatattcccagagcgttagcctccgttacaacgccgccatacagcgcctggtcagtggcctgaatcatctggtcatctatagccagagtctggggacgcagcaggaggggtggcccgcgctgagtaaaaccccaattgagggatacgataacctgatgctgggtgattcaattcggccaaccagccgcactaatcccgagtttatccctctggggggcgccacgctcaaacctctacgcgcggtcgttcagtctggtgacggctctactctgctaactgacgcacaggttgccatgctgaatcagggggccggaaatgagggcgagggaggggtagccattgccaacggactgcgccgtttgtggctgcaacgttatgggcttgagcgtgacccgtcccgccggtttgtgctctccagtacaggtgtaaacggccgtagtattgagcagttatccaaaggcgctgttccggaactgtatcagcgtccgctgcaggcggtgcagcaggttaaagctgcggcgaaccagctcggcgtttcctattccctcggagcgattatctggattcagggtgaatggaattacaccaaaactaacggttcaaacgacaaggaattgtataaacagaatctggaaaaactctataacgatatggtcgccgatatggcggccggggttgccgggcagaaatcaccgcccgcgatttttatgtatcagacaggcgatatttttacccgtgatgacgcgtatttatcgatagggatggcgcaatgggagttttgccaggagcacgaaaacgcgtatttagttacacctgcgtattcattccccgacaaaggagggcatctggggccgaatggttaccgctggatggacatgcagttcgccaaggtcatgcatcgggtattaaaccagggtgagggctgggagccgttggggccaattaaaataaacgccgttgggcgagatgtttacgtgcattaccacgttcccgcaccgccgctaacattccgcccaacgtataaacgcaatgtgtccacgatgtacgacgaccggggattccgcgtgacggataacgccggaacggtagcaataacgggtgtggaaattgttgcagacaccattatcaaaatcacgctgacgcgtgaactcgtcgctggcgcacggctttggtatggcgatctgacaactcataacgggaacggcaacgtgtttgacagcgacagttttaactcgctggataatttcatttatcaggctggcacaggacagtacgacagcgaaaatattcccgaactggtcgggaaaccgtacccattaaataacgcatcagtacaattttgtctttctattccatacggagaataa

SEQ ID NO: 195906 - DNA, 726 bp, Klebsiella oxytoca
atggttatgactattaaatccagtgttccccaaaatattattcagaatccggatgggtggaatccgccatttacgacggctggactgttatatgctggcctttacgggcgaggtaatctggcgaaaaactttgcgccgggtggtgcaggtgccgtcgtaaccggtgctcctgtggtaagcaatcattttgccactttcgatattaataattttattgataccggagtacatgtaacaaaggaaacgacactggtagcaatttttaaacgtgttaacccaacaaaacggcagtattttatttctacctatcgtggatcaaccgatgcggggcgtagcctggttatagacaacggaaacccgaacatggcgatttattcgcattacaaagatgctgctgacacctccacggtattattcgcttcttcaaaaatggatattacggacggaagccctgcgtttgtgtacggacgagacacgggtaaaacgctgaccataaaggacgtgaccagtcaaaagggatctaatgtgacagctacgggaacgagtgaatcgtttgttaacccagcactgtcatatctgattggtcgcagcataggcagcgaggtaccgcaagcttcttcaattgcggccgcgctgattttcggccgtgcattatcggatggggaaattgcggcggtttatgcctattttcagggctatttttcgcgtcggggaattgtgatctga

SEQ ID NO: 195907 - DNA, 699 bp, Klebsiella oxytoca
atgataattgtttgtgatggtgtcgtgaatgcgggagatctggagttggccgagccggaaatgatgctgaacgatgccgcgagtgttgcaacctatgggctacaggacaaatacgattccagcggaaacggatatgacctgattaccaataatgattttactttactcgggatgaacactgttgctgataattctcacggcgctaataccggaattattgaaacagacgagatgacatttgctctatgtatcaatatgaatcagccgttagtatcgggtcgtctgttctctaatatgtttcccggcgtagctccgtttggcgggctgcaactgcgaatcgaggcggcgggcacactcatcttgcaggtatctaccgggaacatagcggaatcaacagttacgctaagtcatggcggcgcggtggggggatggacacgtttcactgcttctgtgtcaaatacagaattggctatgactcgagcaagcggtgaaaagcgttcttctgttattactgtgcgtaaaaaatctacgctacctcttattctcaatggcggtcagagccaacagcagaacatgggactgcctgggataatggggattttagctgtttataatcgcgttttgacagatgatgaacaaaccggcgtgagggacgctatgaagtctgtaatggcgatgcggggcgttatcgtgagttga

SEQ ID NO: 195908 - DNA, 1767 bp, Klebsiella oxytoca
atggcctttactcccccgctcgggaacacctctccggaggtgctgctcgataatgccacgcgtctggataaactactgaatggacagccggtcatcgttcctgatcgggacggtaatcagctttattcgtggcgcggcattcaccagaatctggtcccgctgagccgccaatacatgacacctgaagaggcccagaatgatatcgcgaacattctgcagggaagcacgacgtatatccgtagccctgacaatgattatctggcctatgaggtaatgaatgtaaacggaacacttcagccgacaggccgtaagcaggcctctcaggaatttattgagctggttcataacttcgcacgatcgaccgatatgagaacgcgcggaatcgaaacagttagccgtaaaaagagaccctttgaccttcttaccagacaggggaaacggttattttcaataaacgaaaatggggaaaaagagttaccgggtaagtcttttgcggactttctgaatatcatgcggtcactgtttgtcggaacctcctcaatccgccgcggacgtgctggttatctatttaatctcgctattggtgggttcagggttatggccgtaagggatgatgggaatgcaacgcttgaatatcgcggaatcccgctggagacgcacctcggattattgcagaacacattcggcggctttggtgactctctcactgataatggcattgatgctggcgcatataccgccaaatcgtggcaaatgtgggcgtcattgttcagtgacgggcagttgcagtatgttggccagtgggccaccggcggctttacgactgctgatatgattcgcgtccacttacaaccggccatagaggcaaaacccagattcatcactttcctgggcggtcgaaatgacgtgatcaagaaggacagcgccgggaattttcaattcaccattgcaacagttacaaacaatatacgtttcattctgacccagttccgtaaacacgggatcatcccggtcgtctgtagcatggcggcacagaacaacagcgatccggagctaaaatcccgcgaaaacgctatcaatgcgtttttgcgggcgtatgccatccagcagggctttccctttgttgatatgcggtcggcgaccgctgacccgttaaccgacggctggcgggacggttataacggcacgctgtcgaacggttcaccggacccttcgcacccaacggcactgggggccttccacatgggtaaagccctcgctgccgggcttgtcccgtacacgcagccggtttatccgcagctcgcaattgctaacccggtaacggctgacggtccgaacgcggtcattaatccgttatttctggataccgcagacggtaagcccacgggctggactgtgacaggaggcagcgtggaaattagtactgatccggcagttgtgggtaacgtactgacggtcacagggacagggagtgtaagtgcccgtgtgactcaaaaaatcgcggtcacaccaggtgaaaagcgcacgttcagttgcagggtgaaatttgaggtcactcagagctcggcgaccgcctgctaccttgaggctaatggtgcgaacctcgtcgggctgcgtccgtggaatatgtcaacagacgggttcaggacgtttagttatgacgtggttatccctgaaggggtcacagaggtgatattaaccatcgtcgcgaatgcggcaaaaaccagtgtaggccagatgggtttattgaagcgggaggcggtatga

SEQ ID NO: 195909 - DNA, 273 bp, Klebsiella oxytoca
atgaaaagcaggaaagatgtttttattgaaggggatatcattgccagccgtgttcttggagacgtaaaccaacctttctgcatccatagagtcaggttcagcaatgataaatatgcgattattcgggcagcaacggggttatgcttccataccgggggagtaattgaacggcatgataatgcatggttttacaaccaagttaaaattcgtttgttcggctttgaataccttggtgaaaaggagtccatcagacaattctttgaaaactcttga

SEQ ID NO: 195910 - DNA, 8583 bp, Klebsiella oxytoca
atgaaaatgaatccccgggcatggtttagccgctcccgtatgtctacgaaagcccctgaactggtgccgtctcctgccaacgactcaacaagcgaaaatagcttgcgctctgagctgttttcgacgcctcagatggaacgttacggccagaaactggcgcatactcataagttgtcgccggacaagctgccttactatcttcttaaacggctgggggataatgaggctgcgatcacgcaaaactgttatgcgctcaatgccgggaaaaaatcgagcatcatgcccgcgggtgagtggctgcttgataattactacctgattgaggaacaaatccgcattgtccgccagcacctgccaaaaagctttggcaaaggcctcccgtccctggcatcgcctcaccactgcccgcgcatttacgatattgcatctgaagctattgcccacggagacgggcgctgggatgtggccagcctgaccagctatattgcggcctatcaacaggtgacgccgctgacgttaggcgaggtctgggcgctaccgggcatgctgcgtctgtctctaatcgaaaatctgcgtcgcgtcagtatggaagtagtaaaagcccagcaagagcgcagcctggcagatacatggattacgcggattttcgaatgtgccgagaatactccggcagacttaatcatggtggtcgccgacatggcgcgcgcgcggccgccgctgagcagtgcgtttgtcgcagaactggtacgccgcctgcaggggcgcggcaatgcgctggctctgccgctgacctgggtggaccagcgtcttgctgaacagggcgtgacaaccgaggttctcattcaccgcttcaatcaacagcttgcggccagccagctttccgtcagcaacagcatcgcgggcttgcgtttgctgagcgaaacgaactgggctgatttcgccgaggcaatcagcgtcgtagaacagacattgcgtctcgatcctgccggcacctattcccgtatgcactttgatacccgggatcattaccgccacgtcatcgagatcctggccagagacagtcgtttcagcgagtcagaggtagccagccgggtactggccctttctgtggaaaatgcgcccggcacgccggggcatcatattggttattatctggccggtggaggccgcgagctgctggaagtacagctttccgcagatacctcagggctgatacgcctgcggcatagtttcaacaaaatccccttgttgtcatggcttggcagcctgagcctgctgacgacagcggtgacggccggagttttgcacgaaaccgcgcagcagggaatgggctggatgctgatacttttggcgttgccgcttattttggcggtcagtcagttaatgaacgatttgttgagcgaagcaaccactcgctttcgaataccccgaccgctgccgcgaatggatttttccgctggaattccggctgattgcgcgaccctggtagtggtcccttgtatgctgacaagtcacgaaagcatcagcaagctcctcaccagcctggaagtgtgctggctgggtaatcagaacgaaaacctccgcttcgcccttctcaccgattttgccgattccgccgttgaaaaaccgccagaaaacagcgggctgctcagacaggccatcgcggaaactgaggatcttaaccgccgttatccagccagccgcccacgcttttatcttctgcaccgacagccagaatgggcccccacgcaagaaaaatggatgggttatgaacgcaaacggggaaagctggcgttgctgaacaactggttgcgccatcccgcggcacaattttccagcgtcgcagatgcgccagcgcatctgttgccgggtcatattaaatatgtcatcaccctggacagcgatacagtgttaccgcgcgacacggcgcataagctggtcgcgacaatggcgcatccgctcaacctgccagagtatgatccgctacggcagagggtcgtcaaagggtacggcattttacagcccgggatggcggaggaaatgccgcgcaacggacagggacgctatgccgccatgcgcagcagcgtgccgggtaataatccctattcgatgatgtcttcagatatctatcaggatctcttcggcgaaggatcgttcgttggtaagggcatttatgacgtcgatatctttgtcctggccaccgccaacgcctgcccggaaaatctggtcctcagccatgatttactcgaagggtgctacgctcgctccgggctactcagtgaagttttactctacgagcagtacccgaacaactatctgtcagacgttgcccgccgcacccgctggatccgtggcgactggcagctgcttaactggctcagcccgtacgtcagaaaggcggatggaacccgggataaaaacccgctatcggcgctttcctgctggaagttattcgacaatttacgccgcagtctggtcagcccgtctttgctggcgcttcttttttgctccctgctgctggtccccaacccgctttattggcttggcgcgctggcgctggtgtggttattgccttcagcgctgagtatcagccacgaccttctgcataaaccgcttcgtcgccctttgcggctgcatattccactcgtcgcggccggggcgctgaaacggttttcccgtatcgggctcaattttgcgatactgccgcatgaggccggatactcattgtacgccattgccgtgacgctctggcgtcttggcgtcagtcagcgcaatctcatccagtggaccagccacagccccgacggccatcagcccggcgtttcggtgattcgtttttatcgggcgatgtggctgaatgttgtcgccggggcggcattgacgatgatgacttttcatttttccccacggcttctgactatcgctctgcccgtcggcgttctatggtgtctggcccccctgctgctgagctggctaagccgccagcctgaacgtaaggcgatttcgctgaaccaggaacagaagcagctgctgcgtcagacgagtcgcgaaatctgggccttctttgaaacctttgccacggcaaaagagaactggcttccaccggacaattaccaggaaataccgcagccaaccatcgcacatcgcacctcccccaccaatatcggactttccctgatggccaacctgaccgcctgggattttggctacctgcccgggggagaggttttacagcgcgtgacgatgactctcgactcaatggataaaatggaacacttccggggccatctctttaactggtatgacacccgcacgctcgcgcccctcagcccacgctatgtttcgagcgttgacagcggcaatatggccggccatttactaacattgcgcgaaggcctgtccgccatgcgtcatcagccggttttgaacagcgagcagatcctggccggactgaacgatacgataatcattctggaaaaacactggggtcagaacgcgccaaccggtctgcgactgctgcgcaagcactgcctgaacgcagcgtcgctgcctccgacgcagctgttcaacgaacttaaaaaaatgcgcgcccagtgtaaccatctgacgacgcagtgcgctcaggagagcagccttgtggtgcgctggacaggacaccttgagcatcagctggtgcagctttgccatgaatggtcgcatttgcttggctggatacctcagacgtatagcgaacagatgctgccgacattgagctggcttgccggcgcgagctattgcggcgaaggaacgcctccggcatcggctacggcgctggcccgcatgcggctgaagattatcactgaacttgaacagcggctgaacgatcatgcgagaatggattttgcttttctgtacagcgaggcgaccagcctgctcagcgtcggctacaactgtgatacgaacacacccgataaaagccattacgatcttctgccgtctgaaatccgtctgaccagttttctcgccatcgcgactaaccagctgccgttaaaaagctggtatgccctgggacggttgttcaccaccattgaccatgaaaccgcgctgatgtcgtggagcggttcgatgtttgaatacctgatgccaaacctggtgatgcccacctggcccggtagccttctcgatgaaatgagccagtccgcggttaagcgtcagatacgctggggcaaagagcgtggggtgccgtggggggtatcggagtccggttatcatgcttttgatgttcagcacaattatcagtatcaggcatttggcgtaccgggcctcggtctgcggcgaggacttgctgacgatatggtcatcgccccgtatgcgacactgctggcgctaacgatctctccgcagaaagcctgcgagaatctgctcagcctggaaaaaaacggcgcgcgcggcgaatacggtttttatgaagcgctggactatactccctcccgcctcgcaaccgggcagctgtatgccgtcgtgcagtcctggatggcgcaccatcaggggatggcatttcaggcgctggctcacgtgctgcttaacgccccgatgacggatcgattcatgtccagtaccgtcttccgctcggcgagcctgctgttacaggagcgcgtgccggatgcggtcgatctctacagcccgcgccgtcatttcgaatcccatgaaggaagggtcaaacccgttcgctacgaaccgcgtattttcaccggagcagatacgccggtgcctgaagttcagctgttgtccaacagtcattaccatctgatgttgacccccggtggcggtggctatagccgctggaacaatattgccctcacgcgctggcgcagcgatacgacccgggataactggggagcattctgctatatccgcgattcgcaaacgggcgaagtctggagcaatacctggcatcccaccggcaaagacgccgataacggcgacgagacgatctttaccgatgccggcgctgaatacaggcgtactttcggatcgctgagtgtcagaacccagattgtggtctccccggaagatgatattgaactacggaggctcacgctggtacacagggggcgaatgccgcgcgaccttgaactgacaacctattccgaagtggtgctggcgtccgacgccagcgatcgggcccatccggcattcagcaatttattcatccagaccgagattaaccccgatcgtgacgcgatcctgtgccatcgccgcccgcgttcgctggacgaacagaacccgtgcatgtttcacatggtggtcgtgcatggcaataacagtaagagcatctcgtttgaaaccgacagggcagcatttattggccgcggcagaaccccttcaaatgcgctgacaagcgtaaaaaaaggaccgctcagcaatacctcgggggccgttcttgatccgatactggcgattcgccacgctatcacgctactgccgggacagcccgtcactatcgatatcgtttacggtatcagcgaaagccgccagcacagcctggcgttgcttgaaaaatacagagatcaccccatcgctgaccgcatctttgaactggcctggtcccacagtctggtggtgttacgccagatgaacgccagtgaagatgatgccacgctgtttaaccgtctcgccagcgcggtgctttacccctgtcacgagctgcgcgccgacggccagattatcagccgtaaccggcgaggtcagtccggcctgtggggctgggcgatttcaggcgatctgccgatagtgctgttcagtatcaccagcgaagagggtatcgcctcggtaacaacacttattcaggcgcaccgatactggcgccagaaagggctggaggtcgatttggtgatcctcaatgagagccctggcggttaccagcaggcgctgcaaaaccagattatggatttgatttatgccaggtcgggagccagcctgctggataaatcaggtgggatttttgtccgtaatggcgagcatctctccgccgaggataagcagcttctgatgagcgtcgcctgcctgtaccttgatgatcgagccggcgggctaagtgaacagcttaaccagcgcattcataccctaaaaccccaggccaggttgctaattccgcaccctgcagcggagggcaatcgacataccgactggacgcctgatacccatcagctgcgccatttcaatgggctcggcggcttttctcaggatggtcgggagtatcagattgtcctcagggaaaacgagccgacgccagctccgtggtcaaatgtgctggcaaacgccgattttggcagcgttatctcagaggcgggacaggcctacagctggtatgaaaatgcccatgaataccgcttaacgccctgggaaaacgatccggtgagcgaccgcagtggtgaagccttctatctgcgtgatgaagagagcggtgcgtgctggtcgccgacgatactgccggtgcgcggccacggcgactatttgacccgtcatggttttggctacagcgtgtttgcccaccgggagagcgggatagacagtgagttgacgatactggtcgccgaacaggcaccggttaaactggcgatcctgacgctcagtaataattcgggacgaacgcgtaaactgtccgtcaccggctatgcggagtggacgcttggggatttacaaacccgttcggcctcccatatcgttacgtatccagtcaacatttctggcggttgcggggtgatggccaacaacttttacggcgctaacggcggcgagcgcacggcattttttgccgtcagcggctccgactgctcgctgacgggcgaccgccgcgagtttattggccgaaacggttcattgcaaaatccggacgccatgaagctgcgcaggctctcgggtaaaacgggggccgcgctggatccctgcgcagcagtacaatccgcggccacgctaattgatggcgaccagagaacgtttatttttgtccttggcgtggatgaaaatcatagccgggctcaggagaccctggcccgctatctgaatgaggataccgtccgccaggagctgaacaacgttcaccgctattggcatcacgtactcgataaaatggtggtcaataccccggacacctccgtgaacttactggtcaacgggtggttgctgtaccagacgatagccagtcgccttatggcgcgtagcggttactatcagtccggcggcgcatttggttttcgcgatcagctgcaggatacgctggcgctcagtcacgccgccccggaaaggatgcgcgaacagatagtgctgtgcgcaacacgacagtttgttgagggagacgtgcaacactggtggcaccctcctcacggtaacggcgtgcgtacatgctgttcggatgactatctctggctcccgctcgcagtctgtcactatgtcgaaacgatcggggacacggaaatactggaattgaatattccttatctgcaaggtcgcccgctccatccgggtgaagagtccgtctacgacacgccggtcatcagcagcaccgaagagacgctatggttacactgcgtcaaagctattcagcatggattacgcttcgggcagcatggtctcccgctgatgggggccggcgactggaatgacgggatgaaccaggttggcattgaggggaaaggtgaaagcgtctggctgggcttcttcctgtacgatattttacaacgcttcgcttcgcttgccgatcggcgacaggatgccagcgtcgcttcaatgtgtcgttcagaggcgctgcgcctgcaaaaaaatctcgaaacctcggcatgggacggtgaatggtaccggcgaggatattttgacgacggtactcccctgggctcaaaagcgtcgcaagactgtcgaattgatgcgattgcgcaaagctggtcggtactgtccggggtcgccagccgggcgcgtagcgtcatggcgatgcaggcgctggataagcatctggtggataacgaggccgggctaatcaaactgttaacgccacctttcgatgggcacgggctgaatccgggatatatccagggctatctgccaggagtgcgggagaacggggggcagtatactcatggcgccatctgggcggtgatggcgtttgcccggatggggaatgcagaacgcgcgtggcagctgtggtcaatgatcaacccgataaaccacacgctggatgcctgtgaagtggaaagatataaagcggagccctacgtcatgagcgctgatgtgtacagcgtcgcgccgcatacgggtcgtgccggatggagctggtataccggttccgcaggctgggcataccgtttgttgacagaggagctgctggggataaaacgttgcggtacttcccttaccgttcattctctgttgccggacaactggccgtcgttttccatgacatatcagtacggcgacagtcagtatcacattagcgtttcacgtggcgccgggaaataccaggccactctggacggcatcatcctccccgatgacagcattccgctgatggatgacggacaattccataccattgatatcattcagaactga

SEQ ID NO: 195911 - DNA, 1047 bp, Klebsiella oxytoca
atgagtatattttcaattgatgagtctggttacactgggcgagatcttcttcaaaagtcacaaccttggcaaggggccagtgctgttaaaattagtcatgacgatgctctatacctgatcaaacaacatttccctaaacgcaaagcacctgaattaaaattcagctcacttaaaaggagagatagttatcagaagcctatttttactttgcaaaaagaacttcttgctaatttcccatgtgtaacttgtgttgctgataagcgttttattctgattcaaatgtttattgagtatgctgtagagcctttctactatgatcatggtgtaaatttgtacgaaaatggcggaaatgtttccatggcgtcaatggcttactatgtttgccccggctactttggtaaagattttgataatattctgttatcttttcaaaatgcgatgcatgaaaaaacatatgcagctgtaaatacccttattgaaagcgttagggccgtaaattggcgtttattaccagaagtactggggccactagctttggaacatcctggttgtattgaggcgataattaatcctaacattactactgatgctgcatttattattcttcaagcactaatatcacgaactgaaattatgtcagaggggccatacagtatcgagcatgatcgttcaaaaaaccttttgcaatacaatgaatatctttccatgcttatcaaatgtcagacaccaacagagtttaaaatgtctgaaattgctagcattaaattcccattaaagctaaatgatgtacaacaagttgattcaaaactaagccctgccgttcaattatgtgatgttttaattggtagtgcaatatcaggagtgcaccaattaacacatgataaatcaatgtcgttctattcccctttgaaactttatgaaggtaaccagataattcattttttacctgatatagattttgaggagcaacaaaaattcaggcgtaacagtcaaggtaatgagttcattgatttcattgctgatcaatttaataaatttggaggctaa

SEQ ID NO: 195912 - DNA, 2265 bp, Klebsiella oxytoca
atgaatgattataattttaatgttctcaacgataaagagttcgaaaaactagcaattgagctcataggtaatcaggaaaatgtattagttgaacgatttactcctggaagggatcaagggatagatggccgtttttattcaccttcaggaggttctgtaatcattcaagcaaagcattatgctggaacaggcttgagtggactattgagaactcttgaaaatgatgaactaccaaaaataaaaaagctaaacccaagtagatatatcttagttaccagtgttggattaacccctcaaaataaaaacaccataaaatccttacttcacccttatatattaagcacaaacgatatatatggaaaggaaggtgtcaatgatttacttacacaacacccatccgttgaaaaaaacttttataagctttggatttcaagcactaatgttttaattaacattctaaataatggaatcgtacaaaaaagcaagtttctaattaaagaagcgcatcttgaatcagctagatacattcagacaaaacagttcgatgaagctttagacatattaaaagaaaaacatgcgcttgttatcaccggctcaccaggagttggaaaaactactttagccaagcaattagcactttttcactcctataaaggatatgagatttatcacattgaggactcaattagtgaagccgaatcttgtttttgcccagaaaaaatgcagtttttttattttgatgattttctcggcgcaaactatttggatgttatagaagggaactttgattcaaagataatgaattttatccgaagagtaacattagataaaaataaaagacttgtattaacatcaagatcaaacatcctcaatagagcaaaaagtattagtgatatatttaactttggaaacatatcaaaccgtgaatatgaaataagtgtaactgaacttactcaaattgaaaaagcgaatattttatataatcacatttggcacagctccctgcccactgagttttcagatgtgtactttgataataaaaattactgggaaataatcaaacacaaaaacttcaaccctcgattaatatcaattataactgacaacgaacgattatctggcttgtctaatgaagaatactggccttatataaaaaacgctttgaacaacccggagattatttgggatttatatttcaaaaggcagatacctgatgaaatttatgatctcgttaatattgtcgtcttaaatggcggaaatattgaagaaacaaaatgcaaagaaatattaaagcgagtctttgagaaaaaacacaaaaataattactatgccaaagttcataaaatagatgatctcattaaagaatcgttgaaatcaaccctcaatagaaatattcgattaaatcaaacatcgcacattgcaagtataactccttttaacccatcaatttctgactatattatcaatcgcatatcaaaagatgacactaatctttctttgtatatgttggcatcaaaaacctatcagtcgattaacaccttattttctttagcagttaacaacaaattagatagtcaaactttcaattcagttttgaacatattaatatccgacacattgagtaaggacattaatgattacgcaacgcatctatattacaaagttttaacatcagatatatctgacactgaaaaactaaaaaaaataccgccctctacatttttaaatataaataaaagccaagtatcttatgattctgcaataggtgagtgtattatttgggcaattgagaagcaaccacgcctattctccaagaaattcgccattgatttcattgactatgctctttgctcaagtaaacaatactctttataccatgaagactatcttccccttgcaaaattaatgacattttatcctgatatagagcaagacattaaattcatagaattaaaagagcatataatagatttttgggagtcaggatttgatgagatccttggtgactcagctaaaatccaaaatctctcccctgatgatttcgacactgcggatgatgttgctttgaattatcttcatgagtttctcgacgagtatcctttcgagtttcatgaaagagatattgagtccattatggataatactaacacatcctcacatttaccagactatagctattatcatgatgatgatgatggatacagacctacagctacccagtatgtaaatagtgtaagctatattgacgatttattcagcagataa

SEQ ID NO: 195913 - DNA, 1473 bp, Klebsiella oxytoca
atgcgtggcgactgcgccatgttctataccatcacctgtccttctaagtaccacgccacactgatgaacgggaagcctaaccctacatgggatcactcgacagttaggaaaagcagcgactatctggttgatacgtttgcggcattccgtaaggcaatgcacaaaaaagagctgcgctggtacggcgtccgcgtagccgaaccacatcacgatggcactgtgcactggcatttgttgtgttttatgcgcaaaaaacatcgacgtgcaatcacagagttgctgcgtcgtttcgctatccgagaagatcgcgccgaacttggcaataacactggcgttcgtttcaagtcaaagctgatagacccgcgaaaggggactccggccagttatattgcaaagtacgtcagtaaaaacatcgatgggcgtgggctgggtgacaccgtcagcaaggagacgggtaaatcactacgtgatagtgccgagcacgtcactgcgtgggcatcgttacaccgtgttcaacaattccgtttttttgggattccaggccgccaggcgtaccgcgagttacgattgttcgcatcgcaggcaactcgtgcaacgaaaaccagcaaaccgggtgctccggtacttatggatccaaaactggacgctgtgcttgctgctgctgatgttggttgttttgccacatacatcatgaagcagggcggtgtacttgttccccgcaaaaattacctcattcataccgcctacgagccaacagtcgaaccaggaacctatggcgatcacggggttcgtatttatggcatttggtcgacaatcaccggtaaggaaaacaaaatatgcacccacgttcacacatggaagatggtgaagaaggctcccgctaacccaggcgctgaaagcgccgaccagggcgaccccgtcgccccttggactcgtggcaataactgtcccccaaaccataaaatcagcaaaaaagagatggttattgacgttgctatatccgagataacgccccttgatgaaggagcgggatcgcttgatgtgagtaaactgcctgcaaaagagcgctgggctgtgctgagaagacttacagaagagtgctataacatgaaaaaaacgccaggctacgtagaatcctgcaattactctccgcttaaggtctcgttgagcgattttgcttcatccgttggcatcgaacttagtaaatctcaggtaaatcatttacttaatggtaaccgcatacgttatggtgatcgcatttactacgcgacccacgatggggaactgcgcagtacggaaccagaaaattcagatgttcagattcggaatgtatggaagttgttgaaaaaacacaataaagtcgacgtgggtcacatcattgataatccagtagggcattattccaacatgctcaagaatatggaccctagaagatggactgtactcttcgggggagataagaacagggggtga

SEQ ID NO: 195914 - DNA, 855 bp, Klebsiella oxytoca
atgatactcaaaggactcaacactgcaccgattaaacatggagaacatctgtgtctaatgatgttcaaaattaaagatactaacgataagcagcatataatgtatatgcaagtcactacattaattgacttactaatcattctacgcttccggatgcttaaaatttcccagtatttatctgataaccatgaagtatataaatctaaaatcatggccagcattgagtcattatctgcgaatacgcctgagattgtcactgcagaagccatgcagcccgatccaggatacttagttacaggcttagccccaaagttcaaaaatgataaatttacacttgttgctatattacaaaatgataaaataataacgctagatatagatgacactcaaactgaattcattatcgttgcaattcaacaatcatttaatactatcggagataatgagatcacacaactcattggttcattgctcgattttattttaatttactccgttgatttaacgaatcttgaatgcttaaattataaagaagtgcatcatgaaccatggaaaaaagacatttattcagactatgttacagtagtttattgcttcgaaactgagcaaggaaaaagtaatctcgcaggtgcagtaattaaagttaatgccctatcaaacccgcatgacatagaaagtatcactcagaaagtggctaaattaactccgcaatttaaagctatccaggaaaaatatccgctatgtgaaaccttttatgaggtcatcgcatgccaaccggggaaaatattaacaaaagaggaatgtctggaccaattacacgcattttgtcttaaaatgcaaaccaggcttaattag

SEQ ID NO: 195915 - DNA, 366 bp, Klebsiella oxytoca
atgaaagaactgactctaactgaaatgaatgatgtttctggtgctggtcttcagcagcttatcgatggaacccaaagttttggtagtgctcttgttgatagcgtccttggtggaatatttggcttagttgcttattcagcggcaggcggcttgcagggtggccttactggtaatggtaaaggtggcggcatgcttggcattggcgttattagtaccagtattggcgctatctggggagcaatccagggtggcatctggggcgctgtaatgggcgtatacagaggtactgaatacattaatgatatgtcaactggcatcattgaaggtgttcttgatggctcttccggcgcttataaaccgtcttaa

SEQ ID NO: 195916 - DNA, 1041 bp, Klebsiella oxytoca
atgaaaaatttatttattttagttattttgataagcggcattagctggcaagcgcaagcaaattgtcaaaagtatggaagtggtggtggtggaataacggttaacttcggcactacagccatccttgctgactcaacactaccaaatggttcaatactggctactgctgttcgcggtggtaatgttactgatattaaaacatattcgggttgtgctcctgatgatatctttgttataagaagtacaaatgatattgatactggcgtaactggagtccagaatatgccggtttacgctacaggaattcctggcatcggttatcaaatgtcagatataacaattggcacaattcgacggcctattcctgccaagttgaacgatcctataccggccaacagtcacacttattctaaaacaagtatttcgggacaagtcactgtttggttagttaaaacaggtccgattacaaaaaatcaattacctggtttaattactgtatattttttagccggagctccaggttcccaaacgcaaggtacaggtaaccctaatagttcgcaattattaaaaattaacatcaatctaagctctataagatttaaagaaacaacatgtaatgttaacccgcgaggcgggagcactgtgatgctacagagtatagatgtatctcagttgaaagcattagggcaaggagctgccacaggtaaacagaaaaaaataacattagacattagctgtccagactcagaagtaggccttaactatctatactggttcaaccctattacagagaactcatctacgactgacggtgtattgctaaacgcactaccaagtggagcaaaaaatgttggttttataattaaaaaaggagcaagcccaattaaattttatgatctggatagctatgagtacaggagtatggcaaaaaaccaaactttagaacttaccgctgattactataaactctcagatgatgtttcagttggcactaccggggaggttaaaggtcaattcgaaattatcctccaggaaaaatag

SEQ ID NO: 195917 - DNA, 693 bp, Klebsiella oxytoca
atgttgaagtcatcattaaaaatagtggcagccttttctctttcagctagtttttttgcccatagcggtgtagtcgtggactctacacgacatctttttaaagagggctcgagagagataagcgccaacctggaaaataaagatgacattccttatttaatcaagtcatgggttgagccccgtgaaggtagccaaaactctctttttatggtgactcccccactttttcgtctggaagcaaaacagaagaatacgttacgaatatttcctaacgcccatataaccaatgcgcctaaggatcgagagactgtttactatttcaatgttatgtctatcccgccaaccaatgacgcggatactgataaaaataagattcaattagctgtacgccatagaatgcgtcttatctaccgcccattgtccttacaggatctgacagtcaaccaagaagcaaaaaaactagagtggcataaatcaagtaataaaatcacgttaaaaaatccgacgccattctttatctattttaaatctataaaaatcaatggtaaggaaatcagtggttccgttaataatatagatgcatttactaccaaagaattccctttgccagctggtgttaatggttcagaaatagagtggaaagttgctactgacaatggaggcacgggttctgcctattcatcatcaatataa

SEQ ID NO: 195918 - DNA, 648 bp, Klebsiella oxytoca
atggatgttaattctactggtaatcaaaatcgtatctcaggtcgtgatttcaatgagaacaatatccagatagataaatttgatagtcgtcacataattaacatcgcagtcccttcggaaggtcacaatgcgcggccgcttgtaaaagcgcagcgcaaagagcttaatgctctgatcgccaaagtagcaactatctgtggtggtgaatcatacgaaatttggcaaaaagtccatgctgaaataggtatatccagcattgaagaaatgactgtaagccaataccaaactgcgatcagctatttgcaggccatgatcgaacgcgtcaaggatagggatgccagtaaggcgctggttagccttcttctgcgcaatagcgaagtcgatgaacaaagacagaatttaattcgctactgccatgtcaacttcggcacgggtcgattaaatgaccttacacgcccgcagcttcaaatggcattgtcatggctggatcagcaaattcagaataccggttccaccataccagaaccatctacccccaggtatggcttattcgccttactgaaaacctacccaaaacacaccacagcagttttcgtatctggtgccttaatgggggcattgctcgttgtaatcactaatacgctataa

SEQ ID NO: 195919 - DNA, 327 bp, Klebsiella oxytoca
atgactgatgaaaatatgattccgcgtgaaggcatttacgtgtctaaaactgatcccagccttcggattacagtaacagacgttgtggttgtcgatgatgaagatgattctccagaagatgagttgttttactcagtaagctttatcgagggtgaggatgaaggagatctttccgcagcggggtttgaactgaataccgaggaatggctttcattcgtcaaatctgaacaattggtgttcgaacgagatccatacctggacaacatccccgacggctcccacctagcaaaaattcgagacttactacttaaggctaaaaaacagtga

SEQ ID NO: 195920 - DNA, 381 bp, Klebsiella oxytoca
atgctcaaagtaaccattcacaatgacattgagttaccagcaatagcccgtgaatatgccaaggcattcttatcatggaagaacggcggtccactgccattagaattcggtaatgaagggcagtgggaggatagcgggcgacttcgggattcgtatgttttcaagattcatatccatctgccgggcgaaaagcagtggcccgcaaaactcccccaggctgggagaaagtcaaatagctacctcgtatattcccgccactttctgtaccctgataaatatcagatcatcagtatcatgacgccgaatgcacatgaattagcgcgcacatcgtacatggctgagattgagcgtcgggcagaagactttcaagcttccttctga

SEQ ID NO: 195921 - DNA, 444 bp, Klebsiella oxytoca
gtggcgtttctgccaattgatgaggcaactcagtacatgctgaatcttgccgacagaatgaaaatgcacagagcaaatttgcgtattgagtgggaagagaagcaaactgagatcattctctccaaccatagtaaagagactcaagaaaactttgaaagcctgtatcgtcacattgctatctgtgagagctttgttgatgcggcaagattagcgctaaagaatatttccgataaggatgctgaccttaaaagtgaaatagtggcttttgcacgctcagcggcgtctttgcggtacacaattgaagacatgctcgccttcatgaaaagcacacagataaatcctgaagtgtccaaaaaaccaattgatgttactgcggaacaggtccatacactgattcgtagtgagcacaaaaggctggggcttgatgaacccaaatttcattaa

SEQ ID NO: 195922 - DNA, 954 bp, Klebsiella oxytoca
atgacaaaaaactatattgaaaggcgaaacattgaaccatggaataaattaagtactgtgaataacttctgggtaagacgtttttttcgaatagcaccattgtattatgtattgctagccatagccattttacttggtccatatattggcagtatgagggatatcatatcagagtattatccaaatactgctacaggagtggatcgctttactgatcagtcagttaaaaacatagtcatacatgcatctcttcttttcggattatctcctgagtatagtttcagaactactttacctgactggagcattggtttagaagtacaatactacttattgttcccatttttgatgttcatcgggaaaattactaatttaaaaacaacattattattaatgtcgattatatcaaccttgttgtatttcatttttcccgatttttataaatcattcccgatgccttctttcattttattaaaactacctatttttatagctggcatgtttatttatatagccattcatagcaacagggtaatatcaatctcacttccctttattgtcattatattcgcaactataactcatcttcatattgacaagagacaactaataatccaattggctatgtgtgcattaattatcggcttacttaaagagaataaaattccatatgctcaaaacgttctaaagaatatcaaatggttatttaataacaagttttgtgtttggttgggtgatgtttcatattcagtatatctaatacatttgcttattgtcacgccagtaattggaatattaattcaatcttatcatctgtcagatctaagtgctatttctaggcttttgcttgttgcggcaatatgtgcaccaattgtctactcaatttcatacctttgctttaaatttattgaaaagccaggaataaatttaggtaaaaaattcatcaaaaattag

SEQ ID NO: 195923 - DNA, 987 bp, Klebsiella oxytoca
atgagagatacgaatttaccaacactttctgtagtcattcctgtctacaatgtcagtaagtatgttttagaagcaatagattcagtaattaatcaaacaataactccttttgaggtcattattgtcgatgatggttctaccgacaactctggtgaattagttgaacaatactatagtgaaattcagtatgtgaaaattattcacactcataatcaaggtctgggagaagctaggaatgttggtaccagagctgcattgggagagtatatttattatttcgattcagatgatgtgttgcaattgtatttaattgaggatttttataatgcgttaaaatcgaatggcgaattggatatttttgcattctcagctgaatcatttcttgacggtgcagataaggaaatggtagcacctcaaaacaaattgccaaaatacttacgagttcatgagacattattttcttcgggtggagaggcttttatagaaatgtcaagaacagggactttttatcctaatgcttggctttatatttttagacgcaaattttttacagattttaatattacatttaagtccattatccatgaagatgaagagtttactccaaggctttttttacatgccggaaaaacatttatcacacgaaaatgtttttttaaacgaagagtccgggctggctcaatcatgcaatcatctagatctgaaaaaaatataattggatatattgaaagcataaatgcgcttgaggtattgctagcatctcatgatggggaaataaaaaaataccttcgagcacgattgatagagaatatattgaatatattagtgatacagaaaagcaataatatcgttttaacaacccaaacgtctcaaagagttagagctttactgaaaaagtataaaactttttatatttttttagcgcagcataatttttttgtgtatcgagtggttaagtttgttatgaggaaatttggatgcaaataa

SEQ ID NO: 195924 - DNA, 957 bp, Klebsiella oxytoca
atgcactatatgactattttaaaaaataaattatcagttattgatgatgttgtacctcatggaagtcgtattatatacttggatatacctttacatttgaatgttggggatttgttgatttacaagggaacagagcagtttttcaaggaaagaaaatataaggttttagcgagaagaactgataatacaagtttggcttatgtaaaaaagattaaagatatacctgatgatgttattattctactgcatggtgggggtaattttggtgatctttatcctcaacatcaagctcttagggaagcagttgttgagaaatttccaaataataaagtaattttcttaccgcaaacagtacattttaaaaatgaaagcgaaatgagaaagtctgcttcgattattcggacacacaagaatttaacaatattttgccgagatacgcgtagccaaaacatcctcaatgataacttttgcaatgatgttcggctctgccctgatatggctcattcattgtgggggatttattctacgcaaaaaaaagaggatataaaacgggacacattatggatgatccgtaaagatatagaagaaacaaatttagttgggttagaaggaattcccggaccatcacattatgaggactgggaagatatttgttcagataaagaccggtcttatactaaccttcttagacaatttgagcgaataaataatcttattggaaaacaaattgttcccaccgagttactctgggctaggtacacagataagttagttgagagagttaataattattttaaaattcattcggatgtggtgacatcaagaatgcatggtcatatcttatgctgtttacttggggttaatacaaagcttcttgataactcatatggtaaaaattctacttactatgaggcctggacaaaatccgttccaaattgtgagttaattaatatatga

SEQ ID NO: 195925 - DNA, 1473 bp, Klebsiella oxytoca
atgagtttaagagataaaaccgttaagggtgccaagtggtcagctatagccactgttgcaagtataggtatttctttcttgcaaatcacatacttggcccatattgtcgagccccatcagtttgggattttaactatatcaatgttagttatagtaattgcagatacaatatcagactttggaatatccaattcaataatacaaaggaaagatatagcagaagtggaactttccaccttatactggcttaatgttgtaattggtttttgtgtttttattatggttttttcattaagttcttatatagcggacttatttcatcaaccggatataaaaccgttggtacaagttctttcatttgcctttattattattccatacgggcaacaatacagggctcttttgcaaaaggaattggaattttcgaaaattggtctaattgaaaccatctctatattaattggttctggtgtgacaatggtttctgcgtggtttcatccgtatgctataactgctatatggggttatttatgcatgtcagtaacgaaaacagcaatgttcttttatgttggcagaaaagtatataaaccatcgctaatttttaaattaaaatctattaaatcgaatatcaaattcggcgcttatcttactgctgatgcgttagtaaatcagttaaattcaaatattgctacagttattctctcgcggtcattaggtgcaatcgttgcaggtggttataatctatcttacaatgttgccgttatgccaccttcgcgattgaatccaattttaacaagagtccttttccctgcatttgctaaaattcaagatgataaagaaaaattaaaagaaaatttttataagttattatcatttgttgggttaattaattttccggtattattgggactactagtggtttcacataattttgtaatattaatttttggtgataaatggttgtttattacacccatattacagattttatgtattgtcggtttgttgaggtctatcggtaatcctattggttcattgttaatggcaaaggcgagagttgatataagctttaagtttaatgtcttcaaactagtattgtttataccatctatttggataggagcgactttttttggaggggtaggagctgctcttggatttctggctgttcaacttctgaatacttatctgagctattttattctcatcaaacctgtattaggtaaaagttatcgtgaatacctcaagagtattttacttccatttatattgacattaccgacagtcttagcagcatggttagttggcttatatgcattttcgtccgaagttatcattatgcttatggctcaagtaattgttggtgttattgtatttttcgttacaataattttcagtcgtaatagcttcatctgtgaagttaagcgacagattattaaaaatcctaaaatccgtcgattcgtaagggcttaa

SEQ ID NO: 195926 - DNA, 1557 bp, Klebsiella oxytoca
atgaaactttctagaaggcgtttttcgaagtttttgtttttttcattttcagtattttcctccagaacaggattttcagcattatatagtgaagcaggtactgataatcgttttcatcccattgcaagattaaatgttgttaattcatttgacgaactcagggaattggtacccagaaatgaaggccagtgtatcgagttaaaaagttggcaccaaggattaaatgaaggttctggagagtttattgcagttaaaggatatattgaacacgatgatggtggcactttagctaaagtaaataatgagtggttttggaaaagaattattaaagggcattatacaccagaaatgtatggggctgtcggtaatggtgtattcgatgattataaatatttccaaaaaatgctcgactccattccctctaatgctgtggttatgttggatggaaaaaaagtttattataataatttttcaggacgagaaaataaagctaatatctggactctaaccaaacctataactatctttgctaatagtgcactcttaacaagacgcactcccaaacgcataggcactaaagataataaaagtagcgtccttaaattgtcgggtgacggccctttcaatctgtataatttaagaatagaaggggcaaacccaataggaaaaattaagaatcatttaaagcaagatacggatatctctggttatgctatttgtgattgtcaagacttcggggttcatatcataaatgcgaataacattaaaatagttaatgctgatatatcctgttgttcttttaatatatgggtggaatcatcttcaaatattaaaattactggaaacctccatcattcaggccaggttgtaccaaatataacagcgaaagatttggcatatggtgcgggtgtaaaaatattgaattcgcgaaattttaacattgacgttgagggtagatataacacaaacgctacggttgaagttgaacctaataatagttttggaaacgttagggtgctgtcgtttgacaacctaagtaatgggttggttatatacaatagtaataatatccaattttattcttatacaaaaaataccattcagggtaatggtacgtttataatatccaataatggaaagattgagactggaaatatcaaaggaacgtcgataactgaggggtgttcttgggttgggacatatgtccaattaaaaggcgactccgggtttaatgtttctaatattgatttggtttgtgttagttcattatgcgataactacggcctagttattgaaaataaatcaacaaagtctttagagaatgttagaatagattatagaggtgaaagcaatagcaccgttaagaaagggtttgatatgaaggtcattggtgatgttgctggggaaataaaaggaagtataagaaaaagtttaaatggtgtattttttgatggaaatgaaatgaatcgtttgaacgttaaattggatttgtcagaaataaaatttaaacattatcaaatgggtagtgttgtaaaagctagattcacagataaataa

SEQ ID NO: 195927 - DNA, 888 bp, Klebsiella oxytoca
atgaaagatttattcgcagtaattgttacttatcatccccaacttattaatttaaaaaaattgatcgtggctttaagagagcagggggtatctccagtaattgtagataacggtactttaaagcaagattccctctctgaaatagaaaatattgctcatgttattaatcttggcgataatatgggtattgcttttgctcagaataaagggatattatattgcaaaagtaaaaatgctaaagctattgttttttttgatcaagatagtgaaataaaagctgaattcatcgagtcgctagtaaatgattataatgatttaattgctgctggagataaagttgcagttatagggcctacttttattgattcaagatatggcttttattataaacagattcggttgaataagtttggcattagagaaaaagttgatcctgcccatttttctaaaccgtttgaggctaccattattatttcttcaggttcttatattccggtcaaagtacttgatgatgtggggtatatggatgaagattttttcattgactacgttgatactgaatggtgcttacgagcaatatcaaaaggatataagatttttgtatcaacgaatgctgtcatggagcatgcaattggggataaaatgattaatataggtggattgcatgtcccggtgcactctcctatcagacgttattacaggattagaaatgcaatacttttttcaaaattatcacacatacctttgatgctaaaaattcgtgataacttaatgaatattgttcatcagctattgttaatactaacgcagaagcataaattcttgaatgcaagaactatgtgtaaaggtattaaggacggttttgttggcaaggttggaaagggatag

SEQ ID NO: 195928 - DNA, 651 bp, Klebsiella oxytoca
atgggggataagtatgaaagaatttggggcgtacctacacttagaattgcaaatgggattgatttgaattttatcaatgttgtaagaactgagctaaaaccacttaatgatgaattcatttttgtgggggttgcacgcttatccttttggcatggatacgatagactgattaaagccatttacaattataaaggaaaatatactttaaaatttattatcgttggcagtggtgagccagaaatgtctgcacttcaagaaaaagtgcggcaatacggaatccaggataatattttgtttactggttctaagagtggaaatgagcttgatgcaatttatgaacaagctcatgtgtgtgtggactcgttaggacggcacaggagcggttctttttataatagttcactaaagtctaaagagtatactgctaaagggcttcctttcatcaaaagccatatggatgattctttcatggatgtggattttatatttgatgttacgccagatgagaaggatattgatgttaaagagataattcagtggtattcatcattatcacttgatacaccagcaagaatgcgtcattttgctcatgataatttatcttgggatattcagtgtaaaaaaatattaaatgagttattaattaaataa

SEQ ID NO: 195929 - DNA, 690 bp, Klebsiella oxytoca
atgcgcattatcctggatacgattattgacaacgacgaactcccttttatcgagccagcaatgcagctcataaggccatcatcactggctgtttttgatatgcagtcattgagagatattagcggtaaatcatcgctcgaattttctggcaccttcaatagccagggtgcggctgttgatgcttcaacatttcttaatacgaatgtcgctgaagtggacgacatgacactgatttattgctggaatctgtctgtagtgggaacaaatcaattggggctgggtaacagaacgcccgcttcagtcccgtttagcggcatatctctttcaaagcaggatactacgacagccctttacgtatccaccggactgtcttcaccagcaagtgtgactgttggcggcaactttcttggtgcctggactgttcaggcaattacggtatccgccagccaggcgcagaggatcactaaaagtggaactgttacccagtccgccattacatcccgcgcaaaatcatccattccattgtatataaatggcattcctgctgacatcagttcccctgtatcaactggtggcattggtactgtaggatttttctgtgcatacaatgaaatacttagtgcaactgatgccatgaactatatggggatcatttcaagaattatggccgcgcgaggtgtaagcgtttag

SEQ ID NO: 195930 - DNA, 933 bp, Klebsiella oxytoca
atgctgactggtgtttcagcaacaggaggctacacagtaacccaggttaaaaatactcatcttcccaacgctattgccgcgaatccgacattctgcgtagtcatgtgtgggcgtaacgacatagtgcaggggattaatctggatactgtaactatccctgcattcaaaagtatttttctgcaattgcgtcaggccgggattattccggttatttgtacgatgtcagctcagggaaatagcaataacaatacacagcgcgttgcggaacacaaactaaatgcctggttgcgagcatatgcaaacaaatattctacgccacttgtagacctccatcgttataccgtcgacccattgaccggtgactggctctctggttataaccaggatttttcacaccctaacggtgctggggctaaagcgatgggccacgcgctggctgacgcactgtcggactggattgcgccagtatggccaccaagagctgatgagcagttagcggcagggttaacgcaaaacctcattaccaacgccctgtttctgactaatgacggaacaaacccttcagactggacaatcaccacagccggaactgcaacgataacgacagattcagcagttaaggggagcgtctggaaccttgccagccaggaggcatatctcacggtaagtgccactgctgggcagaaaatgctatttggcttttttgtcaaaactggtagtcagtttgactgctatgtcctttctggaagttcatcatcaacaactaatctcgcaggaatcaggaactggaagacgaatataactgagttttcttattttagttacgaatttactgttccatccggggtgacgcaactgacggtaaaaattaaagcggcagcagcaccttgctcagttgctcaaattgcactcataaaattgacggagatataa

SEQ ID NO: 195931 - DNA, 705 bp, Klebsiella oxytoca
atgctcgagcgtggaatgatttttaacgctgagatggtgcgggccattctcgacggacggaagacgcagacacggcgcccagttaggtttccggtattagacaaaaaccttgggtgcgagctggctggcaatgaactggccggggaactgtcggcaggcaactatctgaacagcgcatttggcaagccagacgatcgaatttgggtgcgcgagacgtggggagtcgtcagccacgaactggatgaggatggtcgaatccgaccatggacgccagaccgaccggctacagccattaacgaaatgccgtttggcaatggctattactctggccacgccatttatgcagctgatggtgattttacctggggtgatgacgatggttatgaagatggtcgttcgtgctggaagccatcaatccacatgccgcgctgggccagccgtatcacgttggagattactaacgttggagtacagcgcctccagtcaatcagcccgaacgatgccgcgcgtgaagggctggttaaattacctgccactggccggtattgcataaatcagggggttcaatatttcggcggtgcaagccaagatgcgcgcgaagtattttcttggctttgggagtcaatctatggcgctgatagttggaaggctaacccatgggtttgggttatcgagttcaaacgcgttgaaggcggtgcggcatga

SEQ ID NO: 195932 - DNA, 231 bp, Klebsiella oxytoca
atgttaactagtgaggctctagctttttttgatggtgacaaacggaggcttgcaaaagcggccggcgtacgaacccccacagtttataagtggggggtgctggtaccagaagggcgcgcggcacgtcttcaagctgcttctgaaggtcagcttcattacgacaaagatatttacgaccaatatcgtaacgaaaaacgttctggtgaggtgaatcatgaaaatcaggcatga

SEQ ID NO: 195933 - DNA, 201 bp, Klebsiella oxytoca
atgaggctgtatttagagaaattattgacctttcaacacctgatttcgtacctggttcaacaccgtacctgcaatagccctcgaccttatctccatgatggccagaacattcttgtctggccctttctcaagtttgctcagtcgaaattcaatattctttgccttggtcatcgcgtaaccctgttggttgcgggcagttag

SEQ ID NO: 195934 - DNA, 420 bp, Klebsiella oxytoca
atgatgcgttcggacagcgcggcggaggctgccttcacttcttcagtcacttccacgggcagccaggcaaccggttcagtgacgaccgtgctctgtgatacctggtattcgtcccatatctggcggagacgtgtcggattgccgccggttaccgagctgggactggcgcgtattgcgtcaccagacttccccagtattattgctaactatgccaaccagtttgcggatggccggccggtaaagagcacctccatcggcattaaagacagcagtgataaatatgtcgccgccctgtgcctgaatgtggatatgacgctatttccgggaatacagcgtgctctggcgcagttcacggagattgaaagcagtgcggtggtcgaacatcttgagccggctaccggttccgaagccattcgctag

SEQ ID NO: 195935 - DNA, 1374 bp, Klebsiella oxytoca
atgtcaacgttagctcaatctgcgcaggagaatcacgcgacggccgatgaacagcgggtaatgagtaagctgttccgccgcctggtggcgttcctgttcgttttatttgtattctccttcctggaccgcatcaatatcggttttgccgggttgaccatgagccaggatctggggctgacctccacgatgtttggccttgccgcgacgctgttttacgtcacctacgtgctgttcggagtgccgagcaatattatgctcagccgggttggggcgcggcgctggatcgccgtcattatggtggtctggggcgtggcgtctacctgtaccctttttgccaccagcgccggtacgctgtatgcgctacgtatgattgtcggtgttgctgaggctggctttgtgccgggtattctgctgtatctcacctggtggtttccgtcctggtatcgggcccgcgccaacgcgctatttatgatcgctatgccgctgacgatgatgttcggatcgatgctttccggctatattctggcgctggacggggtgatgaacctcaggggctggcaatggttattcctgctggaagggctgccgtcggtgatccttggcgtagtgacctggttttatcttgatgataaaccggcggatgcaaaatggctgaacgctgatgaaaaacagactcttcaacggatgatggaaagcgatcgcagcgtcaaccggaagatgttgacccgccggcccgtttcgctgtggcgcgaaatttttaccccggtagtagtactctatattctcgcctacttctgcctcactaatagtctcagcgccatcaatatctggacgccgcaaatcctcaaaagctttaatgcctccagcagcaatattaccgtcggtctgttggcggcgatcccccagttttgcaccatcgtggtgatgatgtggtggagcaaacgttccgatcgcctcaaagaacgtaagcgtcataccatctacccttacctgttttccgccgctggctggctgctgacatcgctgaccgctcatccgctgattcagttgtcgggtctgataatggcctcagccggagcattcaccgccatgacgctgttctggactacgcccgatcgggcgatcagcgtcggcgctcaggcggttgtgctggcgactatcagcggcgcgggcaatattggctccgggcttagcccactgctgattggggtaatgcatgatatgaccgggaattttaatgccggcttgtggtttatggctgggttactggttatcggcgcgctggtactggtatatataccgatgggcggggtgcaggcggcgaccagaatcgtctgcgataagcccgtcggccgtcggcccttctggcagtga

SEQ ID NO: 195936 - DNA, 819 bp, Klebsiella oxytoca
atgacgattgaaaatgtaatagccactgtaccggcaccggatattttgcgctgtgcttatatggagatacaggttaccgacctgcgggccgcccgcgaattctatgtcgatattctcggcctgacggtcaccgcagaggacgaccagcatatttacctgcgctccatcgaggagtttattcaccataacctcgttctgcgccaggggcctattaccgccatgacggccttctctttccggatgcgtagtcgggaagatgtcgacagggctgaggcctggttccgggcccggggatgccggaccgagcgccgcaaagaaggattcacccgcgggataggcgattccgtacgcgttgaagatccgctcggcttcccccatgagtttttccacgatgttcaaaatgttgaacgcctgacatggcgctatgatctccatacccccggcgcgctgcgtaaatcagacctgattgagcgcggtcccggccggcacggggtttctaatgccttctatctctacctgcgcgatcctgacggccatcgtattgagatctacacccaggactattacaccggcgatccggacaacccggtgatgagctgggatgttgacgacaaccagcgccgcgactggtggggtaatccggtggccgcgagctggtataccgaaggctcactggttctcgatctggatggcaacccccagccggtcacagagcgcagcgagccgagcgaaatggcggtcactatcggtgccgatggtttctcttacatccgtaaagacgatgttctggaaggtttccggctcggcaacagcctgtaa

SEQ ID NO: 195937 - DNA, 945 bp, Klebsiella oxytoca
atgaattcactgttttcctcattgagtattatccagttgaaaaccctgctggttattcttgaacagcgcaacctgacccacgctgccgcgaccatgggcagcagccagtcggccctcagtcgccagttagcccattatcgtgccgcctttgatgatccgttgctggttcgtcaggggaaacagtttctgttaacggataaagccagtgcgctgctcgccccgctgagccagatattacaaaatctcgactcgctggcgcagccgttgatcttcgatcccgggagttgtacccgccggttctccattgcggcctccgattatgtcgccacacacattctgccggacttaatccgtcacctggggcaagtcgcgccacgggtttgcattgattatctgacctggcaacccaatcgttacgactggctgtccagcggtaaggtggacctcgccaccacgctggttgaagatgcaccgccggaatttcatggccgaatcatcggcgatgatattccggtctgttgtttacgtagcgatcactcacttgccagcgcggaaaaaattacccttagcgattatcttaactggtcgcatattaaaattagcggcggcggcgataaagacggttttattgataattacctgaaacggcaacaggtcagcagggtaattcgtctgtcggttccgtttttctccgctgcgctggacgtggccgcgcaatcggacaacctgttaaccatcccccgatatttactggagcacagtgttggaacacggccattaatctggcggccactggatttcgccacctggcgttttcgctattgggttgtctggcaccgccgaactcataactccccggaacatcagtggtttcggcaatttgtctatcagcactgtcaggcgtcggcgtcgttaaatcccgggagtcaaaacatgtcatattga

SEQ ID NO: 195938 - DNA, 1647 bp, Klebsiella oxytoca
atgaataatgaccagaatacgccgcagcatatgacgggcggagatgctatcgttaatggcctgaaacaccaccatgtggatactgtgtttgccttacccggcgcgcaaatttatggactgaccgatgccttagcgcgccacagagaagcaattcgcacgattggcgcccggcatgaacaaaccagcgcctatatggcctacggctatgcccgatccaccggacaacccggggtatgcgccgtggtcccggggcctgggattcttaacgccagtgcggcactgttaaccgcccacggctgtaacgcgccggtactggctctgaccggcgatgtcgaatcggcttacaaagaccgtgggcgcggtcagctacatgagctaccacgtcagcttgatatcctcggtcatatcggaaaatggagtgcccacattgagcagccctgcgacgcgccgtggctggttgcccgcgcgtttcaggagatgacatccggcagacaagggatggtggcgctacaggcgggatgggatttcttcacccgtacggcgcgggtggatggtgttgcgccgctggcgcggaaaccgaaaccgccggtagatactgatgccatcgacgcggcagcgaaacttctccagaactgccgggcgccgatgatatttgtcggcagcggtgcttcagatgcagcgccggaagtgagggagctggccgaaactcttggcgcgccggtggtcagtttccgcggcggccgtgggattatggctgacgatcatccgctggggttcaacgtggtttccggggcgcgtctctggccgcagaccgatgtggcgattgtgatcggttcacgctttgagctgctggatattcgctggaattaccgtcctcagggactgaaaattattcgcattgatattgatgcgggcgaagtgcgacgcctgaaggcggatatcaatatcatcagcgatgcgtctgacggcgcccgggcattgattagcgccgttagcgcaaccgggacaccgccgcgacgcgaccagacgctggcggaaaccaaagaaatcgccgccgcatccattaagaaaatccagccgcaggtcagttatttacaggcaattcgcgaagtactgccgcgcgatgggatcttcattgacgaggtatcacaggtcggatttaccgctatctttggtttaccgatctaccagccgcgcacttttatttcctccggccatcagggaactctcggttacggcttcccgacggcgctgggggttaaagtagccaatcccggcatagcggtattgtctatctgcggcgatggcggttttatgtttgccgctcaggagctggcaacggcagtgcagtacaacattaatctggtcaccgtggtattcaataaccagtcttatggcaatgtttaccgcgatcagcagcagagcttcgccggccgttttattggttctgagttggtaaatccggatttcgtgaagttcgctgaagctttcggcgtgcaggggatacgcgtcactacgccgcaaatgctgcgccaggcgctggaacaagcattcgccgctgataaaccggtgttaattgaagtagcggtagcgcgcggcagcgacagcagcccgtggaaatttctccacccgcagtttaatgattga

SEQ ID NO: 195939 - DNA, 471 bp, Klebsiella oxytoca
atgaaagaaattaatctgtacgcaataggtagaattactttggctgatgataaagtaaaaatcattctgcatcctccttaccgatctggattaaaaggaatagaaggctatagtcatgttactctattatggtggtgtgatggttacgatgataaatcgtctcgtcagactgttattacatcaactccttatactgaagatgaaatgggagtatttgccactcgctctccgcaaagaccgaatacaatagcgattacaacaacagaaatattgcatgttgatttaaacgctggattgctcattgtatcctggattgatgcggaaaatggtagtccagttatagatattaaaccttacattcccagtttagatcgtgtcgaaaatcccataactcctgggtatttatctggctggcccagttctttagaaaagtctgctgattttgactggtcttcagttttaaattattga

SEQ ID NO: 195940 - DNA, 261 bp, Klebsiella oxytoca
atgaaactgttgctgcagccgccgctgagcctgcagagacagaagtcgatcagctcgacggagatctatacgaaagtgtttccattcgatgtcactgcacaccaaaaagtgcagttcgcggtgccggaatcggatgtggtatgccctgagcatttcgcagcaccgagacatatcagcaataaagacttctacttcagccatgctgatgttctccttattccggaagtgatttttagctgtgaaagagataaaaatcgctga

SEQ ID NO: 195941 - DNA, 123 bp, Klebsiella oxytoca
atgcgtcacgatacgacattctggattggcgctattaaaaatatcgcattgctaagcggtctatggattttcgtagatgtcatttttgccatttttttctacttaaagtctaaattccattaa

SEQ ID NO: 195942 - DNA, 243 bp, Klebsiella oxytoca
atgaaaccagacgttcgtgaagctccgatcaatatccgggccaaaacatcacagcgtgacctgatcgacatggccgcaagcctggtctcaaaatcacggactgattttatgcttgaggttgcctgcagggaagcacaggacattctacttgatcaacgactgttcctcctcaatgacaatcagtttgaggcgtttattgaagtgatatggcgtgatgtttttggccacaacgaggtaggttga

SEQ ID NO: 195943 - DNA, 195 bp, Klebsiella oxytoca
atgaccattgcgacacccgcatcagcgggtgtcagtctggcgatgctgctggcggcgaaaaagcgccgcgaggcgccccaggctggctggctgatctactatcaacacccggtgatttccctcaagccggtcacgcctgttcccattcgcgcaatcatcctgttgagctggtgctcgctcgcgtggagaagatga

SEQ ID NO: 195944 - DNA, 324 bp, Klebsiella oxytoca
atgcaacatgaatatattgacatattaattgttgaagacgagaacgaactggcgcaactgcatgcggagctggttagcaaacatcctcgcctgcgtctggttggcatcgcttcctcgctggccgaggcgcaggcgaaacttgccagcctgcaaccgcagcttattctgctggataactatttacccgatgggaaaggcatcacgctgatcagcaatcccctgctggctcacgctaactgctcggtgattttcatcaccgccgccagcgatatggatacctgtagcctggcgatccgcaacggcgcgtttgaattacattcttaa

SEQ ID NO: 195945 - DNA, 1017 bp, Klebsiella oxytoca
atgatcgattacccaatctatcagggaaaaccaacagtgtatcttgaccacaatattttagatttttttgttaaaaatgggttgggttcgtttggaaaagatctcgctgaatctcatcaagttgtgtattctgatgaaacccttaaagagatcaataagtcacaaggcaaagaagataaatttctagaaacattaacgctgttaaatgcctttcatttaaaaatagtccttgatgaacaatttcaaccgacaggaaaagcaacactcacccagcgtgacattaaagaagcatatgatgagtataacaataaagagccaatacctgctggtgcaaatgatataatgcttatgtatctacaaaagatatttggaggtaaagaagaattatcatttaatgatctaagaactgaaaatatattattattcacagcattaatagaattcataagaaatcaatgcaaagaatcaggatctttttctacaacaacagaggattatttgaaaaatcttcaacatacatttaactctgcggttaatacgtacactgataaaatgaatcaagatgtaccaaacccgtttggttggtcgggtgttaatgactatcgtaaggctgtaaagttaggtccgaaacagctaaacaatatagaaccgcctaatgttttaaagaaaataaccgatttcttcagccaaacacctccttatagtaataatatttctgtcgatgacttcttcagtcttcacattaacgctgtatatcctgaaaagcctttttacgactatctaaaaatcacggcaatttataatatgcttaatattattggttaccaacctgattctaaattacataatgaaaaacgatttttagcatcaacaagtgatcagaaccatgcaagcatggcttcttttaccgacttattattatcaaatgatagcaacttcataaaaaagacatcagctatctatgaatatttaaatataaaaactgatattcagaatatggttttcattaaggaataa

SEQ ID NO: 195946 - DNA, 606 bp, Klebsiella oxytoca
atgacggacacattaacaagacaaaatcctctactaaaatcaattgcagcattttttgttgttttcggtgtattacctgttttagtaatagtggttggacttgttttctttaattcaaatttctccatgtatcattttaatgtatattacttaattctttcaataatatgctcaacaccaatatactttttatatagaaaaagaaaatcttacaaaattttcaatgatgggtttttatttttattcgcatctattacagcagtatcatatgttacggaggatgagcttttacttttatcgagactaccaagtatagagttacaaatgcaatatccatatctcttcccattagtattattcaagctgaatgtaataattgcctgtagctttgccaaaacaatcataaccttccatgaatggaaagaggtatgtaaaagtgaaataaccacatcctttagagatagtgtgagcaatgcaatggataaaatgccagcattcattaaaaaatcaaagctattccaaacaatcaccaatatatatgataaaaaagataaaaagcagagggataacgaccatatccatagaaaagacaaaagaagaaattag

SEQ ID NO: 195947 - DNA, 204 bp, Klebsiella oxytoca
atgaaaaatctaagcatcagaagtcaaaacctaataatgatattatttatagtgctcataaacatacctgcgcttatgagcattggtgctactgataaggaatggattattctaatttcttcttttgtcttttctatggatatggtcgttatccctctgctttttatcttttttatcatatatattggtgattgtttggaatag

SEQ ID NO: 195948 - DNA, 1386 bp, Klebsiella oxytoca
atgttatctaatatcaagctaaataatttcaaatcattttcttctgaaactgaaattcccttggctcctataactcttatatatgggcctaactcatctggcaaaagtagcattattcaatctcttctagctttaaaacaaacacttattggtaacaacaaaaatggtgaatttatatcttctggtgaatgtttagatttaggtgattttgaatctgtcattagcaatcatgatttagctgaaaatttatctattagtatagcattcaagaatggaatgaatattaaggaatataatgatgaatttatgtttcaaccaatttttggtgcagacgatataagacacttcagtacaacctataaatattccgaggaaaacccgacgaccaacttgactagcaataaaaattacttatcagatttcaaatatactgttactcaatcaaagtcagataaaaagatatttggaatagatgtattagggagcaagttagggagtttttcttttgataataatggatttgatgatttagccacgttcttcaacaggcgtgatcgtcgctcgaaaaaattagaaataccagagtattataatgaacttatcagtgcaaaaatattgatatctcctatactatcaattcctatatattcccccgtaagagaagattttaatataataagtaattattttaattccattgcttatgaaatacggcatgagctattaaaaattaactatcttgggccattaagaactcaccctagaagattttattcttccgaaagagaaaatgtcaaaaagaataaggggcagacaaatttaggagcagatctttattatggagggagttcagggcaagaaaaagtcaattattggatgaataagtttgatatcccatatgagttaagtgtagagaatattggtaataatattacaggtaatattatatcattaatgctttgtgatacgagaaataacacaagtgttacacctgctgatgtgggctttggaatagggcaagttcttccaataatcacatgtgcagtaactaaaaaaaatcaaacaatatgtgttgaacaacccgaaatacatttgcacccaagattgcaagcacatctggctgatttatttattgaaacatcgagcaatgctgatggaaaccaatggataatagaaactcatagtgaagctctaatgcttagactacagagaagaataagagagaagaaaatagataaaaattctgtaaaagtattgtatgttgatgtcggaatgtctggaacgagtgtcatggaattacctttagatgatgaaggagattttttgaaacattggccagaaggattctttgaagagcgcatgaaagaaactatggggattgactaa

SEQ ID NO: 195949 - DNA, 957 bp, Klebsiella oxytoca
atgttaacagagtttcatttcgatgaattctatcttggaagcaatgaatttgatagagaagattccattttcatccataagaaaataatagatttatggaaagattttggctgtttagtataccctaacataaaaaaatcagattatattgattgggttaatggccttgacccaaaaatatcaaaattatggctagtagcattttcacattataaaaaaaaccccatggcaagtaattatatgccagtatgtgattttcacactcctctggatattgaagaaacttacagttctgacgaacttgatttaatcatcatacctaataactcttcacttattagtgaaatatcatgtacaacacataatctagaaatatcaaaaaccaatgggattatggatagcaccagctttgctaatagtaaatatttatgtgaacaggatattgcagaaggcgattcaatagatgatatcttagataaaagattcaaaaaattaataaaaaattctaaagtaataaccataattgatcgatattgggccaaaaatcatgtggaggatatctctcgtagaaaacctgcgctactaaaaatattagattttatatattccttaaaacaaaaaatagcgattacgatctacacatccaatgttgacagttcagatgattataaagaaattctaagcaactatgtaaaccttacattaaaaagaacagtgaattttagtagttttatttcatctttcgaaatttctatttgcgacgactcattatttcgtgagcaaggacatgacaggtatattgcgtttgatgataaggtttgcaccttggggagaggtatcgcgatctttagagattaccctgttcctaactgcacatttagcataaaagatataaatcaaactcaattcaactcaatcttgacaaaactttctaagaatagaaaggctgtaatataa

SEQ ID NO: 195950 - DNA, 840 bp, Klebsiella oxytoca
atgagttataacgctaaggtctttaatgtgatgattgcgtcacccggtgatgtcgcatcagaacgagcaataattcgagacgttatatatgaatggaatgcagttcattctataacaagaaatatagttcttttgcctattggttgggagtctcattcttctccagaaatggggggctcggctcaaactattataaataatcaggtccttgataaatgtgatctgctaattggtgttttttggacacgcattggtactgctacatcagaatattcgagtggaactgttgaagaaattgaaaagcatataaatacggggaaaccagcaatgctgtatttttccagccaacctgttgctttagactcagttgatttagagcaagttcagaatctaaatttattcaaacaatcttgccagcgtaatggactttatgaaacttatgatagtcatgctgattttaaacaaaaattctatcgacatcttcaattaaaagtgaatgagcatgggttattttgtgattcaatatcgattccgaatactgagattgtcgaatcaaaagttaatataccaaacctagctgctgaatctcgaattttactgaaagaagcaagttcagatggacatggaacagtaatgcatcttcggtatattggcggaaccgatattcaaactaatggtaaaaacttcatacagaaaaatgagcgacgcgaaatcgctcgatgggagtctgctattgccgaattagttcataatgaattgctaattgaaagagggcataaaggggaaatctttgaggtcacaaatttaggatatcaaatcgcagatatgattaaaatatga

SEQ ID NO: 195951 - DNA, 564 bp, Klebsiella oxytoca
atggatacgcagatgaagaagattttactcgttgctggcgcagctctggcactggcgggatgtggagagaaaggtgattttgaaaaagcgattaacgcgaagatatcaaaatcgaaggtgtgctattcactacaggataatgatcgcgtgtttaataaaggttttcctgttcgggtcaatcgtggctatcactctgccggatacaatgaaagtgatgaaatcttaaatggtctgtctgaacaaggactgtttgatgtttcgcaggagtctaacggctttagcaacgttgatgttctggaagtaacggataagggtcaagaggttgagttctgggatcgcaaagatggtgcctgtgtgggtcatcgtgccgtagctgaaattaaagaatggacagaagccgatgcaagtggcatgaagattgttcgcgtgtcgtatacgtggaaactagctgatgtgccgggctgggtagataaaagcgcattcgctggcgtcagaggaatgactgaacctgctgaaagcctcatatctcttgttaagaccagtaatggctggaaagccaactaa

SEQ ID NO: 195952 - DNA, 387 bp, Klebsiella oxytoca
atgagcgcccgcgccctgctccagtcgcagcagaactccgacgaggcgctcagtattaaacgcgacgctgacccgacgtttgatttttgcggctatctggaaatgttgccgcagaccaacgggatgtttattggcaatgccagtatcatcccgcgtaattaccgtaaatatctctatcacgcgtatctggcctatatggaggccaacggctacaggaacgtgctcagcctgaaaatgttcgggctggggctgcccatgatgctgaaagagtacgggatgaactatgagaagcggcacacaaagcaggggatacaaaccaacctgtcgctgaaagaagaaagctacggcgactggctgccgaagtgcgacgaacccaccgcgacttaa

SEQ ID NO: 195953 - DNA, 573 bp, Klebsiella oxytoca
atgtacataatacaccaattatttagaccttttggatatctaagcataaaaggcgtcaatggaaagtttatctatgactggttaattccattgtttttatctttattatcaatgggttacttttacggcctaaccacgccatccctttctttaagcaatgatggtttttttaaaaataccatatcattcatttctatacttccggggttttacatcgcagcattagccgccatcgcaacatttaataggaagcaaatagatgaccctttaattagcgataatggcactccatacatttatgtaaaaggggtaaaagagaatggaaaaccataccgaacaaaagaagacatgacacgcagattatttctttgcatgttattttcttttctcacagcagaaagcatagttcttattatgttgcatacctttgcatcccctcttatatcagcaacaacaaacacttattgcttagctatttattcatttattttcctattaattctttggcagttgttagtgaccactttttttggcctttactacctcggagatagaattcacctcaacaactga

SEQ ID NO: 195954 - DNA, 1023 bp, Klebsiella oxytoca
atgtcatctcttgatgcgtattttcgtgatgttactcatcacgaatttgttttagatacagcacttagaactcaaaagctagatgatgttgataaagacacttgtaattgtccaatacctgaacttcttgagcttgcacctttaatcattgctcaaaaagatttctcatacgcatatttatccaatacccttgttcttaccctacaagatgctgagtattatcctcaggggagtagtaacccaacacatctgtgcctcttattcaatgcaacagataggaatggctcaactacggtgctgaggaatccaaaacgacaaacaagaagaaaaatagaaccagatcataaggatggagaaggctatgagttctcctctcacatattgatttctctttccggccaaaaaagaacctacaaggcagtaataagccgcgcaccaaaaatatcaacaaatttaatagaattgttttttaacaagatattattccagatttcacgagctaacacagaaaaattctcgattaatgccaaaaccaatgccactgacacatctacaggtaaaactaaaaaagtcttatacaaacctgtagccgaattacgtgggacattagacatagagttattcaataagatgaatagtggcggcttgtcggaggtaacactgataaggtatgacactggaacaatcaatgttcctgatatgaatggagttgtaattccaattgaaagcaccatgaaaatcaagccagtagagcaatctaaaaatgtaatagcctggctaaaagatattggtggacatttcaataaaaagacaaatggtaattacaaagatatcagagttaaatattatgatgataatagtaaaacgcgaactgttacaatgcacaccaataatataaaactagagtcacttgaaaaaacctttatcaaaagaagtgtaattgatggcttcagttcgcgcctaagcaactcatatgataagatagactcagaaattacaattaaactccatagtattttatga

SEQ ID NO: 195955 - DNA, 984 bp, Klebsiella oxytoca
gtgtccaatgtaaagattagatcaaagttaacaagcgaaaatgaaaacaaacaaacggtcccggtcaaaatcttcaaaataactgacatcccagatgtgatggagaaaaaagattggacggtgtcagcacgtttcatgcgaaaatggttcaatgacccattttacgaaatgacatccaaagagaagctaaataaagttgatatgaatactgtggacaaacgccatgtcattgaagatttggattttgattggttgttaacttcttcgttacgaattaaaccgatttacgataatttcgtgaggcaagtttcgaatgttattgagtataatggctacttggggagaaaaaaacaaatatcacagcagttgtctaatggcctttgttacataattaacaggctggatgaatcaggtctttttgttaacaacgaaataaaggaatgttatttaaattatggcaacctgtcagcaatagaacttgataaaataagtcagtttaactttattaaaattggtagtacattgtgggaaaaagcaacagataccctgggtgatgtgtatggtgcccttggttcttttataatcaaaattgcatttacagatcttactgtcaccagaaatactgatggtttcatgagattagaaattaaagaacttggattgtacgttagggatacatatgagtttatgaatgatggtgatgatcaacttttaggttattgggggggggagggtgtcatcaaacctggggtgatgagtgaattattgggaaaagaatatcttgatgaagacggctgtagatactttagagttactaactcatcttttgtgagatacagggaaaaatataaaagcgaaaataaaaccgaagattttttcgtatactcgacggtaaaaaaaatccctgcaaacattattattcatttgaataagatagatatggaggaatatatttactggaaagaggaaaatgttaatgcatag

SEQ ID NO: 195956 - DNA, 936 bp, Klebsiella oxytoca
atgacgtgggtttatcagctcagggatcgtaaagcggctgatgccgccgattaccagacgctgctgcgtaatgccgatacggtacttaaagacgacgtactggcgtcaaaatcgctgctggtgatgcccaaaggcagcgtgacactcaatatgcccatggatgaagacgctcagttcgtggcggtggtggggctgtttaaccggccggatcagaaggacaaccgctggcgcctggtactgacccgtgacgacctcgacccggacaaaccccgcacagaagcggtgcttttctcggcgccggaaggcatggccctgaccagcggtgaagatatgcagctggcagccagccggaacctggcggttaacgccggagaagacttcagtgttggagtgatgggcaatgcgacactgctcaccggtgagaaactggggctctttgcccgcaccggtcagttgagcctgaaatccggcgaagggccaatagatgtccaggcgcaaaacgccagcatgcggttgtttgcggagaagaagctgacgctgagctcagcgagtgacatctcctttgccgggaaaaaacgtatcacgctgatcggcggcggaagctatctgcgacttgaggccggaaaggttgaatatggtacgacggcgacgtatatacgcaaagtgaagcggactatggctgcgggaagtaattctcagactccagaaatcccatttttaccagggcctggtgatgtttttcgaaggagttttattcttgttgatgatagaactcaagaaccaatatcaaatattagatatgaattgacctcacctacaggttctgtcgttaaaggcgtttcatgcgagaagggcctaacaggttttgttagtcatcctgatgaggctgaagtagaattaaatattcttgaacaaaattcattatttatagggtga

SEQ ID NO: 195957 - DNA, 1206 bp, Klebsiella oxytoca
atgaagggactaccaccacttgttatacttggttgccttgtttattctgattgtattattgcacaggaatggaagggtgagtgcattggttattatcagttgctgttgcctgatggcttggaggtggctttatatcccgtgaatttaatcattgacccactcgcaaatccagcgcggcaaaaaaacacgttggtgtcgcgttatttgtttccaaaaatatttttcagtgaaaatcgatatcagagtaatggtgacacagttcaggcacaattctcagtattccattatgcagattatgacgttgtagtttcctctgaaaacaaatcgactatcgatttgctgaaatatgaaaaggaatttaaagagcgtactgacaatcgaatacaggactactgggataaaaggaaccacaaattatcaatgaaacttccagtattaccaaaagatattgctgaaagatcacttgcgtacagtatcgataactacgacaatgctttttcagccactgattcgggtggttattctttatttgtaaacaatggcaacagactgtttatttttaaaaaggcagataaagtacaatcacttgatgagcaactgaacaaaagcagacctgagatgctttcattgcttaaacgttttcagccacgcaaactctacgaagttccggcaaaacagggggtctgtttaccctatggttttatcgccggggattccggacatgaaaaacgcaatatggccgtcacttaccgtctgaaaaatcacccagatgtgaccatatttttccaggacctggggatgatgaatccgcaggcaggagaagaagacgacctgaatgagaaggattacatggcctggctgtggagctgggatttccaagcgggagcaacttcaaaagagctgataaaaccaaagtggcgctcaattaagatggatggtcgtgacgggaccggaacttttgttaaaggcacatacaaaaatgttccagtatatgactataaaggtcatgtgagtaaccggatgaattatattaactatggctatgcggcttatgtgcagggcaatcataaagccagaaacctggaaccagatttactgctctatgttatgcaggacagccgtcagcttaaaaatcagccgccaatggataaggacgaaatagaaaaaatggctgaacatattatcagttcgattaagagaaggtaa

SEQ ID NO: 195958 - DNA, 2436 bp, Klebsiella oxytoca
atggcagtgcaaaaacttgatgatggcatgaatcgggggagtgtgtatttcgatgacaaaagcgacaagagctatacagccacgttaactcacaaccattgggtacattacaccagtggcctggagcgtcaatcagaaaactttgccgagtataccgaaggtaatgcggtgcaggctttcctggggggaaaagcctattttactgcgttactgactgcctttaaacaggcccaaaaatgcatttacatcacaggctggcaggttaactgggatgcccaattagcggaaggggttcgcctggtggatgcattactcgaagccgtaaaggtttcaccagagctgcaggtgtacattatgccgtggaataacccctcacaggtagaaacctattcggcggcaacagagcgggtatttgctgcgatgaatacccatctcggaaggcaggctttttatgttcagcgtgcgggctctaaatccggaatgatgttttcgcatcatcagaaatgtgtgattgtcgatgaaaaactggcatttgtcggcggaattgacctggcctatggacgctatgatgaccattatggtttgcaggcaaatgcagacggacgacagggcatgaatatgtacaattcgtgtatcccgcctgtttcccggcaaaacagttataaccccatggaggaatatgtcatcccgacagggagtttccagagggataaccagcaggatgaacggcacaaagccgaacgtcggcaggctgacagtgtacagcacattattgataacgtgctcgcccataagctctggcagtcatccgctacgtcaaaggacagtacctgtctggacccgacggtccagccccggatgccctggcaggactaccaaatgcaaattgacgggccagcggtctatgacctggtgcgcaactttgtgtttcgctggaacagttatagtcacccctatccggatcattcgctgaaaacctctgttcctgaactggaggttccggcagcatcgccacagaaaaaaggcagctgccaggtgcaggtgctgcgcagtgcctcactcgacatgcgtaaagatgaacataaacgtatgccggacagcgcaccaaaggccaggctcaaacaggatgatatcctgcgcagtatccacctgcttatcagcaaggcggagcactatatttatattgagaatcagttctttgtctcggcgtttggggcgtcgtctattgaccctgagagtaagttaagtccggtggccaaaagcattagtccttccttggatacttgggcaacccggctcttgcctgatgatgaaacaccgcaaaatccggtggcggaatggctaggagaccggattaaacgggcagtctttagtcatatgcagcaggcgttccatgtgtatattgtactgccggtgtatcctgaggggcggcttgatgatccggccattgtggcgcaaattcatttaacccgacagtcgttggtctttggttcgcagagcctgcttaaccgtattcgccgtagcttatgggtaaaacaacaacttgaactacagacggtcccgcgaagggagtggtggaagaaaatcactgaactggaagagcagtgcggcgataagtataaaaccattccactggaagcatgcaatgagtatgtgacgctgctgaatctgcgcgaccacgttgaactaaacggcagggcggtaacagagcagatatatgtccacagtaaactgatgattgtcgatgaccgctatgttctggtgggaagtgcgaatatcaatgaccggagtctgcaaggtgaccgggactccgagctggcggtactgatatccgatacagcccattgttatacggacctggatgggacgggcgttgctgcaccgacccgaaactttgcgcgcgaattgagacaaagtgcatggcgtaaatggctgggcagcgcagcgggagagtgtgcagatgtgctggataaaccggcactgaaaaaaggctgggagaagattcagatgttggcgaaaaaaaatgctgagacctatgaaatagtgtttgattttattccgaaaaattatattgacagcaatccctatcctgctgaaataacaccttctgtttctgataccgaaagcacaaaaactaatgaaatacccgcctcaatatggcctgtaatgaacacgggtgacaagattaaaagttttgtaagaagtagcatgcccttctcagagattttttggcgaaattataaatttcagaacgacggttccctgcatgcaattaaaggttatttcactgctctgcctatatactggaccgaaggagagaataacatgattcgatataatatgcggttcattgccagcaatgctgtatctgctgacgatacacagctgttagcggataacagtgccggtgataataatgaggtaaatcaggcatga

SEQ ID NO: 195959 - DNA, 921 bp, Klebsiella oxytoca
ttgctatccggtacagcctcgatatcgctatcggagtcgctgtctgaatccgaatcgctgtcagaatcggaatcgctgtcggagtccgagtcgctgtcagagtccgaatcactgtcagaatccgagtcgctgtcggagtcagaatcactgtcggaatcggagtcgctgtcagagtccgaatcgctgtcggaatccgagtcactgtccgaatccgagtcgctgtctgaatcggaatcgctgtcggaatccgagtcactgtcagaatcggagtcgctgtcagagtcagaatcgctgtccgaatccgcatcgctgtcggagtccgagtcactatccgaatcagaatcgctgtcggaatccgaatcgctgtcggagtccgagtcactatcagaatccgagtcgctgtccgaatcggaatcgctgtcagaatccgagtcgctgtcagagtccgagtcactgtccgaatccgagtcgctgtcagaatccgagtcgctatctgaatccgagtcgctgtcagagtcagaatcgctgtcgctatccgagtcgctgtccgaatccgaatcgctgtcggagtcagagtcactgtcggaatccgagtcgctgtcggaatccgagtcgctgtcagagtccgagtcagaatcactgtcagagtcggaatcactgtcagaatccgagtcactgtccgaatccgagtcgctgtcagagtctgaatcactgtcagaatccgaatcgctgtcagagtccgagtcgctgtcagagtctgaatcgctgtcggagtcagagtcgctgtcggagtcagagtcgctgtcagaatcggagtcactgtcggaatccgagtcactgtcagaatcggagtcgctgtcagagtcagaatcgctgtccgaatccgcatcgctgtcggagtccgagtcactatccgaatga

SEQ ID NO: 195960 - DNA, 498 bp, Klebsiella oxytoca
atggaattaacaatctcattctcaacgatactcatggcttgtcttggttttctcggggtttacatccttatgccaattgctcttacttttagggattatttggttgtttattgtattagtcgatatatttacaatgatgagttttatgaagatttaaataaatcgtttaaatgcaaggctgagttgatgacgatttataataaatgtggatatgtgtcaaaggatgaaccacaaaggtgttttatcgatggggttgaggttagtgaaaagaaataccagcgctatggtttcagaaggctcatgaggaaaacgactattgaaaatatggagagtaaattaagaacaaagctaaattttattcattggattgagaagtatttcaagttagatagctcctttgctaagacaatttgtaaaaggacggaggatatttatgattcgagagtcaagggaattatagcgaatggtgaagatataatcatctcagatataacctaa

SEQ ID NO: 195961 - DNA, 909 bp, Klebsiella oxytoca
atgaaattttacatagcaattcctacatataacggtggggaaatctggcagacagctgcttcagaaattaaaaaacacgccccacttaatacagtcgtccaagtgatagactcgagtagcagcgataatacagtatcggttgctatttccaatggattcaatgtgcttacaatacctggaaatgagtttaatcatggaggcactagaaaccttgcggttaaagatttcgatgattatgatgtggtaattttcctaacacaggatgcaataccacaaccaaattttgttgagaatatcctttctgctttcgaaaatgaagatgttgtttgcgcgtatggacgccaacttcctcatacagatgcaaatcctttagcgattcatgctcgctcgttcagttatcccgagaagggatatatagcggataaatgcaaaatccctaatatggggttgaaaacattttttatgtctaattctttttcagcatacaggttatctgcatttaaagaattaaaagggtttccggaaaatacaatactctgtgaagatatgttttttactgcgaaatctgtacttgcaggattcaaggttgcatatgtctcggatgcaattgtgaaacattcacataactacactccaatcgaagagtttaaacgttattttgacataggtgtttttcacacggacgaaccatggatacgtgaaaatagtggaggagcggcaggtgaaggcaagaaatatatgatttctgagttcaaattccttcttcagaaagctccactctggattccatacgcctgcattagcaattttatgaaaattaccggttataaattaggccaaaaatataaaattatgccaatgaaacttattaagctatttagtatgcataaaaggtattggaaattataa

SEQ ID NO: 195962 - DNA, 1065 bp, Klebsiella oxytoca
atgaaaattttagtcactggcggtgcgggatttattggttcagcagtggtgcgtcatataataaatgacactactgatgaagtagtggttgtggattgcttgacgtatgcaggaaatttagaatcattaacacaagtatcagttagcgaccgttttagttttgaaaaagtgaatatttgtgataaagatgaattgaatcgtatttttcattatcacaaacctgatgcagtaatgcatttagctgcagaaagtcatgttgatcgttcaatagatgggcccgcggcttttattgaaacaaatattgttggaacttatactctcttagaagttgcacgtgcttattggaatcaactagaagagcaattcaaaagtaatttccgttttcatcatatatcaactgatgaggtctatggtgatctgcatggaacagacgatctttttactgaaaagacatcttattcgcctagcagcccatattctgcttcaaaagcgtctagtgaccatttagtccgtgcatggttaagaacatatggtttacccacaatcgttacgaactgctcaaataattatggaccattccatttcccagaaaagctaattcccctaattattttaaacgcattagaggggaaacctcttcctgtgtatggtgatggcgggcaaatccgagattggttgtatgtagaagatcatgcccgagccctatataaagttgtgactgagggtattgtaggtgaaacctataatattggaggacataatgaacgaaaaaatattgatgttgtaaaaacaatttgtctgttattggaagagtatgtgcccaccaagcctaaaggtttaaataattattgcgatcttattacctatgtaaaagatcgtcctggtcatgatgttcgatatgctatcgatgctacaaaaatcctaaatgaacttggatggaagccacaagaaacctttgaaagtggtattcgtaaaacggttgaatggtaccttgctaacgagatttggtggagtcgcgttaaggatggctcatacactgacaaacgtctgggtctctcacgataa

SEQ ID NO: 195963 - DNA, 870 bp, Klebsiella oxytoca
atgaaaggtattgttcttgctggcggttcaggtactcgcttatatccaattaccaaggggacatcaaagcagttgttacccatatatgataaacctatggtttattatccaatctctgttttgatgcttgctggcattcgagatatattaatcatttcgactcctgatgatatgcctggatttaagcgtttgctgggtgatggtcgtcaattcggtgtaaaatttagttatgctattcaaccaagcccagatggtcttgctcaggcatttttgattggtgaagaatttatcaatggagacagctgtgcgttggttctgggggataacatttattttggtgaaagctttggacgtaagttagaaactgttgtgcaacgaacagacggagctacagtgtttggctatcaggtaatggatccagaacgtttcggtgttgtcgagtttgatgaaaacagtcgcgctgtgtctctcgaagaaaaaccttccgaaccaaaatcgaactgggcagttacggggctgtatttttacgataacaatgttgtagaaatggcaaaaagagttaaaccgtctgcacgtggtgagttagagattactacgctaaatgaaatgtatctggaactaggcaatttgcacgttgaaaagctaggccgaggatttgcatggctagacaccggtactcatgagagtttacttgaggcctctcagttcatccatacaattgaacagcgacagggatttaaagtggcatgcctggaagagattgcatatcgcaaaggttggctcactaaagatgaagtattagcacaagctaaaatactgtcgaaaacacaatatgggcaatatctccaaatgttggtagaggagaaataa

SEQ ID NO: 195964 - DNA, 537 bp, Klebsiella oxytoca
atgcaggttattgatactaaaattgctgatgttaaaattattcagcctaaagtttttggtgatgctcggggtttctttgtggaaacttttgagaaaaaacgctatcaggaaatgttaaatatagaatttgatttcgttcaagacaatcactctcgttcaacgaaaggagtccttcgcggacttcattttcaaacgcagcatgcgcagggtaaattagttcgggtggttcgtggtgaagttttcgatgttgcagttgatattagacctgaatcacctacttttggccaatgggaaggggtaattctttcagaagaaaacaaaactcaattctggataccaccaggcttggctcatggttttgttgtgctatccgacatagctgattttgaatataaatgcacagattactataatccaggatttgagggatgtattttatggaatgatgtggatattggcatcgaatggcctgagaaaaatcctttactttccgaaaaagataagcaagggaaaactcttaaggagctatttgcatga

SEQ ID NO: 195965 - DNA, 855 bp, Klebsiella oxytoca
atgaagatattgttaactggtgcaaatggtcaattaggtcagtgttttcaggatcgggttcccgatgattgggatgtttgggcgactgatacttctgaacttgatattacaaataataaaagggttttgaaggcagttgaaacatttaaaccagatattattgtaaatgctgcggcttataccgcagttgataaagccgaaactgaaattgatattgcaaaaagtgtaaatgaagacggaccaaggaatttagccatagcggcaaatcgatatggtgcaattttattccatatttcgacggattatgtatttgatggaagttcaacgataccgtatcttgaaaatgatctgactaatccactcggtatatatggaaaaaccaaacttgatggtgagaaggctgtaattaaaaatagtccaacggcgattataatcagaacggcttgggtttttagtgaatatgggggtaattttgtcaaaacaatgcttaggcttggtcgcgaaaaaaaagaactgtcgattataaatgatcagcgcggttgtcctacctatgcaggcgatatcgctcaagcgatcatcgaaatgattaaaataaaaacatcatgcgggatatatcatttctgtggagataaagaagtctcatggtatgagtttgctgaacatatttttaaaaaagcggtagatgctaacattatctctaggcctccttcgcttaatgctattacaactgaggcatatcctactgcagcaaaaagaccttcttactcaagtcttaactgcaccaaaatgaaagttattggaattaatccatcaaactggatgtatgctttggaaaatgtgttagctaagttatag

SEQ ID NO: 195966 - DNA, 489 bp, Klebsiella oxytoca
atggcgcttgaaaaaggtattgcagagctggtgcgggaatttatcgatgcaggtcgcccctcatcgcgcgaacagaatattgatgaccggagaaacggttatgtcgctagtgccgtgttagccggggaacaagaaaaccgcgtgtgggtagaggacatcgaactcgagggcatgttttttcgcgtggtctctcccctcaatgcgactggcgcgctgcctgccgttatctatttccacggtggctgctttatcagcggcggtttcgccacgcatgaccatcagctccgccagctggcgtaccacagcggctgtcgcgttatcgccgtgcaatatcggctggcgccggagcatacttttcctgccgcccatgatgatgccgaaaaaggcgcgctgattattcaccgccacgccgggcagctgggcagctgggcatcgatgcttcccgtattacgctggctggcgacagcgccggaggacatctggcattag

SEQ ID NO: 195967 - DNA, 555 bp, Klebsiella oxytoca
atggtagatcaatattacgcactcagggaatttgcgctactcagagaaaaatctgaatctctaagtttatatgccctggtggatggtattcagttcgatcgtttctttaatgaatcacttaaggaagataaaggtattcgctctcttttctgtttaccggaagataagattcttgcttttgccggaccatggttgctgaatgtgtcaaaactatcaggggatcatttagttaaaatcagccagttggaagaaaaatatcctgcggtatcatggattatcagtgagcaaccttttgtaacgctggcccggcatctggagcttagcctgatggtttcactgcctacgaaagagaaaggattattccgtttttacgattgccgggttctgaaaagacttcctgagcttttgtcgtcagggcaggttgcagagctaatgaaatacagccagcggtggttttttctcagtgagggcgaaattaactgttatcagtacgatgccggaatgttagggtgttgtattattagaaataatgaactgagcagggatgtattataa

SEQ ID NO: 195968 - DNA, 1326 bp, Klebsiella oxytoca
atggctgaaaatgtatctttggaccccacaaccatgccgaattgcaccggtgaggtaggtgaacctgctaccatatgtaacctggaatttagccatcggataaaacttgcccctgttgatggggcgtcggtgtccctaaggggtattccatggtctgttcattttgaggaggaaaaatacaacagacagggcatgactaatgcagaaggtaaaacagaacgcatcaaaacaccacaacctaaaaagttttttgagcttgttggaaaattagctgagggatatcggaagcgcggaaacagttttggttcattaaaggagatagaagagagaaaaatatccctggtaacggcgccaaaatatcctgaaaaagatgtcccctattgtagtggatatgactatatcactgtggtgggggccaggacggcaccaagggacttgcgctggcagggagggtatggcctgacggaagagagcaaaggcaatcagtatcggtttattaattgtggactgcgacagttgcgggagtttccgcagtccagcaaaggaaattattctgtacagcgtattatagttgtgtttcagcaggggtatagtgagtatgatattagcaaaataaatgagtattctgaaaaacaaaactcccgggtcatttatgtgaaaaataaagatgaatttgtttcatttctcaggcagcgtaaagcaaaaaaaagacttattaagaaaatgatttttttctgtcacggtataattaatatcgcttcctttcattatgccgggaataatgaagacgcgggtgaattttccattagcgatattgaagatgtctatgagtctgtttttgactatgatgcagaaataacaacctatgcctgtcgtgccgggatctcggtggatggtgatgatctgaccgggaaggatgcgggtcagaagcaaagtccggcacagaagatggctgatagatgggatatgaaggtaaacgcttttgagatgcgttccagttatattggggtttatgggactggtaaagaaatagaattagcaaatgactatgataagacaatacgggcttataaagagaatttatcaaagtatgaagaatctttagctcagggaaacaaaaatgtggaaccaccgcagaaacctgatgattatgatgagaatgtcagacggaatatagatattaaagaaagaaattcaaatgaggacaataatggtggtcctattgcgcccaatggttcccggcgttttccgacgacaggtaacacacctattgggttacgaaagggtttgcaaatatacattccattggaatggaaagagtcatga

SEQ ID NO: 195969 - DNA, 615 bp, Klebsiella oxytoca
atgaaaaaaagaaaatgggttgtcttaatttttatattaattttagtgattttgagctatggaggatattatatgaatcaacaacaatatcaaatgtatgttcgagttaccccagatagtgagaacgatccagagtggccgagtaagaaaaagtggtttgatgctagtagatggattaaagattcaaaatatgtgaaagttaatgatgcgtatttgttaaatattagatatatacctatcgagaaactacatgattttcgtattacactaactttacaggaggctatcaggagatcgattaatcttgaaccaaagctattggatctttacaaaatggacaatcagattttttttcaaacgatgaaagatagtatttcttatgagtatctcaggactcaatttaatgccaagacattaacgccagtaaatgattattttctttttttcttcacttataatggtattgattatgaagtggaggtactaagggagccatatgaagatgggttttcatttccttactctggctttgttcataagaccggttactggcattcaacatctccggctcaatattcctacagggattatattgcaggtaaagctatcaaataa

SEQ ID NO: 195970 - DNA, 753 bp, Klebsiella oxytoca
atggagttcagtgacaatcaggttgatatgctaaaaaaaatatctattgaaagttatattgacgagattaccgagcattgcggagtcattttcccgagattaattcttctacacaggaaggaggatttttgttcttatattcaaaagggtatcactcttgcgaaaaatgctggttacactcaaagaggacccgttcgcctctatattgacatgatgattatacttgggacaaatttcgagcgtgatccgcttcttcagcggctgaaaatggaagagcaaaaagttctcccgcagttagaaaggagcgtaatgtgctgtgaattactggatgattatcttgcaagagtttatggtgaaaacggatgtttttttaaggagagtctgcgaaaatttaaaaaatacagtgttaaatttccccatgaaaaaatacgttccagtaatgaagagttacacgaattattaaggggcatttatccacagcggtatgattttgctggctatgatgctgtaaatgatttggttactctttcaggtataggttgtgaaagacataaactgaagcgagatagtcataaatcatatctggttctcattatgtttttatttggttgctcatttgaacaggatgtttttcgtggtcaccttattactgatccattagtgaaatactttaataacgacgatatcagaggacacaatattattgtgtcgtcttacgcctcttttcaggttaatcatagttggcatcaatag

SEQ ID NO: 195971 - DNA, 201 bp, Klebsiella oxytoca
atgatatggctgaacatatgttcacgttgcaacgtgaagataattcacgaaagctatatgctcttgttgatggggcacaatatgagcgattttactcagatgagttatatgaaagtgcggctattaaatcgttatttgaacattctgaagataaaaacattgcatttgcaggtccttggttacttaatatctcaatcttag

SEQ ID NO: 195972 - DNA, 519 bp, Klebsiella oxytoca
atggcaataagtggaggcattcaaagtccatctgaggtggctaggtgcgaagatcccgcaataagtgcgactctaccatgtgcttcttgctggagcaaggattatgccaaggagattaaagtacacaccgggaaaagatattcggagcagctaaacgcggctggtgaatcgtatgattataattttggaacagcccagtataaattaattatcctctgtaaaacaaaagaaatagttattgttgaaatcagattcaaaattgaatctgataatgcggtaaataaggagtctgttgcacaagctaaaaaatcactaacagaaggggtcaagcaatattgggataatcagttttcattaaaaatttccgaccctaaatgtggtacaaaaatattaccaattgagtttaaggtaatatttgttaagtctgatgaacattatatattcaaaatacatgatgaatatgatcgtgaaggtgtcacgggaaatgttctcgatgtatcgaaggatactggtccatga

SEQ ID NO: 195973 - DNA, 528 bp, Klebsiella oxytoca
atgcgatatagtctaatattaagtttattaactcccttatatacatcaatttctatagcagagagtcccaaaatgacagataatgaatttttcaccatcagtgttagttgcagaggccagaaagaatgtgcatacaataatcagagtgaaatccctgtcattgtgagcctccggaatatatattccaaaggtttctatatacctttggaatatattaaaaagacagggcctagtgtcaaattaactgaccgcgataataaaaaaagcatgccactaaagccaaatcttgttagttgggatttaaagaaaagaatggtttgcatccctgaaggaaaaaatgttgaatttacttggactctattggatagagatattttaccatttataaatgatggtgctgttaatgttgatgctgatttcaagattagaactaaaatatatgacgtcgagaaaaatgaaataggtgagtttatttcattatcaaaaataataataaaaggaagtgatctgaatgaaaataaacgctga

SEQ ID NO: 195974 - DNA, 525 bp, Klebsiella oxytoca
atggctgttacgttaggttctgagtttgaaactgatccaatgtacactgactttagctttaagccagaccaatttccatcaggcaatcaattggaaatatatttatctattcataaaaaatttagcacctacatcgaaaatgtcattggggaagatagcaagtatgcaaaagattttcttggcaggttagagactgaaaatttctcaagcatacatgaaattaattttacagatagaatgcataaattattatgtgatatttaccctcagaagtgcgaatgcttgggacgagaaaaaataaataaactgatagatcttggcactaaaagatttaaacatgataatcccagtccaaagatgcaagcttcatatattatgttaatgtttgttatcggtcatggctttgaaaaagatctgtttcatttaaatgataatatctttaatagtaataattatgatgatgcattttatatattaaaatccaaagggtttattgtaagattcatcaaagtattggttttttag

SEQ ID NO: 195975 - DNA, 387 bp, Klebsiella oxytoca
atgcgaaaaataaaaacaaaaatctacagacctacagctttaacagggaatatggataaacactatatccctgttttacaggatttaagaaaagcgatatgcaacgacagattgttatcaaggcttgcagatagcggcaatattttaatccatagtttacttggatatccggttgctaagtataaaaccacggatattagtataggtatcgaaccattaaatccgatgataagacaggatctaactcttggacatatcgtggtagtcagaaacggaaaaacatctcaggaaattaatggattacttaacaagtcattgccaaaagcgataagcatctttaaggaacatatcaatgaatatgaaccagcaaaaagtaaaatgcgataa

SEQ ID NO: 195976 - DNA, 228 bp, Klebsiella oxytoca
atgaaacagcccgccatcaccgtcaaagacctcgaatgcctggagcacctgcgtaacgtcggccagttcgtcggcgagctgatgcaggtgcaggactgcacctccctgcgtcgtgacccgacccagcagttacagcttacctccgtgatttacctgatgaccgcccagctcgacggcgtggtcgagcgctgtaatcaccgctggttcaccggggagggcaacgtatga

SEQ ID NO: 195977 - DNA, 267 bp, Klebsiella oxytoca
atgcacaccgctttttcttccccgtcttctgcccctgccgcgccgctgatgccggtttctgatgccgttcacgagcgctttattcgcctgcccgaagtgatgcatctgtgcgggctgtcccgctccacgatttacgacctcatcggtcgggaggctttcccgaaacaaatttccctcggcggaaaaaatgtggcgtgggcgcagtcggaaatcaccgggtggatggccgaccgtatcgccgaacgcaaccggggctatgacgcatga

SEQ ID NO: 195978 - DNA, 267 bp, Klebsiella oxytoca
atgcacaccgctttttcttccccgtcttctgcccctgccgcgccgctgatgccggtttctgatgccgttcacgagcgctttattcgcctgcccgaagtgatgcatctgtgcgggctgtcccgctccacgatttacgacctcatcagccgggaggctttcccgaaacaaatctcgctcggcggaaaaaacgtggcgtgggcgcagtcggaaatcaccgggtggatggccgaccgtatcgctgaacgcaaccggggctatgacgcatga

SEQ ID NO: 195979 - DNA, 360 bp, Klebsiella oxytoca
atgcgccgaacggtcgagcgcatggccggtcaggagcgcaggctgctgactgagtcccatcagctccggggcgagcgtggccgccagctctgtcccgtgcgcctgcataaagtcattcagccggttgcggatactgatgcgctgcaccgcttcatgagagcggatatagcgtccggcggcctgatttatctcccattttttgacatcgataatgtcgcgcagtgtctgcattctgtccggtatacggtcatccccggccagcacctgttcctgatattcctgctctgcggccgccagttcggctttacggttcagccaggcggttttgttattctgacaggcctcaaaggcctgctgtag

SEQ ID NO: 195980 - DNA, 312 bp, Klebsiella oxytoca
atgtacgaacgttacgcaggactgatttttgatatggatggcacgatcctcgataccgagccgacgcatcgtaaggcatggaacgaggttctgggacgttacggtatgcgttttgatatgcaggccatggtcgcgcttaacggttctcctacctggcggatcgctcaggccattatcgaattaaatcaggctgatttagatcctcactctctggcgcaggaaaaaacggacgccgtgaaagcgatgctgcttgatagcgtccgccccttaccgctgattgaagtggtcaacaaaaactggccaccgcgttag

SEQ ID NO: 195981 - DNA, 129 bp, Klebsiella oxytoca
atgaggaagctgaccgttaagccgctttcttttgggtatagcgtcgtggacagccattcatctgccctgtgtttcaacctgccgtatgaagcaaaaacccccgccattgctgacgagggttttctttga

SEQ ID NO: 195982 - DNA, 129 bp, Klebsiella oxytoca; identical to SEQ ID NO: 195981

SEQ ID NO: 195983 - DNA, 141 bp, Klebsiella oxytoca
gtgcaggactgtacttccctgcgtcgtgacccggtccagcagttacagctcacctccgtgatttacctcatgaccgcccagctcgacggcgtggtcgaacgctgcaaccaccgctggctgaccggggagggcaacgtatga

SEQ ID NO: 195984 - DNA, 525 bp, Klebsiella oxytoca; identical to SEQ ID NO: 16553

SEQ ID NO: 195985 - DNA, 474 bp, Klebsiella oxytoca; identical to SEQ ID NO: 52832

SEQ ID NO: 195986 - DNA, 537 bp, Klebsiella oxytoca; identical to SEQ ID NO: 16554

SEQ ID NO: 195987 - DNA, 327 bp, Klebsiella oxytoca; identical to SEQ ID NO: 16555

SEQ ID NO: 195988 - DNA, 408 bp, Klebsiella oxytoca
atgagcgagaagactttaggtcagcgcatacttcagcgccgaaaagaaatcaaaatgacgcagcgagagttgggcaaagctgcgggggtttcctatgccacgatttcgctgtgggaaagtgataacactgagcctacggggaaaaatttacacgctctgtctcgcgccttgcagtgcacacccacgtggattctgttcggcgattcagatcagaccccaggcgacccattagcgttaatcgagcaagataaactctctgacgatgaaagagagttagttgatttgtatcgctccctaccagagtcagagcaatcagctcaattggaaaccctcagagcaagagtcgaaaatttcaacaccctcttcgaagaactcctcaaagcccgcaagagaacaaataaaaaataa

SEQ ID NO: 195989 - DNA, 225 bp, Klebsiella oxytoca
gtgagtcatgaacttacagatagccagattcttgctgacctcattggtaccctgcagcgttatggctacaacgtcgatagaaagtctctttcaccagtcttgcgaatcgtgcttcaggatttaaaggctcgccagcaggttgcagaaacgatgattcgctatctggaatcgccgcatttgctggctatcgacactgctccgacgcggggaactggcgatgcctaa

SEQ ID NO: 195990 - DNA, 423 bp, Klebsiella oxytoca
atgaagcagaagatacatgaggtcaacgggttagaattcacccatgaacgctataatttcaatgggcaatggatctaccactggtattttaagcccataggacaatctgaatggtgcccatattctcttccgaccggaaaaacaaaaaaatctgatgttgagaatttcttaactaacggtaaagaggccaacagtcattatcaagcctggttaaaagatgcttcggatgtggaaggggcagaacgaaatctattatccgcacagaaagcatttgaacgaatttctagccctgaatggggagggagagggaataatccaaacaaggatgtcaggagggtgcaacaagcaagagatactctcgaatcggcgaaagcaaagcttgaaaaagccaagatattacgagaaagattaaatagtaactaa

SEQ ID NO: 195991 - DNA, 153 bp, Klebsiella oxytoca
atgcgcccggttgatgccggatacatcacttacatcgcacttaaagacggctcggtagacctggccgatgttgcccgcatgaatgactggcttgacctaaaagccgataacgaataccgcatagcgaaatggggagaggacaatgaacgctga

SEQ ID NO: 195992 - DNA, 345 bp, Klebsiella oxytoca
atgagatcgtggataatctcgctgttggcagtggcttcatttggggcgactgctggcaccattactatgcagtgtggtggtttccgaatggaggctatccctgattctttgttcaagattaatggtgaaactgtgacctcccagaaaattaagaccctcgggaatgggaatggaatgcgcgtggatatgggcctaatgcccgctaaagacggcaacaactacggatttcagtacattcatcgccctggcactgaatctcgattcttgaacgttcaacttcttgaacgcagcatggacgcgccgaaggtaatagggtctttccgttgcgtgaaggtcggtaactaa

SEQ ID NO: 195993 - DNA, 564 bp, Klebsiella oxytoca
atggacatggatgaaaagaaggaagcaaaggtaaaagagaaagaagacgagctgattaaacgggccgaaatactttttgatcatcaaaaaaaacagtacgaactctctgttgatgggcttcgaaaacttgaagataaggccatgaaaatttttagtgccttaagcattataatcacaattactatcctgatcgttcgtaactggtggattgatatatttcctgggaaatactacccgctccatgccatatgctgggcgagcttattgatttttatagccctctctctgatttcatggggatttgttttcagcgcgatgcaaccgaaagattttgaaaggccttcatcagaccccaatcacattgaagctttgtttatgaagaacaaaaggtatgactcgttatcatcatatgctcgggaatattcacgattaactggtagagtcgatcaaaatcatgtagaaaaagtcaagatgattatgcactgctccgaatcaatgctatttggcgcttgggcatttgtcatttttttactcacattcctgttaattaaattcaatcaatag

SEQ ID NO: 195994 - DNA, 192 bp, Klebsiella oxytoca
atggctgaaaatgaaaaaccgagtaatcaggatcaactcccattacacactcctgagccgcttaaaaaatcctatatccaggatagtattgatgacgcagcagaagttatgttcaacagtgcgctaagtgtaccaccaggcaaagttgtgacagaaagctataaagatccgaatgacccttcgaaccaatag

SEQ ID NO: 195995 - DNA, 2298 bp, Klebsiella oxytoca
atgccattttatttaacgcgggatcccgtcccgtcggcagacatgcgcaacgtattcgataatgcgcagaatttagacctttttctgaacgacataacatcggcattctggacggatcgacttggtcgtagtcgaatgtcatggtttgggatggaatctgcattcaccgtaaaacttacggattttgaatctcgttactccacccaacttacagcccaggaaactgcatttgatgctgcgcaggctgacaaagaggctcgctttgttcatttccttgatagctctggctatgtgttcctgggtgactatgaagacggcccattccagtttagtgcccgcaaccaatatattcgctttcagggacaatttttccgactgagtaaaaagaccgatacaggttttactactaccggtactgatgaaacaagctttgctaacgatgtcacccatctggttttgatggatggggacacgcttcgccaaaacctgggttcagacgaagaagggttgggtgctgatttagtcaacacggttcttgatatttctgtcggtaagtacatccaaaatgcatcgccgaggatctcagattacaaagtcacaaaaggcgcagatgcgactctggcttttgcgaaagcgtttgctaaagctgcagaaactacaggcgttgtaattgtcgatgttagttgtgttctgacgacagcagttgtgcctgaggggatgactgtaagaatttgcgactacgtaacggtaactcacccggataacgcaccggcgtccatgtttattttatcctccggctcggtaatgaagggaaataataaaaaaggtcgcctgaggggtaactccgcgaatcagtcatcgatacggcgctgtatcagtgctgtaggcgtgacggacgccggtgttgatggcgtcgatattcgtgatttcaacagctacggtgcgtattttgagaactgcgaagataccttctgcagaaggtcaaccatacgtgatattactggcggcccggtcgaaacagccgcaggccagtacattaccaactgcattggtcacgagtccgaatataacgatatccgggatactgacagcaatggcatcaaattccgggctgatgccagcgggctgacgcgcggctgcagttcgtttcacgacaaagtataccgggctgggttcattggcattgcgcacagcaagatacaggaccacacaaccagccatgcgtattgcgttgattgcgttgataacggcatggacatgaacggttgccagaatgtcacattcattcacagcacatgcgtggggtgccaggatggtttctatctgggtgaaaacggtattaataactgccatgttatcagttgctctgcgcgaaactgtaaacgtgctggcgttggcagtcttggcgctcttgtgatgtgctcagttgttaatacaaatattgatggctgtggttgcggtatatatttatccggctttaacgtgttcaaaatacgcggcggcatgattatgaactgcgttaaaagagtttacgttgataacgaggataaaaataacccgaacaaaatgagtactggtatcgggattgatattcagtctgacctttccgggctacctgcctgtaccacgcctgatattgaaggggtgacgttcctgaataatgcaggtcatgacatcgcttttgggggtggccggctccagtcgatcgccgttactgccggggggagtggctacacctctgcgccaactgtagaaattgccgggggcggcggaaccggggctttagcgacagctaccgtttccggcggatcagtgacaaagatatctgtgctgtataagggctttggctacaactctgcgccaaccgtgaccatttcaggtggtggcggcagtggtgcgacggcgaccgggactgtgagcagcggcggcgtaataggtcagctccagcttgggcgatgcacattcaaggacagcggtggagacggcaaaatatactacggtagtgcaactctcgcagacagccagataggtaacagcatggggtatatcgtctccagaacgcagacgtacaatctggctggcgatggtactacagttgagtttacgctttcactgccagaggaggttactgacgcaaattaccgtattgtttcggtggtccctgactggctaacgaccgtcagatatctggataacacaaaaggaacttcatatttcggcgtcacgtttggcagcgctccgccatcaggtacacgtcgcctgaatatcacgtttgaacgtcttcgcccggcccactga

SEQ ID NO: 195996 - DNA, 1242 bp, Klebsiella oxytoca
atggaaccaacattgtcattaaccgtgatgttctgtgctgcagtgggtgcttcagtatcagaatcgctgtcggaatccgagtcactgtcggaatccgagtcactgtctgaatccgagtcactgtctgaatccgagtcgctgtctgaatccgagtcgctgtcagagtcagaatcgctgtcggaatccgaatcgctgtcggaatccgagtcactgtcggagtcagaatcgctgtcagagtccgaatcgctgtcagagtccgaatcgctgtcagagtccgagtcactgtcggaatccgaatcgctgtcagagtcggaatcgctgtctgaatccgagtcgctgtcggagtccgagtcgctgtcagagtccgaatcgctgtcggagtccgagtcgctgtcagagtccgagtcgctgtcggagtccgagtcgctgtcggagtccgagtcgctgtcagagtccgaatcgctgtctgagtccgagtcactgtcggaatccgaatcgctgtctgaatcggagtcgctgtcagagtcggaatcgctgtccgaatccgagtcgctgtcggaatccgaatcgctgtcagagtccgagtcactgtcggaatccgaatcgctgtctgaatccgaatcgctgtccgaatccgagtcgctgtctgaatcggagtcgctgtccgaatccgagtcgctgtccgaatccgaatcgctgtcagagtcagaatcgctgtctgaatctgaatcgctgtccgaatccgaatcgctgtcagagtcagaatcgctgtcgctatccgagtcactgtccgaatcggaatcgctgtcggaatccgagtcgctgtcagagtcagagtcgctgtccgaatccgagtcactatcagaatcggaatcgctgtcagagtcagaatcactgtcagaatccgaatcgctgtctgaatccgaatcgctgtcgctatccgagtcactgtctgaatcggagtcactgtcagaatccgagtcgctgtcggaatccgaatcactgtcagagtccgaatcgctgtctgaatcggaatcgctgtcggaatccgagtcactgtcggagtcagagtcactgtcggaatccgaatcgctgtcggaatccgaatcgctgtcagagtcagagtcgctgtccgaatcggaatcgctgtcgctatccgagtcgctgtcagcatccgagtcactatcggagtccgagtcactgtccgcatctgagtcagtttctgaaatcgaagagtggtga

SEQ ID NO: 195997 - DNA, 420 bp, Klebsiella oxytoca
atgagtagaaataacgaaacaagcggcgttgaactggttgtcgtcggcgtatttgctttctgtctggcagttgttgcctggctaatgaaaactttcgatgttgaatggcaaacagcactggaaactgcgcctggcctgatagtctggctgcttgttgttggggcggggatctttttcgggatcaaaatggaaacaggtcttgttcgctggggtgctccactggcgatcgcccttctgattccggtattcaaaccaattattaatgaagctgccggagtacgtgaaatggatcggttggttttcgatgatatggtttcgtggtacggaactggctggggaatgtcgttaatgtttttcggaattcttatcgtcggatacggtctgctttattggtggcacagaagaaattcatattattga

SEQ ID NO: 195998 - DNA, 528 bp, Klebsiella oxytoca
atgcattccttttgtgaacttattgaaagaagtacctcgtttacactctacagtcttgaacaggcagaaactgaagtgattggactgcttcaaacaagttcagcaaccgtatacatcaaacagctgcagatgctgcaactccagaggtcaatttttgccgttggtatgttttccatttttgaagcgcatttacaaaatggattgagttgccaaaatggatttaaagaagttcgcactattcttgatgcggcaggaaagcatgaacttaaagaaaggtttgataattactaccttgctattaatgcgttaaaacacggagatggtgcaagttacaggcaacttgtaaccaagatcaatgatcttgaatttgatgttgaaactccccacactcctgtttacgaagaaggggatgtttcagcaataaaatccctcatcaaaacagatgatgcttttattctgggctgtgctgaactgatccgagagatttcggtaacgattagcgaacagcatccagacttttatgcatag

SEQ ID NO: 195999 - DNA, 966 bp, Klebsiella oxytoca
atgcggacatttctagattgttccggagaacttgtccagatcgacggctcccaccacgactggtttgaagggcgcgcaccaaaatgttgcctgctggttttcattgacgacgccaccggccggctgatgcatctccggtttggtgaaacggagtctgccttcgacgatatgatggccacgcgcgagtatgtcgatcggcacggcaaaccacttgcgttttacagcgataagcacggtattttcagggtcaataatggcggcgccaccacgaccggaacaacgcagtttggccgggttctcgctgagctgggtatcgagctgatatgtgccaacagcccgcaggctaaaggccgggtcgaacgtgcaaaccagacactccaggaccgacttatcaaggagttgcgactcgaaggtatcagcaacattgaggatgcgaatgtctggctggatatctttattgccgactttaatcgtcgctttgccagaccagcaaaataccccaaagatctgcaccgaccggtggcagaaaaaatcgaagatctggatgatatcttcgcgtggcaagagttacgtaagttgtcgaaatcactgacgttccgttacgataaaatgatatatctcgttgaacccacagaagaaaacaccagaattgcaggtgagaaaatcacagtctatgactatcctgacggcactctggcattcaaatgtgcctaccgatcactcaattatcaggtcttcgataagctggaatgcatcgaccagggacaaattgttgataacaagagacttggtgccgtattgaagctggcgcaggaaaaaatggatgagctggaacaggagggaaaacgggacaggagtaaaaagatgcctaaacgacgggcacaggccagagttcaagagcaacttagagccatcaacccggtactggccaacccggaagagttcagagccagcctaaaacgttaa

SEQ ID NO: 196000 - DNA, 297 bp, Klebsiella oxytoca
atgccgggcctcgctgaacgagcactacgtattatccgcgaacgctacgctgattttggcccgactttagcctgtgagaagctcgccgaggttcatgggctgtatctggccaaagagacggttcaggacaaacgggacaatacccgctcgcaggccctgccatcactggatggccagacctcacgcagaaagaaacagcccggaaagaaatcacaaagaagcctgaaccaggacgacatgctggaagccctgcagcaactccagacaagaagccaggaaatctttggcaaaagctga

SEQ ID NO: 196001 - DNA, 354 bp, Klebsiella oxytoca
atgttagatatcgctgaagtacttaaagcgagagaaagtgagtttgttagcttgagagagctagttacgcgtattcgcttacatcaaccgcatgtcagtgaatcccaaattgcagattttctttacatagaagaggccaatggcgatcttcctgaatgggttaagcaaggcatcgcgggtactattgagccaacatatactgacaataattatgatggtgacccctctttaatatctctcctcaaagctatacgtgaagaaggatatatgcctgaagtgacacctacgctccaggctgctcagcctgttgtgagcgaaccccctatggattttgacgatgatattccattctga

SEQ ID NO: 196002 - DNA, 456 bp, Klebsiella oxytoca
atggccggttggggaagcagagatcattggtcagcgcctcattttgatgtgtatggttttaggcgctcagatttaaagacattagcagaaaagctaagcatggatttgtctattccattagataagataacgccaagtattccagatactacggatagtaaacccttgagcgaggctgatgttgaaatgttacgcatggaaattgattcgcttaaaaggcaagttcgtaaacttgaaagtgagcgtccaattctcataaaaaaatatagagaggacgatccgctttttctggccatacaaataagaaacaaagagtggttaaaatatgatcatgagaatgatagagctacacgtgcgaatcaggcttctatcaagcaagagttggaagggatggggttcaccagtcgtcaggccgaatccatcgagctagtcgcttgccctatcaaacgagggtga

SEQ ID NO: 196003 - DNA, 198 bp, Klebsiella oxytoca
atgtctcataatctaattcgactccctgaagtacagcgacgcactggttatagcaaagcgtggatctataaattgcttaaagagaagcgatttcctgcggcagttaaaattggttctcgtgcaatcgcatttgtagaaagtgaaattaatgattgggtgaaccagcgtatcgctgaatctcgcggtgaggtggcgtaa

SEQ ID NO: 196004 - DNA, 435 bp, Klebsiella oxytoca
atggaaaagaaaaaccgccctatacagcaggcggctaactcagatactcgcggatttgatgttacgccaccagcccacgtgattcaagcgccacgccgtaccccaaagaaacaccgtgcccgcaccttcatgcttctctgcggtaccggagggtggactgaaaacgatattctgcgcgtctgccatctctcatctggccgcaattatgcgagcgaacttgagcgcgagcttgatatctgcctggaacgccttgaagagaaaaaccctgatggtatcggggcgcacatgcgctaccggtttgcgtgccgtggtgacgtgctgaaggtgattcagttcgttaaccacatggcagtgatcaaccaacaccacgggatttctaaagaggatatcaccgccatcctgaacctctacccggacagcttcaccgccgcataa

SEQ ID NO: 196005 - DNA, 180 bp, Klebsiella oxytoca
atgactaagcccaccagcacaccgctgccaaatcactcctaccgcgacgcgcagggccagacggtgcacgtcgtatctgtggcgcacaaccgcgagacgttctatcgcgatggctaccagttcccgtgcgtacaacctattgagcgcttcatgaaggagtacatggaggtgaagcaatga

SEQ ID NO: 196006 - DNA, 264 bp, Klebsiella oxytoca
atgaatataaacgctatatgccgccatcctgccgaacttgaggccgaggcgacgctatcccgtgtgcagccttatccggaagattttacgctggcagagcgtaccgcggaacgcatgacccgcgcccgtaatggtctggctcacgttatgacagatttatccccacaccttgacgttgagcaagcagtcatcgtgcattgctggctggataaagtcctggcgattgtcgatatagcccgaattgatgcggagaccagcgtatga

SEQ ID NO: 196007 - DNA, 213 bp, Klebsiella oxytoca
atggcagcgcatcgagtcccacctcagatgatggggattatgcttggtaatgttgggggatttggtgatgtggaaaaatctgcgaaggttttctttcataatgagatcaagtacctactttacaggttatttgaaatcaacaaatgggttgataaaaatggaattaactttgatacaacccctctcagaggagagggggtggcactaaggtaa

SEQ ID NO: 196008 - DNA, 1026 bp, Klebsiella oxytoca
atgacagcagttattaaatttgaatatttaatagcaccattgatatgtacagagggacatatcgatgatcatgtcaatggtatgaggctgttaaaagaaatggtttcaaatgctgatattgatgttaaatgtgaggaatcaataataaataatatgattgatgctgggtattttccctgcacaagagttttaagtaatgcatttcctagtggagatgagtgtgtccatagtgctcaggatgttgcaaaactaattaataatctaatagacgagattgatgagtgtcctgttgagttaaaatcccatgacattgaatggggtgagttctcaactgagccaattatacacacagtttctttagcgagaaatgaacatgttttatcatttttaaaaaccattctatcgagaaaggcattattacaagaagatttctcaatgttctatactcaaagaagtaataaacttagtcaatctcaaaattattctattaatggtacggttaccgatatttttcctaacgaaaatattggactacctttaattattagtgacaaaattaaggcatatggaagtctttatgactttataagtaacctagatggttattcgctattttctaatgcaactaatttatcatcattgaaatgcgcgctttattgtggatgtgttaattttttaaagaagcattacaatcaagaaaatattgagtgggatgatttcaaaatcggacaagatttttatgattcactgataagaaatcaatgtgctaatgctcaagagtactcatccgttgtatatgagacaattatccaagttttatgtcgtcaccccaaaaatgaggtaaaaccttttagggtttcgtctaactccactatacagcgaaccattggggatttaaaagcttggcgtactcatatcacgtcaaaacatcaagcgttacgtttaatgttttgggttgattcaaatagagtgattacattagctaatgttgggccaaaatttgaggaaaatatttctttaccttag

SEQ ID NO: 196009 - DNA, 840 bp, Klebsiella oxytoca
atgtataattcaaatctattgcaagatatagaaaatgcaatggcttatagcttctcacgaagcataaaatatcttggaccacttagacatgaaccgcaggcagtttattcatcgagcccatatgatgcaaatactgtcggattaaaaggggagtttacagcttcacttcttcatcgttatcgcgcaaagtatgtccattataaatcaccttcagtaattgacggaaaggtgaacatggaagaaaaatatgatactttaaacaatgcctgtaaagactggctttctttcttaggtgttgttgaagaggttagaacaagtgataaaggaaaattaggctatgagctttatgttaaaacttctgatggagagaggtggcaggatttaactcatgttggtgttggagttagtcaagttctaccgattgttcttatgttccttaattcatcaccttctgatgttttgatcttcgaacaacccgaattacatttacaccctaaggtccagtcaaaattatgtgatctcttcctgattatggctaactcaggacgccaatgtatagttgaaactcatagtgaatatatgattaacagattgaggcttcgcgtagctcaagatttcgatggtaattgtttagctaaatccgttttgtattttataaataaaaataacggcatttctgattttcaacgcattggtattaataaatatggtgcaattcctgattggcctgctgagttttttgatcaaactgataaagaaatagaaagaattttgatggaagcaagcattaaaaagaacaaagataaagtgaagaggtttaacaatgacagcagttattaa

SEQ ID NO: 196010 - DNA, 213 bp, Klebsiella oxytoca; identical to SEQ ID NO: 149220

SEQ ID NO: 196011 - DNA, 318 bp, Klebsiella oxytoca; identical to SEQ ID NO: 52346

SEQ ID NO: 196012 - DNA, 705 bp, Klebsiella oxytoca
atgtatccggtcatacacggcgccgccccggaaaaagagcgcagagtggcagactttcccggaggcgatgctgcgcatctgtccgggctacgcatcctcagcagcctgcgggcctgtagcccgggcaggcgctttgcgccgcccccgggaaaagagcgcagagtgacagactttcccggaggtgatgctgcgcatctgtccgggctacgcgtcctcagcagcctgcgggcctgtagcccgggcaggcgctttgcgccgcccccgggaaaagagcgcagagtgacagactttcccggaggtgatgctgcgcatctgtccgggctacgcgtcctcagcagcctgcgggcctgtagcccgggcaggcgctttgcgccgcccccgggaaaagagcgcagagtgacagactttcccggaggtgatgctgcgcatctgtccgggctacgcgtcctcagcagcctgcggcccggtagcccgggcaggcgctttgcgccgcccccggggaaagagcgcagagtggcagtatttcccggaggcgatgctgcgcatctgtccgggctacgcgtcctcagcagcctgcggcccggtagcccgggcaagggctttgcgccgccccccggaaaaagagcgcagagtggcagaatttcccggaggcgatgctgcgcatctgtccgggctacgcgtcctgagcaatctgcgggcctgtag

SEQ ID NO: 196013 - DNA, 1875 bp, Klebsiella oxytoca
atgagcacaatcaccccccactaccgaaacgtacaacagttgctgcaaagccaatccttttctatcgatgaatatcagcgtgagtacaagtgggagaaggagaacattgacgagttgctgtctgatcttcagggaaaattctttagttactacaagcagggtgatgaaaccagcgctattagtagctatggagagtattttcttggttctataattgtcagcaaacgcaacaacaaaaattacttgatcgatggccagcagagagtcacctctttgacgttgttgctgatttgtctgtaccgatctgccgaggaacagaggctgccagtagcccaaaccttagccccacttattttcagcgacaatctcggtaaccccaagttcaacctcgatatctctgagcggcttcctgttatcaatgccttattcaaaggggaagcgttcaatccggatggtaaggatgaatcaatacaaaccatgtacgcccgttatagcgatattgaagcaaacgacttgatggcagagatcggaaatgcattgccgcatttcatctactggttgttgacacgggtaggtttgatagagattgccactgataacgacagttatgcttacgccatttttgaaacgatgaatgatcggggtaagccgcttagtccagtagatatgttgaaggcatatttattggctccgattgaggaacaggatgcgcgactacaggccaatcaagtatggaaacagcaagtcctggaattgatctcctggggaggggtgcacgaaccggagcgagatgccaactgtattaaggcgtggttacgggcacagtacgcagaaagtatccgtgaacgtaaggcgggatcggtcgataaagattgggagttgatcggttcggtctttcaccgctgggtgcgagaaaatagctctcgcctgggtttgggtaaagctcaggaaaatcagaacatgatggctgtaagctttccattttttgccaaagcgtaccggcgtatcctaaacagcagcaaacaatacacaccggagctacgagcggtctactacaacgctcacaatgattttacttggcagaatacagtgctccttgcatcgttgattgaaactgacgacgacgaaaccgtggaccgtaaactggcggtcacggctacttatttggacatttggttgatgcgtcgagtagtgaattatgttcgggttggatattctagcgtgtcttacgctatgtggttattgtgccgggatatcaggcgtaaaccgttatcagagttagtaactatcctccagaagaagctggcagatgatgatgttacgttctctggctacgcagtaaaaggacgaacgggtattgacggtttagggctcaatcaattcagtcgccgttatatctaccatttactagcacgactgacagaagcaactgagatcggtgcagggcgtactgagacatttgatcgattggtggaccgtactctcaagaacccattcgacattgaacatatctgggcggatgattacgaaatcgtgaaagagcagttcagtactgagcaggaatttcaagattggcgcaatcatgttgcgtcacttttactcttaccagcagatgttaatcggagtctgcaggacaaaccgtttcccctgaagcgggtgcactatgccaaacagaacttctttgccgcaagtttggacaccagtgtttacgaacatcagccacagtttcagcagtttgctactcaatatgagttgcctttcaaattcgctgaggtattcgacaaagcggaacaacaggtacgccggaaattgattgcgggattagtagaattaatttggtcaccgaatcgcttatatgaggccgcccatgtctga

SEQ ID NO: 196014 - DNA, 417 bp, Klebsiella oxytoca
  misc_feature (314)..(323): n is a, c, g, or t
atgtctgagcaaccactacagaactcactttttgaggacgattacctgctacgggagcttggacaggtagcacatgttccgcaggtcgctttaacagagttagttgccaacgcctgggatgcgggagcgtcacgagtggacttggttttacctaccgaaattggtggattattaactgtgacagacgatggtcatggtatgacaccggagcaatttaaaaagcgctggatgactttgcgctacactcgcgagaagtatcaaggtttcaacgtagagtttcctgccggacgaacggcccgcccgcgaaaggcttnnnnnnnnnncatattgagtagcaaactgctgaaactgtggcttatggtcgcaatggtattggtcgccatggcttgctttgttttgctgacgaatacgaagtga

SEQ ID NO: 196015 - DNA, 1569 bp, Klebsiella oxytoca
gtgaaaacctggcgcgatggtattttggcaacctttattgttggcaccggagctggttcaagccctttcgtgtgccgaagtgagactgaggagaaacacataggctgcggtacacggttgcaggtacaggtaacacgcaagctgcccgatgccgatgaaatactcacagtattatccgcccgcttcatccatgatcctgagttcgaggtgcgcgttaatggcaagttgcgtccctttactgagattaatgggcgaataagtgaagaaaccctgtacctcagtgctggacgttatgccaaagttgttgtcatcgactcaactcgtctgaatcattcttctttgcaccaaggaatcgcattttgggtacaacatagattagttggaaccccgtcatggtcggttggacagatagctaatttcgatggacgcactcgctttgcccggcgttacaaggtgatcgttgacacagaaggtttcgaatctgatgttgaacaagactggaccgcttttcttgccactgatgccgtaaatgaattatatcaggctacagctgagcacattcgtgaggttgcacggagacttgctgtagaatttattgaaattacatcagaagacgctctgatgcaaaaccgctcagagttagcaaccttgggtcagggggcccgcttgggagtagctgaattcactacagcggttgcccaagaacatccgactgtctcccctgaatttcttgccacagcagttaaggcgcttattaatcttgaaaagaccaagagtggagccgcattactggaaaagcttgctactttgcagcacgacgatgtagagggtttagatcggttactggctgaatggacagtcaaggacgccttgcgggtccttgatgaaattgacagtcgactcagcgtggtagaaacaattcagcgtttggcggatgatcctgaaacggatgagttacacaccctacatccgttgattttgcgttctcgttggttgtttggtcctgaattcgaatcgcaagaatattgctcgaatatgacattacaatctgtagcccgtgaactattcaaaaaccctggtgctcaatttataaacgagcgcaaccgtcctgatattgtagttttgccggaaaaaacaacgtggcaaatgactggcatcgaatcatttgatccaatagatgtgtctctagttcaaatgcaacaggttttggtaattgaactgaagaaaggcggatttgagctcacaagaaaagaggtgaatcaagctgatggctatgtacaggacattgcagcatcaggtttgataacaggaacgccatttattaacgcttgggtcgttgggcaaaaggtagcggctggtgttgcccgtgagaaagttgttggtgatggagaacgtactccgtatgggagggttcgcgctacgacgtttggttctttggttggaacagctaatgctcgattgatgaaactacgccatgttttagcagataggtacgaaagcacatctacagatgaccttatcaatcgagtgttatgccaacccgttcagtcaggcttgaaatttaaataa

SEQ ID NO: 196016 - DNA, 318 bp, Klebsiella oxytoca; identical to SEQ ID NO: 52346

SEQ ID NO: 196017 - DNA, 213 bp, Klebsiella oxytoca; identical to SEQ ID NO: 149220

SEQ ID NO: 196018 - DNA, 1176 bp, Klebsiella oxytoca
atgagcctgcaaaaaaactggggtaacgttcatctggctgcgctgggcgcgatactcctctccacgctccttgtcgggtgcgatgagggggccgcgcaaaacgccgcgccgcaagcgcctgtggtgagcgccgctgacgtggttgtgaaatccattagccagtgggacagctttaatgggcggattgaagcggtggaaagcgtccagcttcgcccccgcgtttccggctacattgataaagtgaactacgtcgatggccaggaagtgaaaaagggggaggtgctgttcaccattgatgaccgtacctatcgcgccgcgctggagcaagcgcaggcgacgctggcgagagccaaaacgcaggctagcctggcgcgaagcgaggctaaccgcaccgataaattaatcaataccaacctggtctcccgcgaagagtgggagcagcgccgtgcggcggccacccaggcgcaggctgatattcgcgcggcgcaggcggcggttgacgccgcgcagcttaatctggactttactaaagtgaccgcgcctatcgatggccgcgccagccgcgcgttgatcaccagcgggaacctggtcaccgccggcgacagcgccagcgtacttaccacgctggtatcgcagaagacggtttacgtctactttgacgtggatgagtccacttaccttcactatcaacatctcgcccgcagcgggcagggcgcgtccagtaatcatctggcgctaccggtagaaattggcctggttggcgaagagggatatccccatcagggcaaagtggattttctggataatcagttaacgccgagcaccggcacgatccgtatgcgtgcgctgctggataatgcccagcgtcagttcacgcctggactgtttgcccgcgtccgcctgccgggcagcgccgaatttaacgccacgctaatcgacgataaagcggtgctgaccgatcaggatcgcaaatatgtttatgtggttgataaagatgggaaagcgcagcgtcgcgacatcacgccgggacgcctggccgccggtttacgcatcgtgcagaaaggcctgaatccgggcgatagagtcatcgtcgatgggttacaaaaagtgtttatgccggggatgccggttaacgcgaaaaccgtcgccatgaccacccgcgccgcccttaactga

SEQ ID NO: 196019 - DNA, 288 bp, Klebsiella oxytoca
atggaaacagatatcatctttgctgatgatattgactccgcagccatgatacccgcagttcagtctgctatcgctggtttaaaatttgatgtatttaacgatgaagtgagtaacctattaaaggttaaacataagcaggtcgttaaagacgctctggacgcaagctcagactttctggatgcggattgcgtcatggaccgactgggtatttcatacagtgatgcagaactccggacttccggtgctctggagctgcataacgctcttctcggatgggcatcagaatga

SEQ ID NO: 196020 - DNA, 435 bp, Klebsiella oxytoca
atgattttttccccggctttacagcaaattaaggacgtcggaacaggctcgtttgttgcggctgaggttttggctcgttggtgctgcgaaggccagatgcttactccatcggagttgtcatcacctcctaattggggcttggtagatattgagattgccaggttcattcaagataacctttgccattgcagtgaggaatatcaggctctttttgttaatgtgtcagagcagactttgaaatctgacatcatctttcatacgtgggctcagataattagggcaatcacgaagaattatccattaaggcttgtcatcgagatcactgagggggttcaagacaaatctctagcatttagatggagctctcttactgcgatgggggttaatctagctcttgtgacctgctccccgttgattagtacaccccgatgttag

SEQ ID NO: 196021 - DNA, 1269 bp, Klebsiella oxytoca
atgatcagatcattggccgcgcatatcccctgttctaagagcgttattgtggcgctgatgttctctgtggctggcggaggggcatccgctcaagagtctccgctgtcagaacaagatagggagtttattgagcaaggaaagcaaattgcccaaaaggcccagaggatggaaatgccatctctgttgcagaaccaacacatggacgaggctcaggccgaagctaaggcgttgttcaatcagctccaatctactaacccgacgctcaaggagatgcaccgtaagcaggctgaaaaaggcatctactccgaccatcggatattggttttcgcgtctttgtcgcttggcgaacaggggttggatgatgtcctaaccgctgtgtcgggtcagtctgatgcggtgattgtgttccgtggtgttccagaaggcatgaatctggggcagggggttaagtctattcaggctctggcggccaaaaaagaccctgtgccaaacgtcatcatcaacccaactttgttcaaaacgtacaaaatcacagccgttcccacgattgtgatgcttgaggatgagccgttgcctggcgagcaaccaaatgtcgttgcccaagtttccggtttgtccgacccagtatggttggctcgggaagtggataacggagaaaaaggcgatctcggcgttaaggggccggtggagaaaattagcgagccagacctcattgaggttgccaagaaacgccttgccaatatcgactgggaagagaagaagaagctcgctgttgagcggttctggaccaagcaaaacttcaatgagctacccagagcgcccaaatctcgaaccagagaagttgaccccagtgtcatgatcaccagtgacatcagcactccagatggcacagtgttcgctcacgcgggtgacgtgatcaacccgttgtgcgatccgaaagaagtctgcaaaccgggaacacggccatttacccaagctgtcgttgtcttcgacccgttggacaaaaagcagatggagctgctcgccaagaaactgcctgaaattaagaaggagcctggagttcagcggatcacctatatcgctacaaagttcgacaaagacaaaggctgggactcctacaagagtgttaccgacagctttgatgcgccggtatatctactgacccctgatctgattaccaggttcgagctggagcacactccgagcgtgattacagccagaggcaagaagtttctcatccgcgaatttgctgaggagggcggtgaatga

SEQ ID NO: 196022 - DNA, 531 bp, Klebsiella oxytoca
atgaaattctcattcaagacgtatttcgtcaaaaaggaatcctggaagcgtttcgggcttaaagccggtgtgacgctgctggttctctggggggctggtgtggcttttgccagccgctaccgtattggtattgaccctcaacaggagaagtgcctgccgggttacaccttcttcctcattgatctgaaagaccaatctctggagaggggggctgtttacgccttccacgctaagaacatgcagcctttctacaaggacggaactcgcatggtaaaaatcctcaccggtatgccgggggataaagtcgagatcaacgataagtggaagatcaccgtcaatggtgatgtcgtcggtgaggggctccagcttgcagggaaactacatctgcccgagagccacttttacggcaaggccacactgaaagagaacaactactggtttatgggcaaaagcctattcagcttcgactcacgctactgggggactgtgaaaaatgatcagatcattggccgcgcatatcccctgttctaa

SEQ ID NO: 196023 - DNA, 318 bp, Klebsiella oxytoca
atggaccttaaaatcatcgcaattgcctccattcttggtgctgctggtggcttcggtgccagctattacgtgatgagcgaacaaacggcaaacatccagcagcgtttgaatcaaaccccgccagtggttgtggttgacttcgctaaagtggcatcggcataccctgccggtgcctctcaggcggaagtggaaaaactgatggtcaagaccaatgacgcaattttgaagttgaaggacgcgggttacttggtgcttgacgcaagtgctgtagtcggtgcgccaagtgatgtgtacctccctgaggaggtgctgaaatga

SEQ ID NO: 196024 - DNA, 2448 bp, Klebsiella oxytoca
atgatcataaccatcaaaaagaaactcgaagaaacgttgatcccggagcacttgcgagcagccgggattattcctgtcttggcctatgacgaagacgatcatgtcttccttatggatgaccaaagtgtaggctttggtttcatgtgtgagcccctgtgcggtgccgatgagaaagtgcaggagcgaatgaatggcttcctgaatcaggaatttccgtcgaagacttcgctccagtttgttctgttccgctcaccggacattaatcaggagatgtaccggatgatggggttgcgtgatggttttcgtcacgaactgctgacatctgtcatcaaggaacgaatcaacttcctccagcaccacacgacagatcgcatcttggctaagaccagcaagggtatctacgacaatggcttgatacaagacctcaaactgttcgttacgtgcaaagtacctataaagaacaacaatccgacggagagcgaactccagcatctcgcacaaatccgcacgaaggtcgagtcatcgcttcaaactgttggcctgcgtccccgaacaatgacggcggtgaactacatccggatcatgagcaccatactgaattgggggccggatgcttcatggcgacatgactctgtggattgggagatggataagcctatctgcgagcagatcttcgattacggcaccgacgtggaagtcagtaagaacggcatcagactgggtgactatcacgcaaaagtgatgtccgctaaaaagctacctgatgttttctattttggtgatgcgttgacctatgcaggggatctcagcggaggtaactccagcatcaaagaaaactacatggtcgtgaccaatgtgtttttccctgaggctgaaagcacgaaaaatactctggagcgcaaacgccagttcactgtaaaccaagcctacgggccaatgctcaaattcgtgccggtgttggcggacaaaaaggagagtttcgacactctctatgagtccatgaaagagggggccaagccagtcaagatcacctactcggtggttttatttgccccaaccaaagaacgtgttgaagcggctgcgatggccgcacgaaacatctggcgtgagtctcggtttgaacttatggaggataagttcgttgctctgccaatgttcctcaactgcctgccattctgtaccgaccgagatgcagtacgagacctattccgctacaagaccatgacaaccgaacaggcggctgtggtcctgccagtgtttggggagtggaaggggaccgggacctatcatgcggcgctgatttctcgcaacggccagctcatgagtctgtctcttcacgacagtaataccaacaagaaccttgtgatcgcagccgaatcgggctcgggtaaatccttccttaccaacgaactgattttttcctatctgtctgagggggcccaagtctgggtcattgatgccggtaagtcttatcagaagttgtcggaaatgctcaatggcgacttcgttcactttgaagaaggaacacacgtctgcctcaacccgttcgagctcatacagaactacgatgacgaagaagacgcgattgtcagcctcgtttgtgcaatggcctcggccaagggcttgctggatgaatggcaaatctctgcgctgaaacaggtcctttctcgtctgtgggaagagaaaggtaaagagatgaaggttgacgacatcgctgagcgctgcctggaggaagaaaacgatcagcgcctcaaggatattggtcagcagctctacgcctttacatcgaaggggagctacgggaaatacttctctcaaaagaacaacgtcagcttccagaaccagttcactgtactggagctcgatgaattgcaaggacgtaaacacctgcgtcaggttgttctcctccagctcatctaccagatccagcaagaagtcttcctgggtgaacgaaaccgcaaaaaggtcgtcatcgtggatgaagcatgggacttgctcaaagaaggtgaagtttccacgtttatggaacacgcctaccgtaagtttcgtaaatatggtggctccgttgttattgcaacccagtccatcaacgacctctatgaaaacgccgtgggtcgtgccatcgcggagaactcggccagcatgtacttgctcggccaaaccgaagaaacagttgaatctgttaagcgcagcggtcgtctgaccctttcagatggtgggttccacacccttaaaaccgtacacaccatccaaggcgtgtactcagaaatctttatcaaatcgaagagcggtatgggcgtcgggcgtttgatcgtgggcgacttccagaagctgctttattcgactgacccggtggacgtcaacgccatcgaccaatttgtaaaacaaggcatgagcatccctgaggctatcaaggctgtgatgcgaagccgtaaacaggctgcataa

SEQ ID NO: 196025 - DNA, 708 bp, Klebsiella oxytoca
atgcggacaaaattacttggggcgctgatggtgttcggaattattaccggcccggctcatgcgtcgtcgaaattggaaatcacggatcccagggctgcaaagatagaggacatcgtaaaactacccatcaacggggtccgggccgtccagagtgatgggcaaatcatgttcctctccgaaaacgggcgatttgttatttcaggacaaatctacgacctgtggagcaagaagccactcaatacgatgtcacagatgcgagatgtggcggaacgccttcacttcaagagtatggggatggacgttgacactctgaacaccatttcaatggggcgtgggggcaaagaggtcgtggtttttgttgatcctcgctgcaccgtctgccacaagctcatggacgaatcaaagtctctggtcgatgagtacaccttcaaatttgtcgtgatccctgcccttggggctgagtccaaccgccttgcaaaaggcttgtactgcgcgaaagacaaaacaaacgcgctcgatgcgttcatgaacaacaccctggcttcgcttccttcaaaagaaacctgtgaccccgctcaatatgaccaaacgctgctcacggcccacttcattgggattgaaggcgttccgttcgtagttgctccggatggccgcgtcagcaaagggcgtccgaagaacctgaaatcatggttggagagtgctgaatga

SEQ ID NO: 196026 - DNA, 5487 bp, Klebsiella oxytoca
atgatcaatttcaagcctaaacttccggcgttgcttggcgctctggcggttcttaccgctggtgctgctcatgcagagctgctggagtacaccttcaaggctccagatggtgctcaacggtctctgcctccgaatgccaactatgccaacccgacgggcaacgtttcgtttgctctgagtgcaggtattgatcgcaaggtcaaagtatcggtgcgtcggtctgatggcacggtggtttcaacggcgaccagccaccttcttggtgctacggatcgcatcacagtgggtggaaagtcttactatggtgcggaactacaactagcggctcctgctgctggcgcatatacaatcagagcagaaattcttgcatctgacggttctaccgttcagagcgatgattaccctctgaccgtggatgtgacccctcccaagtacacctcacttgcgccagtctatggtacatacggacaggttattagcggtgatgtatggaaactcggcactgggggctcagaggagaatgcctttttaatttcaggcatctctgatgattctccagttaaagaggttaaagctaagctgtaccgccaagatggttcactctacaaagatgtatcagtgaactacgatgatgccaacaaacaagccagacagtattttgaaagtggctttttcccagcgtctgatttggatgaagtgttcactcttcaattccagctcagtgatagcgcagggaatagttacctttcaccaccgcaaaaggtgatgtttgacaacctaacaaatgcaccgtcttcgccgtttggtgtctatgacccggccagctcaagcacattggggccagggttatctgggtttgttgcctataaggctggaatgacggttaaaaccaacccgatcaagttggcatggcgcgttccgcgtaataattggcatgaataccgcgagggcggcatcaacatggtcaactctttgggagaaatgaccaaggttggtgaagatggcaactacgtttacctcgtcacaacggcaccttatggaaatacagatggaaactattggcggtgggtgaatttcggtcagtggggtggcggggtcataacttatgacctttcgctgtctccatctgcaccccagagtcccaagttgcttggtgtggattacaactacagcgacatagggtggtcgaacatgtaccgctattgggtagacagctccgttctgcccgtcacagtgagcagcatccgggttaaagtagaaccaaggccttacgttcaaactgcggtgcatcgaggaagttgtgaagtgcctgtcggtcaagatagttgtgtgattgctaacagcttcacaatgtcaaagggaacgacagggtatatccacgacaatgcaacagtcttcaatgcagatcagtctcttcgctcaaaccctctttgggcagaagtaaactggaacgatcagcattatcctcagttaagccagcagtacgaccaaaacaataaggtatttaccttattcgttaaccaacctggacgaggcgcgtactttgataggctgcgtctgcgcagtgcctggatcgaagatagcaaaggcaacaagctgtctccgaccggggggctaattgccaataactgggagaactacacctatcagtgggatctcaaaaccctccccgaggggcagtacagtcttgttgccgcagcagaggaaatgcacggacctttaactcggcaacccatgttccagattacgtccgataaaactgccccaacactgacgatcagtgttgcagatggggctgcgattcagacactggacgatgtggtcattactttggctgatgctattgacccgtcacctaagctgacctctattgcccttgttggaggcccggcgaatgacaaagttcagttgtcctggcgtgaagaatcgaaagggcgattccgtcttgagtatccggtaatgttcccgtcgttgaaggaaggggagtcatacaggctgactgtttccggggcggatgcgcagggcaatgcggttaaaaaggtggttggtttcgagtacaaacctcgccaggtaatgctggcagatggtatggatggcaaggtaatggtccccgctgtcactcatgaatttgttcatgcagatggcaagcggatcatcgagaccaagccgctgacgctcagtgatggtgctatcgtgacaggttcatacgacgtgtttgcgaccctccgttctgatgcgaaagtgccgctggtggtgaatggggtgcgaatcgagccgggccagacaatggggatcatgagccaacatgacttcggtgcatcagggggacgtttgagtatccctgtcaaaccggctatccctgatgtggtcggttcatccagccttcttgtcatgacttctgcgcctaactcaccaatcctcgttgtggacattaatacctggaaaggggcggctaaactctctgctgagtcgtggacaattcgccaggttatcgacccggtgaaaatctatgccttgccggaaacaggggttccttgccggttcaccacgaaggcagatgttgctatggccgcagatccgattcgtgacccagtatgtttgctacagtgggacagaactccggatgaagctgaacaaaccacccaagacaccaacggtatgaaggtggcagggctggtggggcaagcagtaagcattggggagcaacctgtcgaatacagcttatacctgttcagtggtgacggttccaaggtgaaagttggctcaggctcacagaacctgactgtaactacagcctatggctccgttggctacaccccgattgatgacattgcacaagtgaatcgtgtcattgaaaactttaatgtgaacctcaagcagaacaaggggccagactgctctataaccctcagtgcagaccgggcgaagaaagaggccgcaagcaagggggccgggagtgccagtagaacctgtctgtttgagtggcagcagatccctgatgggttgctccaggaacagctatcggaatccccttcgctttctggttcattggcctccaacggcaatcatccactgggatggcgggtaagcattttcacccgtaatggtacacgggtgacgttgaacgaccagacgttcaacatcgaagctgttgatccaccagctccgactgttgaactgtcatctaaattcaacttcaaagacaacatctacatggtgccgatgacaggtaactacctgggggatgccataatcagctctgaacgcgctgatctggatattgccatctcgcgcaactctggtgtcctggagtctgaaactttcgctccaggatggggagccaccaataaggtgtatcgtcgcataaatactgatgagcgagctttgtgggaggagactacttacaaggtgaatgcggcgtacaacaaggtccctgatgtgaaaacggaggcgatctatcgggctatcgcagcaccttctgacagcatccgtcctgtcgttgaagttgatggtgataacgcgattgacactcaggcattgcctgttcgcgtcctcattcgtgatcagtacaaacctgatggtggttatgacgccaacacaatgggtgtgtggaaagtacgtctgattcagcaaaaggcctacaacgagacggttgctctcactgattatgcggaagcatcaaacggagaagctcagttctcggtcgatctgtctggcgtggatacttcctctgtccgcatagcggctgaggctgttttggacagccccgttgaaggttacaacagaacagagctgtccatcaggcctgctttcttaactgtgcttcgtggtggagccatcgctgctggagtagaggctcgcaagttgtctggtgaagccccgttcaccgctgtgttcaagctggctctggataaccgtcaagatctccgtgctaccggccaggtggtgtgggaaaccacgaaggatgacggtaaaacttgggagcagttcatcccggaagagcgttacaagtatcagcttgtgaagaccttcgacaagggggagtaccaggttcgagccaaagtggtgaacgtaaactcaggcgcggaaaaatacaccgaagcggtcagtgttgtcgcttacgacaaaccggatattgctgttgtcggcccgaccacgttgtttgtgggaagtgaaggcaagtacacggcgagtctggcgctgaacgatgagccgatcacggatggcaatgccgttgttgagtggtccactgacggtggaaaaacctactcacataaagggaacagcatcacgctttcaagtgatgaagaaacccgataccgcctgtgggctcgtgtgcgttctgctaatgcaccggctgatgacgactatgcctatgacgttgctaaaacggcggttgacttccgagctgtgaaggcaccccgcccttatgtggtagggcctcaagtcattgagacgggcaagaagtatgtgttcagtgccaaaaccagcctgccttaccgtggtatggacgtgaagctgaacgggttcttcacgctgcctgatggctcgattgtggagggtgataccgctgagtacgtgccttcggacaatgacctcaaccaggcaactgtagaaacgaagtacaccacctggatcgaaggataccgcgataagggtgcagaagcctcgcatagtctacgctcccgcgtttggcagtatgtgtggccgggcttcgcaatgcaggtccggaagagcgcggacgcggctcctgcgacgatcactgcgtcagtacggccaattgccttcaacggtaagctggaagagcctacctacgaatgggagttgccggaaggggccgtgattcaggataagaagcaagatattgtcaggtcctttgtggtcaatgagccgggcgattacaacatcaaggtgactgttcgtgatgctcgcgggcatgaggctgtgatcgagaaatcgttcaagatcgaccagtccaagccctacgccattgacctgcaatactctggctcgaataaatacgagcgtgagcctttggatgtactgttgagaccgtacatttctggcggccacccacgcgaccgtattttgactcatgtttactcggtcgatggcacaccgttggaaaacagcggttactacggcaaagcaactcttcgcgctggtgagcacagcatcaagctgaaaataacctcagagatggggcatgaagctgagggtgaggtgagcatcaatgtggcagagaacaagttgcccgtgtgtagcctgaaatcacgagagaccgttggatcgtggatcgtctatgcgaactgcgaagataccgatggacgcatgaagtcctacgaatggaccattgccggtgagttgaagagcatcagctctgatcgagtaactatcagcaagggccccaataaaacgatgccgaccatatctctggttggagtcgatgactcaggtggcagatccgaagctgttacgatgaactaa

SEQ ID NO: 196027 - DNA, 384 bp, Klebsiella oxytoca
atgaacgaaaatcagttggcgaatgcctcaagtaaaaaaaatgcactcttcctcttgttgggggtgatggtcgtcgcctttctgctggtgcctgatcaggcacacgcaggcaatggtggtggagcgtttgaagacgtatgggtaactctcaaagattggactcaaggtactttgggtcgaatcgttgcgggttcgatgatcttggtcggcattgtcggcggtatcgctcgccagagcctcatggcttttgctatgggtatcggtggtggtatgggcctgtacaactctccgaccgtagtggagtccatcatgtctgccaccctggaaaatgcggagaaggttatcccgacggttgtacaactcagcaatggcttgggtctgtaa

SEQ ID NO: 196028 - DNA, 579 bp, Klebsiella oxytoca
atgaaaaatatgaacattttgaccagaaagggcagttacagaggcgaggctcaaaaggagcaggcagtaagatccgcaaagatgttgggaatgggagcagttcttcttgttctgtcgggttgctcctctttcaacatcggtagcgatgagtatggctgtccgggaatgccgagtggcgttcagtgtatgtcagcgagagatgtttattccgcaactaatgacggaaacgtccctcgcccaatgaagcctgaggaagtcaaggccaaagcggaagcggatggcggaggttcctctgacgtttcagtgagctcatctaactccggggattcagttatcgacaattatgtcgcgccgcgtcttccggatcgcccaattccaattcgcacacctgcgcaggttatgcggatttgggtagctccctgggaggacaccaatggtgatctcatcgtgacagggtatgtctacaccgaaattgagcctcgcaggtgggtaattggggatggcgcaccgcaaagtgagccagttttgagaccgctgcaaacggtaacacacgaaccgaagtctgaaacaactaaatag

SEQ ID NO: 196029 - DNA, 1317 bp, Klebsiella oxytoca
atgattaagcagttttggacaggattagatcccaacaaaaagcggtgggttgctatttctggtggcgttttcgttctttttgctgtcgtaacaatcttctctggagaatcgaagcaagaagagaagcgcggtcggcaagaaactatcaagcatgtccttactgacaaaaatacccgtgagatcggcatagattcgctttctgccgatgtgaaaatggtgtctcgtgaaaattcggatctgaaaaaggagctggagagagttaaaagagagctgggggaaacgaaggaaactgccggtaaatccagcgatgtcggtagggagatttctcgcttacgccaagaccttgagagcttgacgcagaaaaatattgagcttgccaagaaggttgatagcggtgcttctggtggaaaaaaagcttcaccatcaggggatgccagatccgatgtcaatggcacacctggcggtgatgctcagttcgtagagaaaaagttggactacaaagacccggcatctttcttccgagaagcaccgctcccagactcgaaaggtggcgctcctgcaactgggaaaggtgatggccgcgatgccaccaagcccggcatccagatagtgagctactcacagaaaactccagaagttgatgtgaaagagggaaaagatgatgagtccctctacctgccatcaggctcgattatgacgggtgtgcttatcaatggtatggatgcgccaacttcccagggagcgaggagagacccattcccatcaacccttaggattcaaaaagaagccatattgcctaatcgtttccgtgcggatgtcagagagtgtttcctgattgtttcgggctatggcgaccttagttctgaacgggcatacctacgtggtgagacattttcttgtgtcagggaagacggaggggtgattgaagcaaggcttgactcttatgcggtgggtgaagacggaaaggcaggtgttcgaggccgtgttgtgtcgaagcaagggcaaattatcgccaagagcctgatggcgggattcctcggtggcgtgtcggaggcctttgatgtcaaccccgtgcctgtcgttaacaccaacccagggtcaactacacagtatcaatctgtgttctctaaccagatgttgcagggggctgccgtgaagggggcgagtaaagctctggatcgtatcgctcaattctatatcgacatggcagagggcattttccctgtaatagaagtcgatgctggccgtcaggtggacatcattgtgacaaagggaaccaatctacaaattcgttccaccgggggcgctaagaaatga

SEQ ID NO: 196030 - DNA, 918 bp, Klebsiella oxytoca; identical to SEQ ID NO: 52332

SEQ ID NO: 196031 - DNA, 627 bp, Klebsiella oxytoca
ttgaacctgaaaaagtatctcaagacctgggaaggaacccaaacagaaaataagtggggtcgaatcttccagggtggtcttatcgttatcgttttcctgctggtgatccaagtatttagcaaggaaaccatcgtcactctccagcctttcacgcttacggaagaagcctgggtgacgaaaagcaatgcctctcagtcatacaaggaggcttgggccttcgcttttgctcagctccttggcaacgtgacacccggaaccgtggactttgtgaaggagcggctcaccccgctactctccccgagcatctatcaggacgtgattgatgccatcgaaattcaagctcaacaaatcaagaacgaccgcgtaactatgcggttcgagcctcgttttgttgagtacgagcccaagagcgacaaagtgtttgtctacggatattcctatgtcaagggggcttcttctaatgaagatcgtagcgaacgcacctatgagttcgctctcaagatttcaaactacgcgccagtgctggactacatcgaaacctatgtgggaaagccacgcaccaagactgttttggagcaactccagcgtaaagaagagaatcggagaaagcatgaagagcaacgctaa

SEQ ID NO: 196032 - DNA, 282 bp, Klebsiella oxytoca
atgaagcctgtaaagataccgcgtcgggtcgatgagcccccgcatctgctgttgtggagcgcagatgagctggccccgatgcttttggggctaacgataggagtcgtcatcggtaaagctctggtctgctttttaggggggttgcttgtaaccaacctttatcgccggttcagagataaccatccggatggatacctgctccacatgatctactgggccgggtttatcgtgaccaaggccaaatctctcaagaacccgtttgtccggaggtatttgccttga

SEQ ID NO: 196033 - DNA, 348 bp, Klebsiella oxytoca; identical to SEQ ID NO: 52333

SEQ ID NO: 196034 - DNA, 144 bp, Klebsiella oxytoca; identical to SEQ ID NO: 102548

SEQ ID NO: 196035 - DNA, 663 bp, Klebsiella oxytoca; identical to SEQ ID NO: 52334

SEQ ID NO: 196036 - DNA, 378 bp, Klebsiella oxytoca; identical to SEQ ID NO: 52335

SEQ ID NO: 196037 - DNA, 447 bp, Klebsiella oxytoca; identical to SEQ ID NO: 52336

SEQ ID NO: 196038 - DNA, 630 bp, Klebsiella oxytoca
atgaagaagccgtggttactggtcgcatggctgctggttattgagctgctggcgatattgctgctgatccctggcgactggacagacaaagccatcaaaagggaatccgtgctggtggagcagagtcttggggtcgaagcaagagactggatacagagcaaagcatctacctggtttagatcgagcgttattgattccggtttctatgaggggatgtaccaaacgctgatcccatcagaagaggaacgccagaagtccaggggaatgcaggatatggggcagggctggtttgtttgggtcaaaggccgcatggaagcttttgtcaacgtcatttaccagttctacacacggttagcgctattgtccgcgtgggctccttatatgctgatcctgttcgcgcctgcggtatatgacgggatgatgacatggcgaattaagcggaccaacttcgattatgcgagtccggttctccatcgttatagcgttcgcggaacgatgtacctgatggtcggattgttcatcgcgttcttcatccccatagcgctcgatccggttgtcattccgataacaatgatgacgtgctgtgtcctcattggcctgacgttcggcaacctccagaaacgggtatag

SEQ ID NO: 196039 - DNA, 546 bp, Klebsiella oxytoca
atggtcgatgtgaacccgtttgaccgggttatgaatgagttgaaaagtcgtggccgcaagaacgctcatatcctgagcatccttcaattcgactggcccgcatcggaggtcatcatcgagaagctgagctgttacatcacagatgggattaaggccaatcagcagcctgtgatttacccgatcattgaagaagctctgcatcgctacagccagctcgtgtttcatgagcagagagaaaaatatgaggacccggccagaataggggcatttctggaaaccctgatcactgaaacttgccgggcgctggaagtgcaaattgtcgatagtggtggtgattcatggtctgtcgattcaggagagtcgttctcactttggctttcttcccatccaggagaactatccattaacccgcagcctcatgaggatgagacctctttgcgtggcttgctgtatgagctcatcacctgtgagagcgtgaaaactgttttaaggagaaccgactatgaagaagccgtggttactggtcgcatggctgctggttattga

SEQ ID NO: 196040 - DNA, 1866 bp, Klebsiella oxytoca
atgacaatgagttatgacccgctcgcctacgagatgccgtggcggcccaactatgaaaaaaatgctgtagcaggctggatggcagcttcctgcgccgctttggccgtagagcaagtcagcactatgccttcggaacccttctattggatgaccgggatctgtggcgtgatggcaatggctcgtttgcccaaggctatcaaacttcacctgctccaaaagcatttgaaaggccgtgacttggagttcatttccatagcggagctccagaagtacatcaaggacacgccggaggatatgtggcttggtagtgggttcctgtgggaaaaccgccatgctcagcgcgtttttgaaatcctgaaacgcgactggacttctatcgtaggcaaagagtctacggtcaagaaggttgtccggaagatacagggtaagaaaaaggaactgccaatcggacagccctggattcacggggtagagccaaaagaagagaagttgatgcagccgctcaagcacaccgaggggcattcgctgatcgttgggaccactggctcgggcaagacccgtatgttcgacatcctgatttcacaggccattctccgtggtgaggccgtaataatcatagacccgaaaggggataaagagatgcgggacaatgctcgacgtgcctgtgaagctatgggacagccggaaaggttcgtctcatttcatccggcatttccagaagaatcggtgcgtattgaccctctgcgtaacttcacccgagtgactgaaatcgctagtcgtttggccgcactgatcccgtcagaagctggggctgacccgttcaagtcatttggctggcaggcactaaataacatcgcgcagggtttggttcttactcatgatcgccccaacctgacaaagctccgccgcttccttgagggaggtgctgctggcctggttatcaaggctgttcaggcctactccgaacgagtgaaacctgactgggaggcagaagcagcggcctacctagagaaagcgaaaaacggttcgcgtgagaagattgctttcgcgttgatgaagttctactacgacatcatccagcctgagcacccgaactctgatctggaaggcttgctgtcgatgttccagcatgaccaaacccacttctccaagatggtggcgaaccttctgccgatcatgaatatgctgacgtctggggagctcggccctctgctatccccagactcatctgatctgagtgacgaacgccagatcaccgactccgcaaaaatcatcaacaacgctcaagtagcttatctgggtctcgactccctgacagacaacatggttggtagtgctatggggtccatcttcctatcagatctgactgcggttgccggtgacagatacaactacggcgtcaacaacagacccgtaaacatctttgtggatgaggctgctgaggtgatcaacgacccattcattcagcttctgaacaaaggtcgcggtgcgaaacttcgtctcttcgtggcgactcagacttttgccgacttcgctgccagattaggcagcaaagacaaagcgctccaggtgttggggaacatcaacaacacttttgctctgcgtattgtcgatggtgaaacccaggaatatatcgcggataacctgccaaagacccggctcaagtacgtcatgcggactcaaggccagaacacggatggtaaggagcccatcatgcacggaggcaaccaaggtgagcgtttgatggaggaggaggcggatctgttccctgcccagttgctggggatgcttccgaacctggaatacatagccaagatttcaggcggaacaatcgtaaaaggccgtctgcccatattgacccagtaa

SEQ ID NO: 196041 - DNA, 2964 bp, Klebsiella oxytoca; identical to SEQ ID NO: 52337

SEQ ID NO: 196042 - DNA, 618 bp, Klebsiella oxytoca; identical to SEQ ID NO: 52338

SEQ ID NO: 196043 - DNA, 2190 bp, Klebsiella oxytoca
atggacctttatatctgtgagaagccttctcaggccaaagatctggctggcgtaatgaaggcctctcaaagaggtgatgggtttctccatgatggaggaagccgagtaattacctgggcgttcggccacctcctggaattatatatgccagacgattatgacgaacgctacaagtcatggtcactggacaccctccctattgcaccagagtcatggcggtacaacgttcgcaagagtgtgttcaaacagtacaaaatcattgaaggactggtcaaaaaggcgagcaccatttacatctccacggactatgaccgcgaaggtgaggctatcgcccgctcgcttctggatcgtttccgctacgcaggccctattcgtcgggtttgcttgacagcactcgatgagtcaagcatcaagaaagcgctgagcaacgttaaggacggcaaggatacggtctcactctactatgccgctttggctcgacaacgcgctgactggctcgttgggatgaacgtgagccgcctttacactgtgctggcccgaaatgtaggtttccaacacactcttcacgttggacgggttatcacgccaaccgttgcgctggtgtgtcaacgtgacagagagatcgccggtttcactccctcaccatactggacactaggagtgaacgtgtccgtccagaatgggcaatttgccgcccaatggataccaccagaagagtgcagtgacgcgctaggccggtgcgtcaataaggcctatgccgagcaggtagcgtcgcaggtcaagggtgccagtgcggttgtcagcaaagcagaaaccaaaccaggtaaagagtcagcgcccctccccttcgatctgacgtcgctgcaacaatatgcgagcaaacgatgggggtataccgcccagcaggtactggatgcagcccaagctctatacgagacacacaaagcgacaacctaccctcgcaccgatagccgctatctgccagagagccaaaaggaagacattccggacattctccaagcgctcattttttccgatcagaacgtctcagggctggtggctggtgctgaccctcatcgcaaggccagggtattcaatgactcaaaagtgaccgcgcaccacgcgatcattcccactccggccagaacagacataaatgccatgtctgagatcgagctcaatctttacgacgccatccgtcgcttctacatcgcccagttctacagcgagttcgagttcaccaaaaccgctatcgaagtgcagtgtgggcgtcacctctttgcagcttctggtaagaccccggccaaacaaggctggaaggttctgttttcctctgacagcgaaagcagccctaaggatgagtgggaagacaccgatgcgccggttgaacaagagaagctccccagggttagccaaggcgaaccagctttgcttaatggcgcagaactggcgaacaaaatgacgcgaccaccaccgcacttcaccgaagccacattgctcgctgcgatggagaatatcgcccgattcgtgactgaggagaagttcaagcaaatcctcaaagacacagccggtttgggcactccggcaacacgcgcaagcatcatccagggcgcagttgataaagggtatttcaaacgccagaagaaggtgttacttgccaccgataaggctcatgcactcattgcagttcttccacaagccatcaaatcaccaggcatgactgcggcttgggagcaggagcttgagaaggttgccacaggctcaggaaacatgtctgtcttcatgaaacagatttcgacatggatctgccaaatggttgaacagctcaaagtggcggcaccagttctgaccaaagaaggtggcgcaatggctaaagcatttgaaggcgcaaaaccgccctcgcatgaatgcttcaactgtggtggagagctccacagaatcaaagggaagaacggcttcttctggggttgtcagaatgaggcttgcaaaaagacattcccagacaacaggggcaaacctgagaagcgtatcgctgctgaggattgcccagactgcccggattgcggcagcccgatgcgccttagaaaagggaaagctccaggtaaaaaacgagcatctaagttttggggttgtaccgcttatccagactgcaaaggcacaatgccattcaaaaaatcagacttagaatga

SEQ ID NO: 196044 - DNA, 402 bp, Klebsiella oxytoca; identical to SEQ ID NO: 52339

SEQ ID NO: 196045 - DNA, 417 bp, Klebsiella oxytoca; identical to SEQ ID NO: 52340

SEQ ID NO: 196046 - DNA, 291 bp, Klebsiella oxytoca; identical to SEQ ID NO: 52341

SEQ ID NO: 196047 - DNA, 234 bp, Klebsiella oxytoca; identical to SEQ ID NO: 52342

SEQ ID NO: 196048 - DNA, 252 bp, Klebsiella oxytoca; identical to SEQ ID NO: 52343

SEQ ID NO: 196049 - DNA, 618 bp, Klebsiella oxytoca; identical to SEQ ID NO: 52345

SEQ ID NO: 196050 - DNA, 1434 bp, Klebsiella oxytoca
atgttaccgatcgtctccccctccgtagtgaccaaacaacttgcgttcaatcgagtaggtgataaacgcaaggttagggtttcgtccaactttttggatgttatggggttcaagcctgggatgggtatagccgttgagccgggggagagaatgagcggtttttcggtgatcccggcgaccgatgaactacagacacaccaggtttatcagcgccggtatcaaccaaagagtcgctccaacaacccgctggaaaccgttattgagttttcgggacaagggctcatagataagtgcttccctcgctatacagagcgtttccacgtcgaaatgcgaaaaggccgagtagtcttcactcctgtcgcaaacagggtctttgccattgcggatcggttcagaaaaaccagtcctttccgtgcctttgtggcattgactggcggggtagacattcatgttatggaagcgcttggctggaaggctgagattgttctggagcatcgtccagttgaagccagagacagagcatccgggcggaacctgagtgaagtacatgcgctcaatacgctggtgaacagctccccgcgtatcctgctgaatgaagacattcatcacctggagctggatcgccttggagacttgctggcggagtgcccaccaattggtttggcccattactcgttggggtgtgatgaccactcaaacgccaaaagtccaagggacaaagagcgttctcttgaagatctttccaccatgctcgacatggtttacccggcactaaaacagatcgaggtcatgaaccctgccgtcgtgctggtggaaaacgtcccgaacttcaaagcatccggggctggggcgatgatgggaacgacactgcggcggatggggtacttcctcactgagatggttttgaacggtctggatttcggcgcttaccaggggcgagaacgctattacatggtggcgtcggtcttccctgggttcgttccaccgaaacctgagcagagagctggtggaagattgtggccggtgatcgagaagcacctcggggattgtgcagacgtcacagcgttgaagtcaattcaggccagagagtcaacttctcgcaggatgcctgcgttcttgacgagagaaagcaccagttgcccgaccatcctcaagtctcaggatcgtggggtaaaggatgcagtgtacatccaagacggtggccgcatttacaagccatcggtcgatctggttcaggagctgatgtcgatccctgatagctttgatgtttcgtggatggcaaaagaacaagcgacagaaacgcttggacagagtgtggattacagattgcattcagcggtcatggccgcagttcgggatcacctgaatgtgaattgcggtcgccataccgtggtgcagcacggtatcagaagtaaggggagtatattgccgtga

SEQ ID NO: 196051 - DNA, 501 bp, Klebsiella oxytoca
atgaaagcccaagcatacccctcatcagtcattcgtaaaggcgcagtgctgtacgcagccgtttattacatttctgatgatgataaagcaaaggttgaggttacagagtggatagttcgttcgatccagaaacgacgtaactcaacaagcgctcaacgctatgtcaatcttgcccaaaaattagatggaattacgtgggggaagaggtcacggaagaacggggactttggctggttgccatctataccgagctggtgcttgcagcagttcagggaaggtggcgaattgccgtttggcttttacacgacacggctggccgcactcaagtttgcgaaagtcagcttgcaggaagaggtccaatattgcgaggaggagctgaaaaagccacagacagaagaggacactctgcaacttcaaggggagctggtggagaatcagagacttctgaaagctgctggctcaatggtgaagcgcgagcaaaataagaagaaaggaggttga

SEQ ID NO: 196052 - DNA, 324 bp, Klebsiella oxytoca
gtgacagaacaaaccaataagaagttgatgctggatgaatctccagatatgaccctgcaattcaagtggagaaagtttggtggtgcgatttttactgccacgcaagcaatggaacacatcagggaggggcgtaagatcgggccgactccagcagggatgctgccccaagatgtgtggctgaatcggctgatcgctatggaagagaccctgccacgagggaaatttttcgacaggttccgccgccgcgacaagagtgagcagtatgacttggccgccgatcatctccgccttgtcggacagaaaagcgatagaggggggagatga

SEQ ID NO: 196053 - DNA, 507 bp, Klebsiella oxytoca
atgattgacctgacgtgccgccgctgtgctggttccggtgtttatgacttgtccccttccaaagaaacctgcggtatgtgccaggggcatcggagatttactgatgccaaggcaatgctggttgctgccatcgagctggcgaagaagcaacgcgaacctgttattgaagtcgtggtggggctggtactcaaaggggttgatgttagagggaaggagcctggagagctgttcaaagctgcacaggcctttaatgccccagggcacaacttattgcgatacgggtgggatgcctgggagctctatgccctccatgaaggagtaagccctgatcttgcctcacttggccgaagtgtgatgcgcgagtggtatagccattcatggggccgattcagtgaggaagtaggttttagcgcagccgagagcatgatcaaacaggccaaagacaacccggaaaaagcagaagagcgctgggagttcctacttagtgaagaatggatggtggagtaa

SEQ ID NO: 196054 - DNA, 675 bp, Klebsiella oxytoca; identical to SEQ ID NO: 52348

SEQ ID NO: 196055 - DNA, 144 bp, Klebsiella oxytoca
atgctgcaaggcaatgctaacacgaataagcgcatcccgctcgcggcgttcatgaaatggccgctggcgaaacgtcaggacttcatcaaccgggaaatgtccggttgccccgactttatcaagacatctttgcttcgccattaa

SEQ ID NO: 196056 - DNA, 636 bp, Klebsiella oxytoca
atgtcaccagaaacacaacaacttatatccaaggctttatctctcattgagcagtcccgattccgcatgggcacttctcggtttgttgaggcctttattgaccgatgggcatacttacagactggcctatacccggccaaggaggagatcccggcagaacttcaaccggtcgccttcgagctctctcatgtcctgtctgccgccatgaagcgagaccccaccagcgatgttttgggctacgtcctcagcatgtctggcttccataaaaagggcaccaattactttcccactcctccagagattgggcgcttgatgtcactcattattggctcacagtcctcggcaaacctctatgagccctgctgtggctccggcatcaacgccattcactggatggaaaacctgatcgagaaccacggcccagaagcattgagagaagcttcaatctacctggaagacatcgatccgcttatggttaaatgctgcatgatccagctattccattacttcgagtcccgtaataccactcccaacatgctgagcatcgtcggcatagacacacttagcagacgaaccaagaacatcgcctactacgcagagaaacactccgtatccgccgcaaccgtagccgcataa

SEQ ID NO: 196057 - DNA, 273 bp, Klebsiella oxytoca
atgaagatctcacaggacatgaaaagaaaatttgctttggtgaatgccctgtctaaaacggagaagccaagtctccaggaccttcacaaggcaacagaaattcctgaatcaacgatcaagagacagttgtctgctctgcgtgatgagttcggaatgaatatattgttcgtcagggagtctaccggcgaacggggggccaccggctactatatgctgacagactgggggatcttagacaggtcttcgttcttgaaccggtacggaaagatgtaa

SEQ ID NO: 196058 - DNA, 1179 bp, Klebsiella oxytoca
atggcattgaacaatttaaaaggcctgtccgaacttgctaaagccgccaaaggcaagaaaggcaaagaggttcttaccgtccctgttgacgacgttgtttccaaggtacaggtgcgtaagcgcttccgtaacattgaagatctggcagccaccttgctgaccgaagggcagcagtctccgatcatcgtgtttccgaagaacgaagaaggcaagttcgttatccagaaaggggagcggcgttggagggcttgtaaacacgctggtattgagactatcgacctggtggttaatgataaggtccagaacaacctggacgagactgctggtgagttgatcgaaaacatccagcgggatgatttgactccggtagagattgccgaggcgttaaacctgtttgttgaagaaggttggaaacaaaaggatattgctgatcgtcttggtaagaatatcactttcgtatctacgcatctgtcgttgctcaagctacctgactgtgtgcgcgagttgtacgataatgaagtatgttctgatacagaaaccttgaacaatctccgtcttctgtttgagcttaacgaagaaagatgtcgcgccgtctgcgctgtagctatgtctgacgggattacccgtaaacaaagccgtgagatgttgaatgatgccaaacgcatcaaagaagaaatggaaaaaggtcctctgacgggctccgaccagaatgataaacctggcgctggtaacaccgacgagcaagccattaactctgggagtggcacatcggtacatatcggaaatggcgaccagagccctgccaacatggaactggaagggggggcaaatctcggtggtcagggcgatgatgaccaagaccattttcttgacgaagagggtaagggcaaaactcctgtccggcagccagttaacaatggtaagagcaaagatgaagaaggtggcgatgctcttcctcctctgccgaaggataaggaatggaagaacgtcagggctgatagtttgatttttgctgtcaacgttaatctggatggcgagaccaaacgtggagtcatcatgaccgaccgtgttgctctggttccggctacagtctgggttaaaacgctcgatggcgaaggcaaggaaaagcacgttcatgtgcctgtgtcagacattgaacttctgagtgttgaaggctaa

SEQ ID NO: 196059 - DNA, 786 bp, Klebsiella oxytoca
atggcaaaagtaatcagcttcgccaaccagaaaggcggggtgggtaagagtaccctctgtatccagcaggccttttatctggcgttacagaagaaaaagaaagtgctggtcttggatatggatggtcaggggaacacatcctctcgactggcccccagacgagagcttgaggatgacgactatgaaccaatcctcactggaaccaaaaccgcagagctgttcgcttacgagctggatggtattgaggtcatgcactgtccttgcggggctgacctcattcacacgccgaagaacgatccggatctgtttgagatggaggctgtgcctcttgaccaggctatgaatccggctcgccatttggctgagctgtttgagaactacgactacgtgctgattgattgcccgcctagccttggcagaaagctggtggctgcattggtgatgtctacccatgtggcatgtccagtaaaactctctggcttcgctgtggacggcgtagaaggtctcctaaacacgattatcggtgtgcgcgaggcatacaaccaggatttggagatcctgggcattgtgatcaacgacatggatcgctctgtcaatcacgacaaggccctcaaggcgctggagaacacagttccggatctgctgtttgagaacaaaattatgcaccggcctccgctcgatacggcgaccacggatggcgtccctgtctgggagcttcgctatggacatgtcgcggccaaagaggttgaggcggtgttggaagaactattagagaaggtgggctaa

SEQ ID NO: 196060 - DNA, 309 bp, Klebsiella oxytoca
atggacgtccaagagctgaaccggatgatagctgaggcctacagccgagatcagcaaaagcctgagctggtttcgttcaaagaagtgagtcgctgggggcgtaagtacggtttccccgtcgtatgcaccctagccgatcaaagtgaggaaaagcagattcactgggctgccagtttgctcattcaagtcgccggtacttggccgcgtgaagatatgccggaattgctaacaccggaacgggggtccgccctattcaacgatgccgagcagttattggcgaacgggcttggggcagcaaatcaattgtaa

SEQ ID NO: 196061 - DNA, 450 bp, Klebsiella oxytoca; identical to SEQ ID NO: 52349

SEQ ID NO: 196062 - DNA, 369 bp, Klebsiella oxytoca; identical to SEQ ID NO: 52350

SEQ ID NO: 196063 - DNA, 195 bp, Klebsiella oxytoca; identical to SEQ ID NO: 101154

SEQ ID NO: 196064 - DNA, 237 bp, Klebsiella oxytoca; identical to SEQ ID NO: 52351

SEQ ID NO: 196065 - DNA, 168 bp, Klebsiella oxytoca; identical to SEQ ID NO: 101156

SEQ ID NO: 196066 - DNA, 231 bp, Klebsiella oxytoca; identical to SEQ ID NO: 52352

SEQ ID NO: 196067 - DNA, 393 bp, Klebsiella oxytoca; identical to SEQ ID NO: 52353

SEQ ID NO: 196068 - DNA, 480 bp, Klebsiella oxytoca; identical to SEQ ID NO: 52355

SEQ ID NO: 196069 - DNA, 318 bp, Klebsiella oxytoca; identical to SEQ ID NO: 52346

SEQ ID NO: 196070 - DNA, 213 bp, Klebsiella oxytoca; identical to SEQ ID NO: 149220

SEQ ID NO: 196071 - DNA, 1149 bp, Klebsiella oxytoca
atgctctctgaaactttgcttgaagagttatgctataaaggtgagggttctgatttggattataaatcagaacgttacaatttttctaggaaagtcagtgacgaagaaaaatcagaaatgctgaaggatatcctggcattggcaaacacgcacagggaaggtactgcctatatcttgatgggcttcaaggaaaatcccccgtaccctgcagaggtagtggggttatcccaagaaggggttattgacgactcgcgtcttcaagagtttgttaatggaaaattagagactaaattgacatttcgctacgaagagggattatttgatggtaagcatatcgccgtgatttccattccgaaacagcagcgaccgctttacctcaagaaagatttcggtaagttgcttaaagacactgtttatgtacgcagggggagctctacaggcatagcttctccaagagaaatcgcattgatgggggctgccaatttggcaagaggtgatgctcaggtcgagctcctgtttcaaacagcggaaaaccagctattaccatcctttttcgaaaagacttttctaatttttcccagtaatttgcctgatttagagaaacagaaagggttgtatactcttggaggtattgcgaacaaagattattggcgtgattgtgcagcgtaccattcttatagagaacggctaatacaggtgagattgtctttttccaaccagtcagagttttctcttagtgacgtgcaattagaaatcacatgccgcagcccagaagatagggatatttcgctaatgcgagctgacgatctacctcctgaaccagaaatgacacttatcctaagtggtttagcttctcattttgaacatgcaaaacgaaatatgagcgttgatgaacatggcagccaacctactgtgcacgccacattgggaattgtgaggccagggcaaacgattcgtactgaggaagatctggtaatactgccatcaggcccgggaaattacgtactttatgtgcgtgtctttgctagcgaaattcctaaacccatattgtttgaacactcatttggtgtttctggcaaagttatagagaaggatttttcagacctaaatcaactgatctactcggcatcaagtgaaaacggagactaa

SEQ ID NO: 196072 - DNA, 465 bp, Klebsiella oxytoca
atgaattataaatacctaataatcctagcgctaatcagtacttcagccatagcatcggggccatccctcatagtgtgcgaacccaaagacaaaagtgaccagaatgctactggaatctggcctcgtccgtaccttgaaggagacagactttgttttgacattcgtgttgacgaaggcaaggcatgtgttggtaatgctcgggctaccaaatggctaagcggggccataatcgttgacattgatggtaagccacaaggtcgtgacgatacatggctcagggttgtaaacccaaccatctcagacaaaaaaattgagtacaaaatagaaggatcaagggacgacaaacattgggggttagtctccgatgtttccattaaccgcctttcaggagaggctgtagattggtttattggtgaacatggcggcacaagttatcagtgtcatttggaaggccgaaaaatctaa

SEQ ID NO: 196073 - DNA, 285 bp, Klebsiella oxytoca
atgtcagatattgaacttgaaagatttaaggcaatgcttcgtgaggagtctattgatgacctgctaaccgcgcttgcgtacaaaataccgttgcacagattagacccattaatcatcagggggcgaacagaacacatcacaaattcggagttaatcgagtcgtttgaccgattatataaggccgggattttgatgactggtgaggatggaggggtggtcaaagggcctaaatgggttgagccagagttcgtaaaaacggagaaatactttccccatccgcggtga

SEQ ID NO: 196074 - DNA, 186 bp, Klebsiella oxytoca
atgataaaagactatctgattgtggcctaccttgcagctattgccgtcaggccagccacgctgacgttaattggtctttctgcaggagtggcattctttacgaggtgcagggggctgggcatagtcttcgtcgttctgttcatgctggtggccatcgctgcgtggcagtttgaatgtgacatgtaa

SEQ ID NO: 196075 - DNA, 726 bp, Klebsiella oxytoca
atgatgatattgaccaccgtctctaaaaaaacatcaaacaactcagctcttgttttttggcgcgtcggcacaaagcgaaaaggcatcctcgatgttcatattgattttgatcacgaggaagctgacctattggctgagctcgtagccattcgctatctggccttggataagcaggttttttgccgcgaacctggtgccggttctggttacaagctggtggtgtctaaaggcgcaatcaagaagctggcgatgggcaaatccagcaagaagtttgctttcaagtttgcttcttgcctcaccggtcgtctgaaaggcgcaaccattgaggtctcgcagagcatggagtttatggatgagccaggggagggtaatgtcgagctcctcgatgtggacaagcaggcctatacccagacccatgaggaaatctctacaccggccattggccccgtcctggttactcaacatgccatcgatcagtatcaggcccggataacctctggagaccccaaaaaaccgtgggcctcactggttggccgcctccagcatccggagctacaggtccagccttttgacgagaaggttgctcgccataaagccagaaagtatggccgcgtcgataacgtggaagtctggggccaccgcgattccaagttcaagtacctaatggtgatcaacgatgacaacaagaagcgcgttctcgtgacggtgtttgagcgcaatgaatga

SEQ ID NO: 196076 - DNA, 240 bp, Klebsiella oxytoca
atgaaaaagtttttgcgtattaagacgtggtttgtgcgcctgttctcacctgacaagaagacgctgggagctatcggtgaagacctgcgcaaggtcgccgtaacagctatcggtgttggtattgtaggattggctgtatctggggacaccataaccgtcgaagaagccggtttggtgttggtcattggggttatcctgtggatctatggtataatcttaaccaaggtcagcaattcctaa

SEQ ID NO: 196077 - DNA, 279 bp, Klebsiella oxytoca
atgcccgtcattgatgtcacgaaggttgatacgacgcctggtaacgacgcagtatgccccttctctccccctgaggggtgggggggggactctgcggcctatgttgagcttatgcggtctcggtatcgccatctgatgcacggccagagaatgatggtgacagcctccttcgcaagaagggagcctatccaagttaccggtccgttcgctgatgaggcgatgaagatcattagctcaatgaagatgaacaaggcgaagcctacagctttgtctgtctaa

SEQ ID NO: 196078 - DNA, 1728 bp, Klebsiella oxytoca
atgtcttactacaaagctgacaccgttcgtgaagctgcaaacggaaactggctattcatcctggcggctctagcgccccatcttgaaccagctctccgtaaaccaggtcgtcatgtttcttgccctatccacggtgggaaagatggcttccgcctgttcaaggatgcccacctgactggtggcggcgtatgcaatacatgcggtgctaatcatgacggttttgagttgctgatgtggctcaataattgggactttaagcagtgtctgagcgaggttggtgattatctgggagttgagaaagagcaaccccagtgtcaacaagccgctgcaccgacacgagctcctgcacaggccaaagcgcctgttcagcaagggcccatgaaggtgaataacaaggtcctcgattccaagaatcgcaaaaaatccattgccggtactctgattgcccacggtaaagctccctatgagcataacgaagacaatgagctcagctactttgccttcatccgtgacaggagcggtttggaacgcaccatttggggcgtggatcttgaaagagccatcggtgaaagcgaagccaagtatggtgatgaggtcgtcatgacaaacctcgggcgcgagcctgtaactgtcgtcgttgaagttaaggacgatcaggggaatgttgtgagagaacaacctatgcaaacgcatcgcaacacctggctggtggaacgtcgtggcgcttcggtgacgcagttccgcgcacgctcaaacggtggtgttgagtcggtgagtcaccatgttgagttgccccctgtggtcaaccgcacggtagaagctccggcaccgcaagcacaagcttcggccatacaactggaagggcaaagcagcgaaaacaagccgaaagttgttccaatgtttcgtgaacaacccaagccttggttgcttgagctccaagaggaaatggagaagagaatggagcgtgaacgcgcttacagcgctcgcctccgtgagaaaattgagaaggtatggaacgagtgtttgccgttctctagccgtgtgactgaaccaatgcgtctgtatttcaaaaaccgcgagctgctgttcaacgttgatgaagtagaaaaaacagactgtttgcggttcaatccggctatgccctactacgacgaagatggcaatgaagttgggaaattcccggctatcgtctgcgctatccgagatgtggaaggcaacctggtaacgctccaccgcacctatctcacccaaaacggtaaaaaagccaaggttggcaacgccaagaaaatgatgcccattcctgacggtttggatgttaatggcgcggccatccgcctcggtgaaccgagtgagggtatcctgggtgttgcagaagggctggaaacggctctgtccgcttatcgagtcactcaaattccggtttggtcaacggtcaatgcgaccctgatggagtccttcgaggttccagaaggtgttcacacagtattgatctgggctgacaaagataagtctgtgactggtgaaaagtcagctaacgtgctgaaagccaagctggagaagcgcggcattcgtgtttacgtcctgctgcctaaactcccaatcccacccagagcgaaagggattgactggaacgatgtcctgatgagtcagggaagcctcggtttcccaaatgctcgctacctgcgcgatttcattgcgagaaggagagctgagtatgcccgtcattga

SEQ ID NO: 196079 - DNA, 387 bp, Klebsiella oxytoca
atgaaccaagtagctaaattggacctcgcccaaatccgtcaacaagccatcaatgatggactgctggtggaccaatcctccatcggcacacaagctggtttcctgaccaatgtggcagtgaccccagccattgtcgatggagtatttggtgcggatggtaagcactcggcagaagacttccttctcatgtttttgcagctttgtgttgcccaaacaaaggtcgcttttaccgacaacaagaactggggaaagattcgcctctattaccccatgcccactgtaaatggctttttcaaacccactgaggttgtgattaagtcagaccctgtaaccgcagatgtcacaatcatgatggcctcagaagagggcacccatttgtgtttgtga

SEQ ID NO: 196080 - DNA, 861 bp, Klebsiella oxytoca
atgattaagcagcattttcaaaacgaactggtcaaatgcggataccctgatgacctgaccattgagtaccgtcttgggtactgtcagggtgatggagtggcattctacggatgtttgggtgttgatcatgctcaggcgttgatgaagcgcttgttaagcaccacaaaggggcgagtagatgctgtcagcagagtgaaaaacctgatagcacaaaaagacattgacaatatgtttcttgtccttcgtgagtatgctgagctccagttctgcgaactggacatcaacagaaacagctacggccatcattacagtcactggaacaccatgcgtattgatagcaacgtagacttcactgggatctttcctgatgatgacaccatgcttggaacaggcatcgaagggattgaccaagcgatgttagagcgttggcaaggcatctgggagcgtttcgtgttggaactgtcgggtgatgttaaacagctttccaagaagctcgaatccgacggttatgcgttgatagaagcctcgccacacgaagagaaagtggtttgggaacggactactcaaaattacttggtgcgagtgacagaactccctgaacgggatttcgacatggaccactgggatgacgacatcagagaccaaacgattcgttctatcctggagggaaaagagcgagtgcttggcctacgtgttgaggtgctctctcgtgaaaacgagattgttctgggtgaagagagtctgcacggtttgaccgttgccagtgatgacaagagctacgctggctacagacgagaactcctccggggcgctatccagcaaaccagagattttttctctcgccacctcaaagcggcataa

SEQ ID NO: 196081 - DNA, 273 bp, Klebsiella oxytoca
atgactaatccaatcgctggcgacatcaagattaagaactttggccgtgaccggaaatttcgttcggttgatgagcttcaaggcactttgtctgaacagtacaaaggtcagcatgtcagtgtcgtttaccctacaaagcctcacggattactccgtaccgtctttgtcagtgttgatgatgccggtggcataaatgagacttacggaaagcagtctccagtcgattttaatgccatcaaagatgacctgtttgtaccaagtgtaatgaattaa

SEQ ID NO: 196082 - DNA, 606 bp, Klebsiella oxytoca
atgtctgattcaaatttcggctttctagccctggccttgcgccaacgcctgatcaagcgctggtcgctgatgcactctgttcaaccagagtctgtgttggagcacagcgctgttgttaccttgctttcctacctggctggcaatatcgccattcagcaagggaagtcggtggatctggcaatcatgctggctcatgcgtcgttgcatgatgcagccgaggttctttgttcggatgttgtcacgccggtcaagaaagcaaatgctgttttgcagcgtgagtttgaacgactggaaaaggccgcagaggacaaacttatccagactcttcccgaagaactccaggatgcagtttccagagcctttgctcccggtggctatgaacaatcactggttaaggcctgtgatacctactccgcttacatcaagtgcaaacttgaggtggccgcaggtaatggcattgagttccaagatgctctcagcaaaatggaacgtattgttgctcaggtgaaattggacttcccggaaatcgacgctctggacaaatggtttggtgacggactgggccattcagtagataaattgctggccgggggtaacgatgactaa

SEQ ID NO: 196083 - DNA, 204 bp, Klebsiella oxytoca
atgagcctagacaagttaagtcggctggtggaccaacagcgaaagacccaggatgaaatcaacaacgaagtcattctggccgtcaaagaggtgttgtctacaaattccatcagcttggcccgtgagcttgttgggtgtgtcccgcaagatcatccattccatccgtttttgctcgccatagctaagcagcttgacccgagataa

SEQ ID NO: 196084 - DNA, 2454 bp, Klebsiella oxytoca
atgcaacaagcattaaactttgacctaccagaacaaccaaccccagtgctcttgcgaggggataagtgggactctgtttggtcagaactgactgataacgaggatttgaacttcgttgatgccagtagaggaaccagcttgtcatcgttgatcacgtcatcggttgaagccattcacacggccttgaacgatgggtggaccatgatggtcggctattccagtggtaaggattctgaaacggttttgcatctgtttctgatggctcttgtccgggcggttaggagtggagcaaccatcagccaacaccacttcatcttgcacactgacacactgatagaaagcccagaagtaagatggctggcggatcagaaactggccgagttggagcgtttcattgtgaaggaaaaccttcctctgaccatcgttctggcaaagccggggatcacgcagagttggacgggccgaatccttacggggagggggttgcctacattttccaactcttcggcccgtcagtgtagccaagaactcaaaatcacctcagccaaaagagcgaaggcggcttatatgcgagaactccccaaggatgttcggcagaaagtgtgcctcctgttggggagccgtgatgctgaaagcgctattcgtgcagccaacattgcaaagcagcgaggaagctcaaatcgcgtcattaagacgaaagatgggggggagctgtatgtggtgaaaaactggttggcgagtgatgtctgggagttcttgctatctgctggcatgggctcaccataccccctgccaagttacctagagagcaatgtcactacggcagagctctacaaggcagcgacgggggagtgcgtgtggtcggcaacagagaaaaaggccagtgatgcgtgtggtgctcgcttcggttgctgggcctgccaagctgtagggttggataagtcgatggagacattgcttgccacagaccctgaaaggcatggctacatgtctgggctgaaccgcatccagcgctacctggcaaaacgccggtacgcttgggaagatcgccatcccgtaggtcgaacgatttatgaggggggttacatcaaaatacagccggacgtttacagtcctgctttccttgagcgattgcttcatgtctgttgcagcatggactacatggagcaaaaaagagctgatgagcttgcttacaagctggctactgggcaagtcgaggataacgactggaaccgtcgaatggcagagccgcaattccggatcatatcggaagaagctttagtccatatcgacttcatgtgggccttccatcatttcaatgataagcctttccatgccctggagatttaccacagggtttggtcgatgggtgatctggatttgctggaagatgagccgcagtgcgaaaccgttcctcagtcaccaattccgaaaccattgtggttgagagttgggcgctggggcgatggttcgctgtctgatggcttggccgacccgttagcggaaatggcttactttgacggcggggatgacccgttggcagtgaaagttatcaataccgcagatggaaagagaagggtggtttgtttcgcagaggatgatgaggtgaaggtcgatcccgactccgctgcattcatcatctggaatgaatacccgcgacttagggagtcggtactaaagggaaattatacgcccggtagtgctgctcagttctaccttcggttcggagccatccagcttgcgaaaggaaaaggcgctttgtatcaccgcatgatgcaaagaggtcaaacctaccaccagatgggccttacagggctacagacgatggaaggaatccaacagcgcaaggacctcaaagtgctttgtgatgacaagtacaaagatctggtgaagcgaaaaatcaagggaagactggctacggtacgctggtggatcaacttgcacttaacgttcaagtaccacctccaccaccggactccgacggggttattcgtcgagaggcaacttgaccaggaagcaatggaagagcagaaacggcaccaggagcgatggtttaactacgtgactgacgcgatgctctgttactccagcgcattctgtatgagcgtcatggaggggcgagagggaagcggaaacgccaacatccgtcgttacatggctgcgaccagaagaaaggcttatacggccctctgtgagctcctaggccacactaacgccctctgggcgacagatgtggccttgagtgctgtagggaagtatgaggagatacaggcagccctaaccgaaggttccgcgctggctacctacctcgactggatcaacctactatcaaaacgtcatccagcctctttgaagcgacatgtcagaacgatgatcaaagtggttcaacgactacatcgccgcgacgacacagagttgcaaagaggacagcaaggcttgtccttggccgcataa

SEQ ID NO: 196085 - DNA, 261 bp, Klebsiella oxytoca
gtggtttgtgagatcgaagcagagtacccattgctgaacactcattcgggtgttgtatggactcagctcgatgaactcaacagttacaccatcaaaaaaaaccaatcactcattgatcacattgataatgcgatcgctgaactgttgaaacacaagactcgtctacagcttgatattcaaaagctgcgagacggtgacattgatctggtgaaacaggccaagcagcaatacgaagacaaccagatgtcgagtacccgctag

SEQ ID NO: 196086 - DNA, 351 bp, Klebsiella oxytoca
gtgaacagcattgcacctaagcacgggcatattgtaaagtttaccaaccaatatgggagctacgatgagtcagctttgctgttcaaagagggcgatgtcagaaaccagaacttggttgcttgtgtgggcgggaaaacgctaaacctcggagagctagagcttcaagattacgggctcaatatgcacatcggttgcggtgggccatttgagccggtctcagaagcgcagattcagtctttgtctgagtttgacctctatgagacgacttacaggttctggggccagagtccatgtggaaacggaatgttagacatcaccgtacctatgaagcgctggttcttgactgtgtag

SEQ ID NO: 196087 - DNA, 1338 bp, Klebsiella oxytoca
atgtctattgcaaacgatctgaacgatgttgttgaggcatctggcgacatgctggctcggctggccatttttgccgaccatattcccgacgaatggattactgccgctgccgccttgtctgaaaaggccactatccgccgacgccgcttaccttctgatatggtcttgtggctcgtcgtggggatggcctttttccgcaatgagcccatctccgaggtcgctcggcgcctcaacatctgtgcagaagggttggccaatgatgccttgctcgcggacagtgccctgtctcaggcccgtcagcgactcggcaaacagccgctcgagtggctgttcaaacagtgcgccgatgtgtgggggcgggaacgttatcctgaagaccattggcacggtttacaggtctttgccatcgatggggccctgttccgaacccaggatatgcctgaactcagagcacatttcggctcgggtaacacctcaaccaaccggcagacaccctacccgatgctgcggttggtcacgctcatgaatgtccgctcgcatgtcattgccaacgcggccatcagcccgtaccgcaaaggggaaatccccctggccagcgagttcattcactcattgccggacaagtcagtgaccctgctggataaaggcttcttcggtgccgacctgttgctgcgtattcaggccgaagacagcgaccgtcactggctcatcccggaacgcaaggggctggtatacacggaacttgagcgctatggcgacggtgaccgtctgttgcaaatgacggtctcgcctcaggctcgcaagaaaaacccggcgttgccgacacactggcaagttcgcgcagtgacctatgaggtggcaggcaaggagaaaacggtctttacctccctgcccgtggcgcgattcagcgcagctcaggtggcgaccctgtaccacgagcgctgggaaatcgagctgggataccgggatatcaaaagcgcgatgcagcacaacgccatcacgctgagaagcaagaaagtggacttggtctatcaggagctgtggggattgctgcttggatacaatctggtcaggcgggaggccagccaggccgccgtagcccatcagcgagcgcccaatgaggtgagctttaagtttgcctgtcatttcatcgcgaaccagatggcagtgatggcgggcgcgttatcgccagcccatacgccacggaggttggcggagttgcggggctgcataggcgtcatgttcatagaaaaacgccccaggccatcgagacccagggcggtgaagatatcaaagacccgttttccggtaaatcgcaatgcggctccgcttaagtga

SEQ ID NO: 196088 - DNA, 246 bp, Klebsiella oxytoca
atgaacacattagaacaacttgtaaatcagagggtgcttgaggaaggcctgaaaaaggcgaagccattggccgcgcaaatggggcttgaatcagtgcctgatgagatgcttgagatgatctgcccgaacttgaactactctgggcaatttacgccagctctttacgcaaggtttcaaagcgtaaagcaattgctgaaagagctgtcggaacaaacctcacctaagcacgcaatgctgatcagttaa

SEQ ID NO: 196089 - DNA, 300 bp, Klebsiella oxytoca
atgatcgtaaatccagagaccaaagcaaaggttctccgatatgcgatgggcaacccagggaatttatccatcaccaagctggcggtcgcgctggattacgatgcggttgatgtcctgggggttcgttttaaagacactgtaaatcttgaggttcgcagagctaggcgctgggaagtctggcagtggttctggaaccatccggatcaaagtgttcaactgtcaatcaaactgggcgtggttggcgctgtgttaggagtcatgggcttcttgaccggcgtagccccgtttctcttgggataa

SEQ ID NO: 196090 - DNA, 1626 bp, Klebsiella oxytoca
atggctactatcgtaaacaccaagttaggagaacatcgaggcaagaagcgcgtctggctggaaggccaaaagctgctgcgtgagggttactatcctggcatgaagtacgatctggagttgaaagattcccaggttgtgcttcgcgtcaaagaggaaggtaaattcacaatcagtaagcgtgagcgcaatggccgagtgtctccaatcatcgatctgaccgcgcaagagctcgctaccgtttttgacggtgttgagatgctccgcgtgttcattcggaatggcgcaattgtaatctccgctcatcatcaacaagagcgagtgatcgagcgcgtcaaccggcttatcagcaagctggagaatggagaatcgctttcggtatgcagcctctttcatgggggtggggtgcttgataaagcgattcacgccggttttcacaaatcgggaattgccagcgccatatcagtggccgtagagatggagggtaaatacctcgattcgtctttggcaaataacccggagctttggaacgaagattcaattgttatcgaatcgccaatccaggctgtgaatctcagcaagcggccaccgcaggtggatgttttgatgggggggataccatgtactggcgcatcaaagtcaggtcgcagtaagaacaaattggagtttgccgaatcgcatgaggaggccgggtccatgttctttaacttcctgcaattcgtagaagcgcttaacccagccattgtgctgattgagaacgtgcctgagtaccagaacactgcttcgatggaggtgatccgttcggtactctcttcgttgggttactccctacaagagcgcattctcgacggcaatgagtttggggtgattgaacgccgcaagcgtctttgtgttgttgcgctttcccacgggatcgacggttttgaacttgaaaaggttcagcctgttcgtaccaaggaaagccgcatccaggacattcttgagccggtgccgctcgattctgaacgttggaagtcatttgactatctggctgagaaggagttgagagacaaagctgctggcaagggattttctcgtcagcttctgactggcgacgatgagttttgcggcaccatagggaaggactatgcaaaatgcagaagtaccgaacctttcattgttcatccggaacagcctgagttatctcgcatttttacaccgacagaacattgtcgagtgaaagggatacctgaggaactcatccaaggtctgtcggacaccgtagctcatcagattctcgggcaatcggtagtctttcccgcgttcgaggctttagccctcgcattagggaacagtctttggagctgggtgggaatgatgccaatcatggtcgaagtcgtggatgaatcacagccggtgatcggtggtgatgacttccattgggcaacggcattggttgacgcaaagggcacgctaaagctgtcaccggcagctcaaaaacaggggatgcccttcaacattatggacggtcaattggctgtctattcacctaacggaacccaaaagagctgcggccataagccttgcgaatatcttccggtaatgatgtccggagacgcaatcatggtcacttcatctttggttcattag

SEQ ID NO: 196091 - DNA, 303 bp, Klebsiella oxytoca
atggaaaaacataacctcaaatctggattcagcatctatttcgctgacatccatttcgagaaacaggtctacgcattcggctcaggacttggcttcacctctgtgatctacgcctactctctgggccgagatccggaagaagctgaaaagctggcgcttgagaagtacgactctgacgaaacgaaggtaaaaaaggtacatgtcaatctggctcgcagccaggacatcaaccgctacacctttccagaacaaatggctggctttgctaatgccattcagtctcacggcgcggctgtgaactga

SEQ ID NO: 196092 - DNA, 345 bp, Klebsiella oxytoca
atgactactcttgccaactttgcgaacccgatttctgttattcaacgctctccaaccagtggggtgtttggctcaaatcagttcgtaggagacaaagagggatttgtacaaaaggtgatcggaaagtggtactgcactccagggaataccattcctgttgagagcatgtcccacctggagcaggcggagaaactctatgacttctacgtcaagtatctccaagtaaaagaaaagacctctgtgaaccttggcctggtgctgcacaagctgtacagcaccggttctatccaggaagcagagatcgctcttgaagcaataaaaactcaagctggcgtcacggcttga

SEQ ID NO: 196093 - DNA, 354 bp, Klebsiella oxytoca
atgaacgcagtgaagatgattcagaagggaaaccagctagagctgccacttttcttcttggatgaagagccgaaaaccgcagaagtaattccatttgagccaaagcccgcatggaatgatgatgaggtaaggttgttacgtgatgggcttttatggcatagccttagagtccttgctgatggacgagctgggagtgaaatcaagcaggaaactatgacttgggtgatgtccgatgaggtgcatccattctcatttgtggtctgctgcgatgaagccggttacgatccatctggagtcagggaaggcgtaaagtctatcctaaaacgcttagcgcggattaaagcggggggttaa

SEQ ID NO: 196094 - DNA, 192 bp, Klebsiella oxytoca; identical to SEQ ID NO: 148290

SEQ ID NO: 196095 - DNA, 453 bp, Klebsiella oxytoca
atgcagcttaaccgatacacggccagagagtctgacaaaggtcgggttcttcggaccattggttggtgcaaacgcaaccaccttacacttgccggtcttccatatgacgacaaccttgtaggaaacgatgggatcagcatagagatcatcactcctccaggtatgtctcgggaaatgctggagcaagccgtccaagaggggtactcagagcgagatgtcgtaaggcatcgcattttggagtgccctatcggttggttcattgaagctgatggcaaggcatttgatcatgaagttttccacgattacgtggctgctcatggttatggtgaaccttccagtgaagcctatgaactggcggagcggtggttctggcagggtaacgattatgcgttgatagctgcggaaatagttgctcgtgatctttgtgttcgtgatgacgaagatgaggactga

SEQ ID NO: 196096 - DNA, 390 bp, Klebsiella oxytoca
atgtctatcaaaaccaaagtcgaacaaatcgcatacggccatgctactgctcaagtgctcagtgaaatgggtccacaagagaattggtataaggcttatgagtatttgtcggagtgtgtagaactgggagacgaccctgaggatctggtcgtttggcaaaagtttgagcactgggaatggaaagacattctggagcaaatcgagagcgaagctgagtctctgctttcgactatcaagttggttttaggcttggcccacaaaggcatcattcagtcagcaattgactgctctctcgattcggacatgactcagcttgacctgattggaatggtcgagctcggcagtgaaatcgaagaaagggagtgtgctggaggtggctatgcagcttaa

SEQ ID NO: 196097 - DNA, 225 bp, Klebsiella oxytoca
atgaacatacaacttcaagccaacaacattgttctgttggcgcaaatcgaaaacaaaggcctcactgttgaaacgcattgtcgcagtggcttttgtggcatgtgccgggttcgtctaatcgaaggtcaggtggcctacgaagagacccccatcgcacttgtcaaagaaggggaagtgttggtttgctgcgctaaagcaaaaaccgatgtgaccttggaaatttaa

SEQ ID NO: 196098 - DNA, 585 bp, Klebsiella oxytoca
atgatccagtattcaggtaaacagtggggcgaacccaacaaatgggacatgagccgcatgagtttgcctgagttcgttgaagcccttgagttggctgttatgaacattcatgacgcttgtgagcaagggggacattacggaatcctcatggggaacctgaggcgcgatggggattacttcaacctgtccagccttgtggaacgtatcgcacctggaaagctggtggatgaaatcatcaaaacacagcacaactgtgtgagtgatcgaactcagtattccgggaagctagtgcgcatcgcccatgagaagctgttggtgtttcgtcgtaacgacgttgcctcatcgctctgtcttcttgctgccgtacaccgccgatcaaccaacatggtttcgactacgtggaaagctgcaatacgccgaaccctacaggggaaaacgttgaagctggagcagatttacaaagagattgaaccctacgcaaagcatcgagagaacaaccactggcaagcaaaggtcaggcaagttcttcaagatgccaggttctttagtcgcatcgaggtaggtgcctatgcacttgctgagtag

SEQ ID NO: 196099 - DNA, 1167 bp, Klebsiella oxytoca
atgccgattctgacagtgactcggattcggacagcgactccgattccgacagcgattccgactctgacagtgactcggactccgacagcgactcggatagcgacagcgactccgattccgacagtgactcggactccgacagcgactcggactcggacagtgactcggatagcgacagcgattcggattctgacagcgactcggatagcgacagcgattctgactctgacagcgattccgattctgacagtgactcggactctgacagcgactcggactccgacagcgactcggattccgacagtgactccgactctgacagcgactcggattccgacagtgactcggattcggacagtgactctgactccgacagcgattcggactccgacagcgactcggatagcgacagcgactccgactccgacagtgactcggattcggacagcgattctgactctgacagtgactctgactccgacagcgattccgactccgacagtgactcggattcggacagcgactcggactctgacagtgactccgactccgacagcgattcggatagcgacagcgatgccgactccgacagtgactcggattccgacagcgattctgactctgacagtgactcggactccgacagcgactctgactccgacagcgattccgactccgacagtgactcggattcggacagcgactcggattctgacagcgattccgactctgacagcgactccgattccgacagtgactcggactccgacagcgactcggactcggacagtgactcggatagcgacagcgattcggattctgacagcgactcggatagcgacagcgattctgactctgacagcgattccgattctgacagtgactcggactctgacagcgactcggactccgacagcgactcggattctgacagcgattcggactctgacagcgattcggactctgacagcgattctgactctgacagcgactccgactccgacagcgactcggactccgacagtgactcggattcggactctgacagcgattccgactccgacagtgactcggactccgacagcgattcggattcggacagcgatgccgattcggatagcgactcggatatcccgcaagccaacgcggataccaataccgctctga

SEQ ID NO: 196100 - DNA, 213 bp, Klebsiella oxytoca; identical to SEQ ID NO: 149220

SEQ ID NO: 196101 - DNA, 318 bp, Klebsiella oxytoca; identical to SEQ ID NO: 52346

SEQ ID NO: 196102 - DNA, 1029 bp, Klebsiella oxytoca
gtgcgtgagactatgaaaagatcacctttggatttactgctccttgcagcgctcacgctaggggcatcacaccaggcttgggctcaagatggcacaagatctggcttttatgagcgcaaagaagagggttggttctggtacaaggaagaaccaaaagagccggagaagaagccagaaaagcccaaaccaaagcccgtgccagaggcgaagctaacaccgccgctgcctgctgctccgctaccaagcggtccagaaatgttttcggcagaatggttccgggaaaacttacccaagtacaaagaccttgcctgggacaatcctaccgttgaaaacgtcaggacgtttctctacttgcagagatttgcgatagatcgctctgaacagttttccgatgctacagagctggcggttgtgggtgatccgttcctggatgagatcactcgacgtcctgcggccacatttgcctcacaacaggttgatcgtgacgccggtaatgccaaaaacaagctgctcaaaagcgtagccgaccgagtgggaatattcttcttctacaagtccgacgatgaatacagtgacttgcaagcaccgctaatcaagatgcttgaacaaggagaaggcttctcgatcattccagtttctatggacggcaaacctctcccgaacgggcttttcccccactacaagaccgatgaaggccatgccaaacaacttggcattgtgaccttccctgctgtttacctcgcatctccagacggtcagttcgcacctataggacaaggaccaatgtctcttcctgagttgaatcacaggattttggtcgccgcaaaacgcaacggctgggtcacagacgaagagttcaatcgtacacgcccggtactcaacctagaaaacaacatagccgaacgcttggcctcaccagagctgggctctgacctcaaacagttatcccaagcgagcggtgataaagacaactttgtgccaccggagcaactcatgaagtacatccgggaaaaattacaggagaactaa

SEQ ID NO: 196103 - DNA, 1434 bp, Klebsiella oxytoca
atggtcacgcacaagactgtaaaaaggagcctgcttgccctgagtgtagcggctactctcttcatcgccccgacagaggcaatagccgctaacggactccagtctcagatggataaactcttcaatgagatgagcaacacaacaccaccaggagtttatgaaagccaacggcgtggcgttctagctggtggccggttcactgccaagactcgactctttgacgagaacctagttagccttgccccaccatcgtggaaagctggttgtgggggcgtcgatctgttcggcggctctctttccttcattaacgcagatcaaattgtccagctcctccgggctgtcgcagcaaacgccaagggatatgccttccagcttgcgctcgacaacgtttttccggacggagccaagtggatagaaaacttccagaagaaagtacaagcgctcaaccaacatctgggcaattcctgccagctcgctcaaggtttcgtgaacgacctaaccagtggcatggatctcaaacacaaaactgatgcttccatcaccgctacaacatccggcctgtatgaagatttcttcggatccaagcaggaaaccagtggcaagagtcccctagaggaactgaaagctaacaagcctgacgaatacaacaagatgattggcaacatcgtctggaagcaactcaagagcaacaacgccaatacttggtttcaatacggggataacacgctgcttgaagcgatcatgtctttaaccggcacagtcatcattggtgatctggtaaacgacccgaactcaaccggctcgggggcgaaaacaacgcctctgacaaccttaccaggcaacaagatcaccttgtcagacctgatctcgggcggttctgttgagatctattcatgtgattctgatacgaccaactgcctgagtgctggcaccagcaataaaactgtcgtgctcaaaggcatcaagaaccagatcaccgacatgctgttaggaaccagctctacaccgggcgtcatctacaaatacgcaacgaactctggaaccttaaccgatccagaaaaggcctttgtttctaacctccctggaggcattggcaccatcgttcgtaacttgtctgtcctttcacaagatggcgcaaacctgttcgcaacagagtcatcgggagcgattgcactgacgatgatgtatagcttctcggaagagtttttccgcgcagctcgcattgcaatggctaatagcaagtcgccctacaagaaagaggcgctggagcttctcgcccaatcgcaacagcaaatccgtgatgaatacacaatcttgtcctctcaatatggcgatctatcaagccagattgagaaatacaacaacctcctggacaacatccgcaagcaaaaatacatgctcgcaactttgtctaaccctcctagcacgaactaa

SEQ ID NO: 196104 - DNA, 3606 bp, Klebsiella oxytoca
atgggagctttttcaatccactctatcggtgactctgcttttctggagcaaatcctgattgcagtatcaatgatcaccggcaccggagacttcgagaagatggtcagtattggcctgcttcttgggatcttgatgatctgtatccagtccgtctttcaaggcgcgaagcaaatcaatatccagcaagtgctggtaggttggatcatatatgcctgtttcttcggcccgaccacaacggtgactatcgaagacgcttacacagggcaggtccgagtcgtcgccaatgtgcctattggagtaggctttgctggtggtgtcatatctaacgtgggatacaccatcaccaatttgtttgaaactggatatggcgtaatcgtacccaatgtcacggaaagccacttctcagaaacactgaaacttttgaatgacgttagacggcgggcctatgacaccggggttttcactgcgcttaactcagcaaatggtggcggctatgttgacgtaagacgttcctggaacaattacatccgggaatgcacattaaccaaagttgatctcaacctaatgtcccttgatgagttgatgaatcgttcaaccgacacggctttgcggttcaactctcagctctacggaacccggttgtatttgtccacatccaaccctgacggcactgactacacatgtaccgatggatgggtggctattagcacagcaactgccaacctaagcagcccggttgttgttgatgctctaaacagcctgctgggtattgacacatcaaccggagacaacgctctaacgaagctgactgattcgcttcaagcgatgggtgccacaaccacctcatcaatcgactacctgaaagccgccgttcttgagcctctctattatgaggcagcagcaggacgttatcaggacctccaggactatggctctgcattgatgatcaaccaagccattcagcaacggaacacgcagtgggccgcagaacagtcgatgttcatgaccgttgtccgaccaatgctgacattctttgaggggttcatttacgctatcaccccgatcattgcttttattatcgtgatgggcagcttcggcatccagttagccggtaaatatgtacaaaccatcctctggattcagctatggatgccagtcctctcaattatcaacctgtttgttcataccgccgcgtcaaatgagatgtctagcctcagtgctggaggtctcaactccatgtacgcgctttcctcaactggagatgtgctgcaacactggattgcaaccggcggcatgttggctgcggccactccggtaatttccctgtttatcgttacaggtagcacttatgccttcaccagcttggcatcgagaataagcggtgctgaccacgttgacgaaaagatgcaaacgccagatctactcaagcaaggtccggttatgcaaagtcagccagcatacaatcacaaccagtttagtggtgcgattgcgaacggcgcagaaagcatgatcagcaccttctcgcttggctccactctggcatcaggtgtgagctccgcacaggcattacaaagccagaaatcggaggcattccaaagcaccctcggtcgaggtttttctgatggagtaagtcaggatcaagcctactcaagactctccaatgttgggcgcaacgtttcgtctcaaagcacagctcagagccaattggtcaaccaacaagccaagaacttcatggataagttccaagtggatgatagccactctgatgcggtcaaaggtgcttttgccatgcaggctatgggcactctcgatgctgacgaagcggcttccatgcttatgcctatggttggtaaggtcagggcggcaatgaagggggccgctggtattaaatcaaacagtacagcacttgttcctactggtggtgatggcgaatcaggcgatgtgctggacatcaaagcgcaggcgaagggggcaacagagtcctcagctcaagactcctcaagctggtcagcaagcgatgtgtctcagttcatgaagggtgtgagttattcacaaaccgatagccaagcgttgactaatcaattggcacagggttttagtcgttccggtagcgagtcgtttaagcaaacctggggggatagcttatcccagaacctgtccaagtcggcctctgaactggtgtctgcatccgacaccttcacaacaatgagccaactccagaatcaaatgggctccatgactaacaccgactttaaaactctcggtggtgcagtggcacaaacccctgaggccatgaatcaactgaatgactatttccgaaatgccgcgccgcagtcggttaaagacgaggctgcttcactacagcaaagataccaagcctacggaatgtcgcctcaggtggctcaagcagcagctcgaatgacagcaatgaccaactccaaaaactatgatccgggtaaggagcttggcgggtatcaagctgcactacaggcaatcaatactgcgtccgggcgcaacggatcctttagtggtgacgcctacggaaatagcggcattgaaggcccgaatgttcaaggtctaccaggtcaggttcaaggtgctgtaggcagtggacctaatatcccaaccggattcagagataatgtggctgggatggctggaactaatccggcatccgaagcaggccagttaccaacgaacagcccccttgttcaaaatgaacatgcagcaggtacatcagctcttcacaacctggcgcagcaaacagagcgaaacgtaactgctcccgaactcaaaaaagcacaagataacctcattaactcgcttccggagatgtcttggagcgcttcggcatgggggacgtgggataacttcagtgacaagatgggccgcagagctgaacaagcaggcggggctctcattgctggtggtcaggctggcgctgatgcgttctcacaagcaatggatcaaatgagaacgatgacgcctgagcaacgcgaccaattcgtcgcggcaactcaacgcggcgatcaggcagtcaaagaagagtttggctgggccgggggcgcgatggttggaatggctaaacttggccgcaacgtcatgggtgctgctgcaagcggctatagtgcagccaaagaatggttaagtggtaaatcagacctatcagaagccgctaaagggatgagcatggaggaacgcggtgcgttctatgcagccgcgttatcctctgccgcagaagccggtggtggagcagcacaacagtttatgaaccagtatggcgatgagttcaaagagacaatgcagtcaattgctcaaaaccgctatggacttactcaagggcaagctgctgtttatgctgagtcttttgacacaaacgaaggccgcatgaaccaggcaattcagaatctgaaaatggaatatgcagaacgtaatccggatggttcaccgatgacgcaaggtggtcagcctgttctttctcagcaaaacgaagagttcgctgacaagctggtaaacgtattgcagaactcgacgggagctggagaccgttcggggagttatttgactgctgtcagagggtacaacatagcaaatcaaaggttctaa

SEQ ID NO: 196105 - DNA, 273 bp, Klebsiella oxytoca
atggacaaatgccaggtgatagacatcccaagcgacctagaaaaaaaacgcgagtggatcaagtacaggctcaagatccagggtctttctctggccgcactgggccgaaaacacaaaacatctcgtcaggtggtgtcaacggcactctacaagcccagtccacgctgggagcatgagatagcgacagctttgggtatgaagccttctgagatatggccggagcggtacgacgaagaacacgaaatacccctcagacataaggaggcaagctga

SEQ ID NO: 196106 - DNA, 534 bp, Klebsiella oxytoca
atgaagaacaaagccaaagcgttggttctgtctgcggcagtcctgtcatcagcggccaacggcattgacctgagcggaaccgtcttcgacaaagcggcgaaagcacataaccttgatcctcttctggtgtattcagtcgcactggctgaatctgcatcagggagaggtaatggctctataagtccttggccttggacgctgcgcgttcctggactccctttctatgcaaagtcggaagaccaggcaaaggctaagctcgcggagtttcagcagcagtatggtcgtgccattgatgttgggttcatgcaggtgagcgtccgctggaatgggcatagagtttcttctccagcagagcttctcgacccagagaccaatgtcatggttggggcagaggtgctatcagaagctattcagtcatctccaaatgacttggagcttggcattggccgctatcacgcctgggaagacgaaaatcgagccagaaactatggtagccgagtcttagctatctatcgcaaccttcgtgatttgtga

SEQ ID NO: 196107 - DNA, 609 bp, Klebsiella oxytoca
atgttggaactggatattattggtgcgttagatgcaagagccgtcaacctcgatcaggaagaagctgatagaaacgtctacgagttcgatctgacattgtggaacctgctatgcactctggcaaaagaacgtccagaggatgcggcctcacaattttctttgggcatggacacggttcaaaagctgtcactggcaactgcttcccaattggaagctctggcttctggcgtgttgatctcttttaagctcgaaacagcagagcaaaacatcatcacgcgactctctggcgattacgacccggtagttttcatcaaccacagcgtagatgaatttgatgcggcctactggttgctatttaaccgcgtcgcatcgagagatccggagatggcaaaggaagtgttcggtgtttcgagggagcttgcagagctggtagccaaggcaacagacagccatttgcgccatatgtctggaacaacggttacgcattttacgctgcgttttgccccgtgcatcatcgaagaaattcttgataacagccgggaagagttaacacacccagtattgaaaaaattgcaacagtctctacagggacgtgggaggtggagatga

SEQ ID NO: 196108 - DNA, 552 bp, Klebsiella oxytoca
atgaacattggcaactcaggtacattgggtcgctgggttacagctcgacacatggctcttgctgggtacatcacaaaaatcatcatgatcgagacaggcctgacctacaaacaggtcaggcggctttaccaggacctagagagggacggatattctctggaacgaaaatccagaacgttccgtggtggtgcgacacttattcatagtcacacatccaagatacaggcttctcttctaatgcagctctacttcaatattggtggggaggcagtgttgcgatctgtgaacatcaaagccttgaacaaggcattcagaatgtatcacgcaatccgcaaagaagtgcccggaatgaaaggtgcccggtgggctccattcgatattactgatgcctggtgtcttgcttcggagttgagaagcggggatgcgatgctggaggtgtgcgataattgcaagtgtacttacttcacctctgttaaccaaagaacctgcgtagaatgtccgttttgcaaggaacaaggaaagagtggtggtggggagaaggagtgtgcttga

SEQ ID NO: 196109 - DNA, 279 bp, Klebsiella oxytoca
atgacgggcgttctgaatgaactggagggcgagtacaaaaagcgggaagaagatgaaaaagaaaaacgagctcaggccgagcgaataatgaatgacatggaatcctgtggtgtggacatcagcttgctaaatgagatgttcacgagcaaatcagaacctgataatgcgaaatattcaaaagacggagtttcgtggagtgggcaagggcgtcgcccggatgctttcaaggggttgggtgctgtcgagttggagcgctaccgaatcccacagaagaagtaa

SEQ ID NO: 196110 - DNA, 294 bp, Klebsiella oxytoca; identical to SEQ ID NO: 101131

SEQ ID NO: 196111 - DNA, 984 bp, Klebsiella oxytoca
atgagtcagtttgttctgggtttggatattggttactcgaacctgaaaatggcgatgggtcataaaggtggggaagctcgaactgtcatcatgccagtgggggcaggtccgctggagctgatgccacaacagttaactggtggtgcagggaccagcattcaggttgtgattgatggggaaaaatgggttgcaggcgtcgaacctgatcgcttgcaaggttgggagcgagagcttcatggcgactacccttcgaccaatccatataaggcgcttttctacgcagcactcctgatgtccgagcaaaaggagattgatgtgctggtgacgggcctgcctgtaagtcagtatatggaagtagagcgcagagaggctttgaaagctcgactggagggtgaacaccagatcacgccaaaacgttcggtggcggttaagtctgtggtggttgtgcctcagcctgctggagcttacatggatgttgtcagctcaaccaaagacgaagatctcctggaaattattcagggaggaaaaaccgttgtaatcgaccctggttttttctctgtggattgggttgctcttgaagagggggaggtccgctatcactcatcgggcaccagcctcaaggcgatgtctgtgttgctacaggaaacagaccggctaattcaggaagaccacggtggtgctcctggcatcgaaaaaatagagaaagcaattcgtgcgggtaagggcgaaatcttcctctacggtgaaaaggtatcaatcaaagactatttcaagaaagcctcaaccaaagttgctcagaacgcattgatccctatgcgcaagtcaatgcgtgaagacgggatggatgccgatgtcgttctactagctggggggggagccgaggcttaccaagacgctgccagggagctttttcctaagagcagaattgtgctgcccgaagaatccgtggcatctaatgccaggggcttctggttctgcggctga

SEQ ID NO: 196112 - DNA, 540 bp, Klebsiella oxytoca
gtgagtctaccaaccgagcgatggttaaacctgctcgatccgaagctcgaagaagaacgatccgagataacagaggatctactagaggcagagggtagagagtttgttgcggaggtacggagcaagctggatcacgctttagctgttcttgctgtagaggcgcagcaggaagcggacatgtactggagcgcgcacaaatcagcgcgtgaagaagcgtcagaagacgaacaggggcgtgttggtacgcgggttcgcatcctcggtgtatcactcgttgcagagtggtatcgcaacagatttgtcgagcaagcacccggacaaaagaaaagggttctatcaacacatatcaagaagggccggggttatgcctacagcatgtcgcacttcaagaaggaacccgcctgggcacaagagctgatccaggaagtagaaaccagatatgccgcgttaagacaacgcgccacggccatagcaaaaattcgccgggcgcttaacgagtatgagaggctactgaacaagacgcatagcgacgaggtgtga

SEQ ID NO: 196113 - DNA, 288 bp, Klebsiella oxytoca; identical to SEQ ID NO: 101132

SEQ ID NO: 196114 - DNA, 1065 bp, Klebsiella oxytoca
atgagtaagagaaccaaagacaaagacctggagaaactcgacgttatcaaagactcaccgcaaatgagcctgtttgagatcattgaatctccggccaagaaagacgactactccaacacaatcgagatctacgatgcgttacctaagtacatttgggaccaaaagcgtgagcacgaagacctgtccaacgccgtagtgacgcgacaatgctccatcagaggccagcagttcacggtgaaggtgaaaccagccatcatcgagaaggacgacggcagaaccgtgctgatctacgcggggcagcgagaggaaatccttgaggatgctctacgcaagctcgcagtaaacgggaagggccatatcatagaaggcaaggctggggtcatgttcactctgtacgaactccagaaggagctctcgaagatggggcacgggtacaacctgacagagatcaaggaggcaattcaggtttgtcgtggcgcaacactagaatgtatcagtgatgacggagaggcattcatcagctccagcttcttcccgatggtgggattgaccaccagaggtgagtttaggaagaaaggtgggaacgccagatgctatgtgcagttcaacccactggtaaacgaatcgatcatgaatctgtcgtttcgccagtacaactacaaaatcggaatgcaaatccgctccccccttgcacggtacatctacaagcgaatgagccactactggactcaagcatctccagattcaccatacactccatcgcttatcagcttcctaacccagagccctcgtgaattgagcccacgaatgcccgagaacgtcagggccatgaagctcgccctggaggccctcatcaagcaagaggtcataagcgactacgacgcgaaccagatcaaggatggccgcagagtaatcgacgtgcggtacgtcataaggcctcatgagaacttcgtgaagcaggtgatggcatccaacaagcgtaagcagcagacagagctacgagctatcaagcacggtacaattgaccacgacatcattgatgaaaggcagagtaagggtagatag

SEQ ID NO: 196115 - DNA, 435 bp, Klebsiella oxytoca; identical to SEQ ID NO: 101133

SEQ ID NO: 196116 - DNA, 1116 bp, Klebsiella oxytoca
atgttgagacgagaaaaccaaggggatttgtttgatgaccaagtggtgctgccatccctggagtcggtactgaccggcagaccttccggtcagcgttgtgacgatagaactacgtacttctcagcgccggatgtggatttgagtcgatatgaccacatcattgtgtgcctatctggtggcaaagactcaatagctgcgtatttgcggctggtggacatgggggttgataagtcaaaggtggagttctggcatcatgatgttgatggtcaggagggtagttcgttgatggattgggccttcatgcgtgactactgccgtcagcttgggcaggaactgggcataccaatgttcttctcgtggcttgagggcggttttgagggcgaaatgctcaaggagaatgcttacagccacccccatcgcgtagaaactcctgaggggctcctggtgctgcctagagaccataagcgttctaagccggggactcgccttcgtttccctcaacagtcgccatcattgcaaacaaggtggtgctcatcagccttgaagattgatgttggccgcagagctctcaacaaccaggatcgcttcaaggggaagaagatccttttcatcactggtgagcgcagagaggagagtgcaaatcgatccaggtacaaccaacttgaggcccacgcctgtgacagaagatatgggaagactgcacggttagtggatgcctggaggccagttcttcactggactgaggaggaagtatgggaagtgatcgaacgtcaccgcatcttggctccagtcccttatcgtcttggttggaaccggtcgtcgtgcatgacctgcatttacaactcacagcgtatctggtccacgatccggcactactggcctgacagagctgggaagattgcacagtatgaacaaacctttggggtaactgtatcaagaaaaagaatcgacgtgatggatttaggttccgctgttgcgccgatacaaattagtgatgtggaggcgttagagcaggtatccagagacgattacacgctcccgatttttgtgcctgaggggcaaaagtggtttctccctggtggcgcatttggccgtgaggcctgtggttctgattga

SEQ ID NO: 196117 - DNA, 609 bp, Klebsiella oxytoca
atgaaaacgataaagcggttcatcgtgtgggtgaattatggccttgaggggtggagcattttcggatcgagtgatgactgggatgaggcgttatctatccgttcggaagcgatcgacgaatgcaatattgatgaggatgacatcatcttggcggaaaacaaaaacgagctggtggtgaagccagcggccaagcaaatgacggaatggcaccgggagctggaagccgtcctaatgaccttggatgactgccagatggaatgtgacgggatgacatgggcagttagtcacctactcaatgaagccggtgtcccgcataactgcatgtatggctttgtacgaaacgaacagaccaaggacatcgtgacaccgcatttctgggttgtcctggatgatgggtggttggtggatctgaggctgcgcatgtggcttggcgatcacaacaacattcctcacggggtattccatcccgataacgagcctggattcttctacaagggtgagccggttcaaaaccataaagggatgagactgggcaaggcggtcctggacattatgaccgaaggaaaactttcacatgtgaaagttcctgaacgacaagacggagagtga

SEQ ID NO: 196118 - DNA, 522 bp, Klebsiella oxytoca
gtggaactggattacgacaagttagtatcaaacgcacatctggaggctgctggctggggtatggatgccttcaaccactccaacccatttgagagccatgtcatctatgtacgtgactatcgtaacgatcacatccgcctgttcactatcaagcaggctgatttcgacacgataaagcagccactccaccttacctccgacatgctggcctcagtgattgctgagttcatctcaaaggcagcaaaagggacgttgaatacgaaggagtcaaatacgctggcccctgccttggttggttatgccaaatcaacagaaacctaccggagctggcggagagtgtcaggggtaggagagcgactgcatatggtcatcaacatttacgccggttctgggctgttgaggcctttcattgctcgtgctcaggagactgtactgactacccaagaggtgttggtcttctcatcgcaggttaaagacctggatatatccaatcatcctgagtggtttaggggccggaggtag

SEQ ID NO: 196119 - DNA, 522 bp, Klebsiella oxytoca
atgaaggctgttctctggatattcgtcctgatcatcgcccctttcgtcattgcgaaagtggaccagtggcgcaaacgcggcattggtgacacctgggcgtggtggaaatcagagaacatgccttatgagctgcgctcggcaacgctgtttttgtccgaacaggacgtatcgaccaccctgcctgtgcccatgcacggcagggttgaccaggtgtaccaaaccaaaggtggggttctcatccccctggacacaaagctgcgccaagcaaaccacatctttgagtcggacattatccagctctcggtttaccgggtaattctgtcacacaagtacaagactcccgttgccaagtacggctatgtccgaaccgttgttgaaacagcggacggggatagagtccgttacatcaagacaaaccttctcagtgaaagagaagtgatcaagctgtggcaccgctaccaatccatccgctatcgcaaggtaaaacctacctgttcctgtggcggaaagtttcacatgtga

SEQ ID NO: 196120 - DNA, 474 bp, Klebsiella oxytoca
gtggcccagcttaaacataaccgcttcgtcatgttgggtgccttggtagcgactgttgtagctgccgccaatggtttgagttttatcacccttatggctggtggaataacccttctccagttcgtggcatggaagcaacaagatgcgatccggagccggtttaaagccgcgaaggatgcgtttgaagcgttgaatgtcatagcgtttgacaagcactgggtaggctcaaccgcgaaggtcgccaaggtgtcgagcacgagcacccctcccgaacgactggataagccttgggcggtgcaagttctggccgtaaccagtggtggggcgtggttcgcagtggacctgcaagtgaccggcaccgacaaggttcagatgctttacctccaccaccttagtgaaaagacagcaaagacaatgctggccttcgatctcgaagtgtatgagcgatttttcggaaaacctgatgttgcatga

SEQ ID NO: 196121 - DNA, 294 bp, Klebsiella oxytoca
atggaaaaagtcaaaaacgtagatgccgttgagttcacggcagcagataagaaggcgatgacccatgcggcttacgcccagtgcttctttgttctggcccaagcaatagcgtttccttccttggggatggctggcgctatggttgcagctatgtgcggcatgatgccgtggttgaccaagtttgccaaagaggccccctctaaagcctttggcatggtgatggcctcgctcggcttggcacctgtgtacggaaagctctgtgagctggtggtcagtgcgattcagggagcttga

SEQ ID NO: 196122 - DNA, 855 bp, Klebsiella oxytoca
atgggggtagtacgagttccctacctcttggctgagctgaaagaacgcggatgtgctgatgaatctgctctggcgaaggttatgcagccaggatgccggattgaaggggaagacctgcgaaagttggccgccaagttaggggttgaagtgtccgaactggcacctgcaccagagaacgaggccaatacccggttcaaagcaaaactgagaggaggtttggcctcctttctttttgagtacgacggctgtttccgacatgccgaaggctccagtcatgcagaaatgttggggatcgagcaagaagacgatattggccttccgagtagagctgcggacgccatgctcctggagaagacgctttatcaagtaatcgctcgggctaagtacatgcttggcaaaatcgacggcaagtttgtcaggtcagaacaggcaatcgagttccgtgagcagcttgctcctgggatcttcaagcctggttatagaggcttccgatttaaggaggctgctgctggtgatctgcctactgtcatgattgacggtaggaagttcaattgcattgccagcatagccagagcacatggacttgatccggtaacggtgcgtaggcgcattgcggacaccgggaaggacgcggacaaactcaccaatgatgagtggaaactcatcctcgccaagaagaaaggtaaagggaagcccttcacctatctggacaggacctacagcaacattgctcagttctgtcgtgagcatcagctcaacaccaaccttgtttaccagaaagtcaaagaccgggctgatagcgctgatgaagagttctggggactgataatcgaaacatgcaaaaggaaaatctaa

SEQ ID NO: 196123 - DNA, 960 bp, Klebsiella oxytoca
atggcagaaagcaaagagctcccctgggagagagagcttattgagaagtacatgttcaccctgcataaggagcaggtgaaagatcgccgctggcgggctctgttgcgtgtgcttcgcgcatcaggtttcgtgcttctcatgatcggcttcatcatcttagcgtctaatccgggcgggatgccgtggcaaagcaccaaagcaggagcccctcacaccgcgtatatcaacatccgtggtgaaattgctgccggtacactggcagatgctgatcaccttatcccgtctatccaagccgcattcgacaacccgaactcccaagccgttgtacttcgcataaacagccctggcggtagccccgttcaagctgggcggatttatgaagaagttaaagcgctgcgagcgcttcacccagaaaaaaaggtctacgccatcattgatgacatcggtgcgtctggcggctactacatcgcctctgctgcggacgagatctatgctgaccgcgcaagtctggtcggctctatcggcgtcatcagctcagggttcggattcactggcctgatggacaagctcggcatcgagcgccgggcgatcacttccggagagcacaaagctcttctcgatccattctcccctcttacctctgacatgaagacattctgggagggcgttctatcaaaaacccaccagcagttcatcgagagagtgaaggctggtcgaggcgagcgactgaaaggcgaccaagaggtgttttctgggttgctttggaatggggagcaggccaaagacattgggttgattgatggcttggggagtttgaactccgtggcgcgagacgtcatccaccagagcaacctcgtggactacaccccaaccgaagacatcatccggcgactgacccaacgagcgaagctcgaagccagttccttcgtgcaagaactcagtgctgtgaaagtttactga

SEQ ID NO: 196124 - DNA, 861 bp, Klebsiella oxytoca
atgccagaacaaaataccaaatcgctacgcctcggggttattgccgccattattttgggactcgcaggaaccgggttcggcatttaccagttcgtgaaagagaaggagctggcgcaagagatcgctaacgtgaagtccacggtcaaccaggtgaagggcaccgaaggtgtcactttcaaaagcaaagcagagtttgaagctgcggtggccgaaagcatcaacaagtttgtcgcgcagaaacaacaagccgacatcgatcagaagtatgccaagtttgaggcagctcctgagaaggtcgatgacggtaaacacatctacggggcccctggtgctaggttcacactggtggagttctccgatatggaatgtccgttctgcaagcaattccacgacacacccaagcaaattgttgatgccagcaaagggaatgtgaattggcagtggaagcatatgcctctcgatttccataatccgacagctcacagagaagcattggccgctgagtgtattgctgagcagaaaggcaaccgaggcttctgggtcttcgtgaatgacattttccatcacagccaaggtaacggtgctggggttgctgacttggcctctgttgttactggggttggcgctgatctggatgagttccgggactgcctcggttctggcaagcatgaagacaaggttgaggctgacatccagaaggccaagagctatggcgttaacgggactccggccacctttgtagtggacaaccaaaccggcaagagtcagctcctcagcggcgctcaaccggcacaagccatcatggctgtgatgcgaaaaatgatgattgagtcgcagccagacgactcagcaagccaataa

SEQ ID NO: 196125 - DNA, 447 bp, Klebsiella oxytoca
atgctaaaacgcggaattatcaatcttgctgcgagttacatcattgtcgatgccctactccgtagtgcagcagtttggatctttggcttgcccttctcggttggtagcgcttacgccactggtgaggcaagttcatgggtcgtctatctagccatatctggcgcaatgacactctgttccatcgtaacagcctacctgctcgtgacctatcacagatgggggttaatgacagccagggtctggttgctattgagtgcatgtctaaacggctatgccgtctacctgagtagccacaacacccagtttgtggtggcactgctttccagcctgtttattgctttgtggatgctcaagacccttgaacaaccagcagtgaaggggacgtacaaggtaatcgcagatcttcaccatcagctatggggaatgttgaaggggcaaacacaatga

SEQ ID NO: 196126 - DNA, 519 bp, Klebsiella oxytoca; identical to SEQ ID NO: 101134

SEQ ID NO: 196127 - DNA, 231 bp, Klebsiella oxytoca
atgatgattattgcaactaaggacggcttgctggtggccgcagaactaatcaaggaagagaccgggtactggctactaaagcctcgtgaccagaagatgccgatcagggtgaataagcaggatcacaataaacgtgcgttcacgcatatgggcgacgcccttcgctgggccggtgatccagagcttgccaagcagttcgatgctgagggggaaatacatgcaaattcgtga

SEQ ID NO: 196128 - DNA, 510 bp, Klebsiella oxytoca
atgtattcaccatattcaaaagaatacctttttgaaaggcagcaacaaaataagtatgagagaataggttccgaatataaagggctagatgcgagcaagtggcctagattgtatattgaatgggatctaactccagaaaatttctaccgttccttagatggtgaaaatatggagtccgtttcacaggcttatgataaaggatttgctataggtaaagtaactacagatagcatttataaaaaccttttctttaactgcatagtaaaaaatagcaatgatttctggtctgtttgtaatgaaaataaagcatgtggtgtgctaggtagatggaaggaaaaacaactaattactccaccactactaacaccatatgaaggtactttgattattgctggtggaaatcataggtttaatgttgctcgcttagctggagctgaaatgatttactttattacgcctaaagaatcgcaaagtgaaattgactcaatcatatcttcggttttatggtaa

SEQ ID NO: 196129 - DNA, 888 bp, Klebsiella oxytoca
atgattagaaaacctgattatgaaagggggcgtttttttatcagtcccattttgggttgtaatgcgcaatgtcgtttttgctacatttataataagggctatggaactaaggctgtaagaaacgaatttagcatttctcaagttttagaacatatatactctcatcctaatttcaaattaggaagagatgggtcaattatttcaattggtgcttggggtgatccgtttccaagatataataaagaattatgtttacatagtttacattggcttaatgaattatcatctctgtataatcctattcaaataatgagtaggtatgaattgcgtacgaatattatagatggaattgctaaagcaaaccactatattggccatatattgtactcgacatccataagttcaattggaagatttagagaaattgaaccttactcagatatgccggaaaatagacttaggagcctgaagctactaagggaatcaggtgtcgcgactaatgtaatggtgaagccgtttatacttggaataactgacttagaggcgaccgaaattgcaatggtcatgaaaaaatatgaagttgaacaatgcgttgttggtgatcttttgttagacagtcgagttaaaaaggaatttactgatattggcttaccgatctctctggaaaacgaagaaaagcaaatacttgattgtacttcaggagagagttatgaactgagtgcatctgggaaagttattgttttgtcacgagttatttctgacttgggtattaaggtttttagaaaatctagttgtgttaactcctatattttaaaagtaccaaatccagccaactatatacagtcggatccgaataaatattgtataaattgcggggtatgtaagtaa

SEQ ID NO: 196130 - DNA, 729 bp, Klebsiella oxytoca
atgataagtgctagttcgagagaacgctggaatactaaaacgataataaccatcagtcttttggtatcgatagttctaattataatttcattcttttatccaagtaattataatgactggaagaatatccagattagcgtggcttgctcgattttggcaagtaatattattatgtttttaacttctgaatatatgctaagaagtcaaaggcgtgcggaaataattgaccgctggggcgttgaatccatatataaaaccagagccgaaatgaatgcatccactaatgcttcgttattgcaatgcaaaaaaaatatcgaaatcatagcattcggcttgaaatcatttcgcgagacaaaagcagtggagattaaaagcctattggataaaggcgttagtgtaaaaatacttacgttaaatcctgcttctaaaatcttaaacttagttgaccaaagagagaacttagtggaaggttcaacaaaaaagtcaatccaagatttgagtgattgggttttaagtttaaaagcaagctcagaaaaaaataatattgaaattagatattatgattccattccattagatttttactttaaggttgatgacagaatttatgttgggccatatttaaagggtgtttctagtcagcaaactatatcgtatgaattttctcttggagaaggatatatatactggtcgaattatttttcaaaagtttgggatgaatgtaaatga

SEQ ID NO: 196131 - DNA, 297 bp, Klebsiella oxytoca
atgaaatttctaactgcaacaaacgtgcgggcggcgaagccatacctgtcccccgtggctgtctggcaaatgctacttaaacgcctgctgggtcagcactacagtctgtcactgaacaacacgccattcagtgatgaaactgttatacaggaacatatagatcccggtatcactctcgctaatgccgttaactttctggtagaaaaatatgagtttgttcgtaacgatcgcaaaggatttagcttgtcggaacaatcgccatatctttggctgtcgtgcgacaggccactggcctga

SEQ ID NO: 196132 - DNA, 480 bp, Klebsiella oxytoca
atggaacaacagttaccgttatttgcttgtgaattaacccccactgaccagcaaaccatccggacggcactaaccctgctggaatgtcagctacgtgagcctggtgcagcatttacatcctgtagctcagtacgcgactggctacgcctgcagcttgccacgcttgaccgcgaagccttcaccgttctgtggctcgacaatcagcaccgtctgatagcccacgacacattgttcctcgggacgattaacagcatcaccgtccatccgcgtgaggtcgttaaatccggactgaaaaataatgccgctgcagcggttctggctcataaccatccgtcgggagaggcagaacccagccaggccgacaggttaattacagaacgcctgaaacaggcgctggagctggttgatatccgcctgctggaccatctggtggtcggcgggatggatattgtctcttttgccgaacgcggctggctgtaa

SEQ ID NO: 196133 - DNA, 474 bp, Klebsiella oxytoca
atgaccgacattattaaccttaacgataccctcccattaccgccacaacttgcaggtttttcgccagcgctgacctccgccctcgtaccggacgagcaacgcgtcagcttctggccgcagcattttggcagcataccgcagtggattattttagagccgactgtcttcgcgtggatgaaccgcttctgtgcagactacagcgggggcatctggaatttttacacgcttagcaatggcggcgcgtttatggctccggaagcggagagcgatgaactctggtcactgttcaacactatgaacggtaatggtggtgaactcagcgctgaggctgccggaatagccgtttgcctgatgacatacagccaccacgccatgcgcaccgaatgcgatgccatgacggagcactactatcgcctgcgggactacgcgcttaaccacgcggaatgcagcgccatcatgcatatcatcgactga

SEQ ID NO: 196134 - DNA, 255 bp, Klebsiella oxytoca
atgccaccgctgcctgataacgcccaccagggcaccctttatccgaccgctctggaaaacaatccctgcagccgctccatctccgatgacgacctgtgcgcctggtgctcgcacctgctttaccgacctggtgaacgcagcctgtgcagcttaagcctcccggaggggcactggccgtcacgctgtgatgaggacggctatgcgcagtcctgcccgtcactcctgcttaaccagcatccccaacccgataaataa

SEQ ID NO: 196135 - DNA, 819 bp, Klebsiella oxytoca
atgagattagccagccgctttggccatattaaccagattcgccgtgaacgccctctgacccatgaagagctgatgcagcatgtccccagcgtcttcggagaggacaaacatgcttccaggagtgacaagtacacgtttattcccaccatcaccctactggaaaacctgcagcgcgaagggttccagccgttctttgcatgccagtcacgcgttcgcgatccggatcgtcgggagcacacaaagcatatgctccgcctgcgtcgcgctggtcagataaacggtcagcaggttccggaaatcatcatcctcaattcgcacggaggtgaatccagttttcagctattgccaggaatattccgaagcgtctgcacgaattcgctcgtctgcggacagtcgtttggcgaaatcagagttccgcaccggggtaacgtggtggagaaagtcattgaaggagcttatgaagtgctggggatatttgacaaggtggaagagcaacgtggcgccatggagtcgcttttactcccgcccccggtacagcaggcgtttgcgagagcggctctgacataccgctttggtgaagagcaccagccggtaacggcatcccagatacttacgccccgacgctatgaagaccgtaaggacgacctgtggtcagttttcaatcgttgccaggagaacctgctgaaaggggggctgccgggacgtaccgccaaaggtaaacgccgccacacccgcgcggttaaaggtatagatggtgacgttaagctcaaccgcgccctctgggtgatggcggaagaactgcagcaggcgctgagctga

SEQ ID NO: 196136 - DNA, 342 bp, Klebsiella oxytoca
atgaagaaaatcattacggtcacagcagtctgtctgctgtcattttcgtcgctggctgcgtcttcaccggtcagtgtcagcgtcagcccgggaagctacagtcactattcatcgattcggattacatcaaaagtcgattcgattgtgattaaacaactcattgtcaaccggggaaactgccaggatgcagaattcgccagcccgtggaaacctgtacgtctgggatttggcggtgctgtatcccatgaatttaccggcaagggactgatggttccctgtaatgtactggaagtggtggtccagacaagcgaaggcgcatggcagtttgattttgacagctga

SEQ ID NO: 196137 - DNA, 465 bp, Klebsiella oxytoca
atgaaaaataaactgattatttcatttttactggcttcagtgctgacgccttctgtctcgcatgcgtttggcaatcgtgatagctgggtaagtggctatgcgcagggaacgtctgaatacaccatcctcggtaaagggcaatcacaactatacctcgcctgcgacagttccggctcacagccagcgaccattatcttcactgacgtgaacggccatcaggtcaggatggacagtggccagacacttaccatgagaattgataacgctgaagaagtgaatatcagcgagagcgagtctcatgtggggtctgacaatgtgatgtgggcatggaacaaattacgcaccggcaaacgtgttgtggtttcaggtagcggggtaaaacctgccactttcactttagcgggggctgccgcaattcttcctgcgttcggtgacaacggctgcgtgcccggctttgcactgtaa

SEQ ID NO: 196138 - DNA, 888 bp, Klebsiella oxytoca
atgaaacatccctcgggctacgcccttatccgccgtcacctgcggcgctatccacgctcactacgacaacagttgttgaaagagctcaatcaactcgtcacgtacgaacccatgattggcatcatggggaaaacgggtgtcggcaaatcttcactatgcaacgcgttgttccgaagcccggcctgtgccgtgaacgctgtagaagcctgtacccgccagccacagcgtgtccggctgcgctttggtcagcattacctgacgctcgtggatttacccggtgtgggtgaaagtgttacccgcgatggcgaataccgcgagctttatcgtgacctcatgccgcagcttgatatggtgctgtgggtgcttaaggccgatgaccgcgcttatgcgacggaagagcagttttatcaggacgtgtttgcacagtacggcggacctctgccgccggtgttgtgggtgctcaatcaggtcgacaaaaccgaaccggcggagcagtggaactggttatcggctcagccctcggcgttacaggctgagcgtattgtacagaagcagcaggctggggctcgtcagttagggattgctgagcaggatattctgccggtctcggtgcgggggcattatcgcctgtcacgtctggtggaagcgatgattacccgcctcccaaagcaggcccgcagcccgctggttccccacctgcataatgggtatcacaccaccagcgtcatcagcaccgccagcagcagctttggcgatgccgtggtggaagtgattgataagattattgatctggccccgctaccacaggtggctcgcagtgtgctgcaggctgtaacacacactgtcgctcgcacggcacgctccctgtggggatttttcttcggttag

SEQ ID NO: 196139 - DNA, 927 bp, Klebsiella oxytoca
atgtacaggtatattgaagtgaattcagtcagggaaggggtctatcttctctggcgccttggtcatgcagaagatgccagacgctttgctttcatttcgcaaaagaacaggcaacaaattcaggacaaaattaacggtatcattgatgatgaaatacaaaataatgacggtgactcacgtattctcagagcagtgctccggtatgcctcaaattaccgtgagcgtagtattgatgaatctcagttgtcatggctcaggcgggatgcttatggttgtctttatttctggttagggttagtaaaagaatacgtaacattcgggatgacggaaagtaatgaagtgaacccccgatattattaccgacgggaggggcatttctggcttactggtgagcacatgtcgtcatcagtccctgacaccccggaacaatgttatctggcaatattatccatcctggatatgttacctcaccggattaaacgcaaagatgccattgtagcggaattgagagatgaatattttttcaataaggaccgactaagaaaagatttttcctggatggctgatgcagagcctgaaaatattgaatggataatggaacaattcagccagcatcgaaaaattctgcgggaattcagaggtgttagtcttgttcatgaaatgcagagtcttgccatccctgcaatatattatctctgggaagaggaacctgacacaaaacaactgtttcttaatgtgctacgtaagcgctatgcgaacatgaagcatcgtaagaaagtagcggttaaggcaccggttaatattcgcatttctgaaaatgcaaaaaagactctggttaaactggagaaacgctttaaccgaaacagggctgatgtgattgaatatctgatagaaaaaacctggcaagagctgaaccaaaaaaactaa

SEQ ID NO: 196140 - DNA, 576 bp, Klebsiella oxytoca
atgcttcacaataccaacagaaatcaccaaccagataattctctacagaacgttttattcagtcatcagaaccagctctttgaatgctactcaaaactcttaatgctgcgggtggattttgcctatcgccagaatagtgattcatttaacgccgctgacatgaatcaactggtcgccgatatgacctggctgacggtacagagttcggcattatcagggttggtaggatatgcctgggtactggaatacggagaagaccaccgttaccacatccatgctgctttttatctcaatggtcagcgtcacaggaaggtctggtgcttctgggaagccattcagtcgctgtggggggacatcacggatggagaaggctatgcgcaccgctgtgagcctaaaggacattacaggattcggggagagcgcgtagttagcttttccgacagcagaggacgggagggcatgcagtacatcctgagctacctgggtaagcagtcgcagcgaacagtacaccggatttacagagttagtactgtcccggcaccggcagtgagtggcaggcgacgtaagtacagctga

SEQ ID NO: 196141 - DNA, 207 bp, Klebsiella oxytoca
atgactacagattacagtgttcttaaagaccaactggtaacgatggcgtttatcacccagctcaccggcttaaccgacaaatggttctataagctcatacaggacggtgaattccctaaacccattaagctgggcagaagctcccgctggcttgaaagcgaagtggaagcctggctacagcaacgcatagcgcagtcccgtcagtaa

SEQ ID NO: 196142 - DNA, 387 bp, Klebsiella oxytoca
atgtactcaaaatcttttatcgcgcttgacggtaatcagcgcctcacgggcgcggtcactgcacagcttcacccttacgaccgctacacctgccacctctgcggcagcgctctggtattccaccctgaatggagtaataacctcccatggtttgagcacacatgggaagacctgacggagaacggacgccatcattgtccgtatgtacgccctgagcctaaggaagccaggcgggtgcgcatgctgcgtcgctatgtgccgaatgtcttaccgctggtgcgcaaggccgaatggtactgttctggctgcgacagcgattatcaaggcgagcactattgtctgacctgccgtaccggtgaccacagtaccgaacgttgcgcagaatga

SEQ ID NO: 196143 - DNA, 435 bp, Klebsiella oxytoca
atgcaatttcgaaccattcgtaccgcccttgaccacgagggcgaagtcacttacatccgggacctgactccgcgttcaagggggctctggttttgccgttcctgcaacaatcccctgcgtctgcactggacgcatgacagcggcggttatttcgaacatgacctggaagacgctgacgaacaccgattaacacattgtgcgtaccggatcattgcccgggataaaccggtatccgcttttgaccaggccgttaatgcactgatagaacgtgatgatgtatccgtcacagcaccttcaaataaggattacttctgcgtactctgccagcgtgaatattatggtcatcgatgttgcccggggtgcggacagcatatctacagcacagaagtgaatgaccttgatgccctgacgataccggttaaatttgcgaaataa

SEQ ID NO: 196144 - DNA, 168 bp, Klebsiella oxytoca
atgaagaaatgtacacgttgcaacaaaaaaagaagcgtccttgagcggtggctctcactcgataaagaattctgcgacgagtgcttatttgatatcgaacaggaaatcagggaaaggcggattatcccaatcagacacctcaaagatagcaacgaagagaagtcgtaa

SEQ ID NO: 196145 - DNA, 939 bp, Klebsiella oxytoca
atgaagaataaaatcgatgtcagcgtcatcatccctgcttacaacgccgcaacgactattggttgtctggtcaataaaatcctcagcgaaacccgcgtggctattgaacttatcgttatcgatgatggttctactgatgaaacaggcaatattcttcgtcaaatccacgatgaccgactcattctcatcgaacaggccaatcagggtgtctacgcggcccgcaatgcggcactagacattcatcggggagagtgggtgattttcctcgatgcagatgatgatattgccgacggaatcattgaaaaacgatggaaagtagctattacgtcgcaagccgatgtcgtgatctttaatggctggcattttgacgctgatcaacaacgaagagcagtccaccgaaagcagccctatgcgacaactctgtcaggccatgagtggatcagatactgcgttacccgccgtgaatggccgcattacctgtggctgcaaatggtaagatcatcctatatcaaacagcattcactgcacttccagcccggcaagagccataaagacattctgtggacggtacacctcgccgcttgcaacggttttttctgcgtgtcggacattaaggattatatctacatcagcaatacagcctctatcacacaccggtcagattattacgatgttcgtgcaatgagctatatcgacgtgatcgtggaaatcatccggctagcggtacaagagaaaaacaaaaaaataaaggtgtttttgctcagacatgcgttggtggaagcacgtcattttttgggattatatcgcaatcgcgtcggaaataaatctggagtaaaaacttgcttcaaagctcacatctcgttcgccagtttagtcaggggcatcagcagttttagcgatgtgtttttctttataaagctggtgggtaagctgttctga

SEQ ID NO: 196146 - DNA, 834 bp, Klebsiella oxytoca
atggcatacgaagctcagatcagccgtactaatccaacagcatttcttttcgtcgtcgatcagtctggttcaatgtcagacaaaatgtcttccggtcgaagcaaggctgagtttgtcgccgacgcgcttaatcgaactttaatgaacctaatcactcgctgtactaaatcggaaggcgtacgtgactatttcgaaattggtgttttaggttatggcggtcaaggggtttctaatggcttctctggtccactgggaggacaagtactaaatccaatttctgctctcgaacagaatccagccagagtagaagatcgcaaacggaggatggatgatggagctggcggaatcatcgagacagcaattaagtttccagtatggttcaaccctattgctagtggcggcacgcctatgcgtgaagccctgaccagagccgccgaagagttggtgacttggtgtgatgcccatccggattgctatcctccgactatcctgcatgtgactgacggcgaatcaaacgacggtgacccggaagagattgccaatcatttacgacaaattagcaccaatgacggtgaagttctgattcttaacatccatgtcagttccctcggaaatgatccaatcagattcccctcctctgacgcgggtttaccggatgcctacgctaagctgctcttccgtatgtccagccctcttccggaacatctggtgcgtttcgcgcaggaaaaaggtcatacggtcggaatcgaatctcgtggattcatgttcaatgctgaggctgccgaactcgtcgatttcttcgacatcggaactcgcgcttctcagctgcgttga

SEQ ID NO: 196147 - DNA, 360 bp, Klebsiella oxytoca
atgttggttgattgcgggaaactcatttgcgcatggcctttcgataatccagaaaaatttaatgagcggccaacactgcttgctacgctgcccgctcataacgatttcgtcggtggaagcactttctggacacggcatgggaaaactttttaccttaaaaaactcaccgaacccaaacttctctgtatgacagatgcgctcggcgaatgggcactgaaacaagcgctggcagaggattctggttttgtcgaattactttcgctgcaaactgaggaagagcttgcagagttagtcctgagagagcgtgcagcaaaacgtatgcatatcgacgactcaacactgcttgtactatcgttttaa

SEQ ID NO: 196148 - DNA, 1704 bp, Klebsiella oxytoca
atgccttacccatctcttgaacaatacaaccaagcgtttcagctacatagtaagctgctaatcgatcctgaattgaaatctggctctgttgccacaacagggttgggtctacctctagccatcagcggtggctttgcactgacctatacgatcaaatcaggggttaagaaatacgccgttcgttgctttcatagagaatcaaaggctttagaacgccgttatgaggctatctcgagaaaaatttccagcctacgctcaccctactttcttgatttccagtttcagccccaagggatcaaagtcgaagggatatcataccctatcgtcaaaatggcatgggctaagggggagacgctaggagagttccttgaggtcaacaggcattctgcacaagcattagcgaaactatctgcatcgattgaatcacttgccgcctaccttgaaaaagaaaaaattgcacacggtgatttccagaccggaaacctgatggtttccgacggaggtacaaccgttcagctaatcgactacgacggaatgttcgttgatgagattaagacattaggaagctcagagctggggcacgtcaattttcagcatccccaacgtaaatcaacaaatccgttcaatcacactctggaccgtttctcactcattacgctctggctagctcttaaaaccttgcaaattgaaccttccatttggaataaatcaaattcggaactggatgcaatcatttttcgagctaatgactttgtagacccaagttcatcttccatcttagggatgctatcaggcattcaacagctttcccaccacgtaaagaattttgcggcagtctgcgcttccgcgatggaaaaaacaccttccttggatgacttcattgctggcagaaacattcccgtatccctagcaactattagtatgaatggggatataccaagcagcagactgaagcccggttacatcagtgcctacacagtattatcagctctagagtatagcgcctgccttcagcgagttggtgataaagttgaagttattgggaagattattgacgtcaaactcaacaaaacccgaaatggcaaaccatatatcttcgttaatttcggtgattggcgcggtaatatctttaaaatatcaatttggagtgaaggcattagcgccttgccttcaaaacccgatgcctcatggatcggaaaatggattagcgtaatcggtcttatggaaccgccttacgttagcgggaaatacaaatattcgcatatatcaattacagtaacgacgatcggccaaatgaccgtgctttcagaaacagatgcccgttggcgtcttgctgggccaaagaatagtcgacaagcattaacttctactagcaacaatcaagaagccctagagcgcattaagggtaagagcaccacttcaactcctaagcctatgagcactaatgctacaactgtaaaccaggcaatcctcagcaagttacgggcttctacacaaactgcatcgccagcaagagcgcaaactcagcatattgtgcctaataaatcatcaacgcattatgtggcaccgacgagaacatcagcttcacaatcggtatcaccagctcaaaacattccaagcaagactgttacttcaaatcaacagacttctaagacaaatgtaatcataaagattttcaaatggctttcgagattgttgcattag

SEQ ID NO: 196149 - DNA, 657 bp, Klebsiella oxytoca
  misc_feature (124)..(149): n is a, c, g, or t
atgtccgcagcaggcccggtttacccgccagcgttgatatccgtagccgctgcaggtccggtttacccgccagcgttgatacccgtggccgcagcaggcccggtttacccgccagcgttgatannnnnnnnnnnnnnnnnnnnnnnnnncaggcccggtttacccgccagcgttgatatccgtagccgcttcaggcccggtttacccgccagcgttgatatccgtagctgcttcaggcccggtttacccgccagcgttgatatccgtagccgcttcaggccccgcttacccgccagcgttgatacccgtggctgctggagtcccggtttacccgccagcgttgatacccgtggctgctggaggcccggtttacccgccagcgttgatatccgtagccgcttcaggctcggtttacccgccagcgttgatgcacgtgaccaccacaggcccggtttacccgccagcgttgatatccgtagccgctgcaggtccggtttacccgccagcgttgatacccgtggccgctggagtcccggtttacccgccagcgttgatacccgtggccgcttcaggcccggtttacccgccagcgttgatacccatggccgcttcaggcccgatttacccgccagcggtgatagcctgaacacaacgtga

SEQ ID NO: 196150 - DNA, 1797 bp, Klebsiella oxytoca
atgtccaaaaaacacaccatttacagcgctctaccaatcgtggccgcagcctatggtgaaaaactcggtgtcaaagtcgccatcggtaacgatgacgcatacaccgatggcaagaccatcgtggttccgaatattcccgacgactatccgcacatggatgctgtctggggatatttggcccatgaagctgcccatgtccggtttacggactttggtgttgaacgccgcagaggccttcatgctgagttgtccaacattttggaggactgccgcatagaacgcgccatgatggagctcttcccaggcacttcacagaccctgaatgaagtcgctcgctacatggctcaagccggtcattacgaacacgtcacagataaagaggctccggcctccattctgactgggttctgcttgtactggctgcaaaccaaggctgtagggcaatccgtccttcaaccctatctcgattcggctacctccgtattcgagcgcgtgtttcctcaaggggttgttgttcggctgaacgctttgctgcgtaaggctgtgaacactaagtcaaccgcagaggtgacatccttggccgacaaaatcatcaagatgatcgaggaggaaaaggagaaagaagagcagaagcctaagaatggtgaggatggtaacaatcagcagaatgctggtagcaaccaatctcagaacaatcaaggcggaggtgggaacgatcaaaaccaagggcaaggtgccaatggtggtgatcagcaaggcaaagaccagaagcaagacgatgctggtggaaagtctgatccgaaagggcaaggcgaccaaagcaagtcggatactgatggtggcagcaaggctggacaaagccaggctggtggcaattctgacgcagcaaagcaagatgcggccaaaatgctccagcaggttctgaatgccggtgccggtgacttgcgtggtgacgcgcatgatgcacttaaagctgagctcaaccgggtggctcaagataagggagacagtagttatatgactgttcgctctgctgtgaacacccaggataaccctgctgttggcaaaagcctcgtaggtgatgtgaagagcaccacttcaaagataagaacgcagctttacggattggtccaggccagccagcgagttgctcaccgcaaccaacgatcaggaaagcgtgtggatgcccggaagctacatcgtgtagtgacaggtgatacccgcgtattcctcaagccggaagccaagaaacgccctaacacggcggttcacatcctggttgatatgagctcctcgatggcctacaaggccgccaatggaaaggagcgtcaagatattgcgcgggaagcatccttagctatttctatggctctggaagcgatccccggcgtaaatccggcagtcaccttttttggtggcaaccggaaccagccagtgttcagtgtcgtgaagcatggagatacggttcagaatcgggccggtcggtttgggttcaaagcaactggcggtacacctatggcggaagctatgtggtatgcagcctttgaactcaccaagacccgtgaagagcggaaaatgttgatcgtagtgactgatgggcagcctcaaagcgcccctgcatgtcgctctgtgatcgacctctgtgaacgaagcgatgttgaggtgataggcataggggtagagactaccgcagtgtcaggactgttccaaaagaacattgtcattgacgatgcggcagctctgcaacgcacactgtttaagctgatggagcggtcactgactgcttttgcggcctag

SEQ ID NO: 196151 - DNA, 1278 bp, Klebsiella oxytoca; identical to SEQ ID NO: 52326

SEQ ID NO: 196152 - DNA, 1011 bp, Klebsiella oxytoca
atgaaaatagtcaacctatcgcaacgcgaggaagattggcttgcttggcggcgtcaaggtgtaacagccactgacgccgctatcctgctcaatcggtctccgtacaaaacccgatggaggttgtgggccgagaagactgggtatgcgcgtgaagtcgatctgagtctcaatccgctggttcgccgggggatagaaaacgaagatgctgcaagacgcgctttcgaggagaagtatgatgacatgctgctccccgtctgtgtcgaatcggttcaatacccgctcatgagggcctccctggacggcctgagagacaacggggaacccgtcgagctgaaaagcccgagtgcgactgtttgggaagatgtttgtgcagagaaagcaaacagcaaggcatatcagctttattacccgcaggtgcaacaccagctcctggtaacgggtgccaagcaaggctggctagtcttctactttgaaggtcagattcaggagtatccaatactccgagacgaagccatgattcaagaaatcttggccgaagctaaaaagttctggcaacaggtagtagacaggaaggagcccgacaaagatccggaaagagacctctacataccgcaaggtgaagaggtcaatcgctggattgctgctgctgaggaataccgcctctatgatgcagagattcaggagctgaaacagcgactggctgagcttcaagaaaggcaaaaacctcatctcgacactatgaagttcctcatgggggaatacttccatgccgactattgcggtgtgatggtgacgagatacaaagcggctggccgggtagactacaaaaggctgttggcagataaggcgtcgggcgtgaagcctgaggatgttgaccaatacagagagaagtcatcagagcggtgccgcgtaacggttactggttcggtgaagccacggtacattgttgatgaggacgtattggctcctcttgatgatttgccggaagaagtagagacattctactggtga

SEQ ID NO: 196153 - DNA, 996 bp, Klebsiella oxytoca; identical to SEQ ID NO: 52327

SEQ ID NO: 196154 - DNA, 777 bp, Klebsiella oxytoca
atggtgaagctaaaccgaaccgtcacggatgggaaagctgaaaactggtctgagacaaagctcgaagtaccatttgaagcaaacggcccggacacgatcccaatgtcctacaaggacaaagaaagccagtatgtgtcacagtttctcagccaggggtacacctttctggatgaggtgctggtaaacgcagagacacagactgtgctagaaggggggggtgtttcagccggacaagcagccagcttggggtctatcaactggctgttatctccgccttctgagttacctccaggtgacataaacctcttcaaaggttttgttactggggtttttgccaaaggagccagtttaatcggctttgaggttgctcggaacgaaagctcaaacgacttgctacccagtgtgctgatgcgtactgacagcggttatgagcttggggttagcactgggctaggcgagaacactatccatccagccacgctggaaggcgctggtgaactccgcccggaacatggtcacaaacccctgctgatgctggtttacctgcaacaacgtttcgcggatgacttttcaaacgtagagaagccgctggtggcattctgtgatgaacagggtgataccttcgactacgagcgttttgattcactaaaacccctcattgaacggtttggtttcagctatgacgaagtaagagcagatgctgaaaggcttggccttgtatctgagctgattcgcctagcagagatcgacgccgaacaagaggatctctttttttaa

SEQ ID NO: 196155 - DNA, 969 bp, Klebsiella oxytoca
atgtctcaatactctcaattttcagtaagcaaggttttcggtatgccaagcattccggagaaggtaactgccatcggctacgctgacggttcaaaccccttcatccctgccactgatacaaactacgttttccgcaaagagtttctgcgagaggtcttggcctatctcaaagagcctggcggtgacgcattgttcgtaaccggacctaccgggtccggtaaaacctcaggtatcaccgagatcgctggtcgtcttaactggcctgttcagcaaatcactgcccacgggcggatggaactgacagatctgattggacatcatgctctggtcgcggaaaaaccgggtcaaccgcctgtcatgaagttcatgtatggacctctggcagtcgctatgcgtgaaggccatcttctcctcatcaacgaggttgatttggctgaccctgccgagctggctggtctcaacgatgttcttgaaggacgtcctcttgtgatcgctcagaatggtggggaaatcatcaagccacacccgatgtttcgtgtggtcgttactggtaactctacggggtccggtgatgcttctggtttgtaccagggggtgatgatgcagaacctcgctgctatggatcgctatcgttttaccaaagtagggtatgcggatgaggaagctgaactcagcattcttggccgtgttactccgaaacttccggaaaatgtgcggaaggggatggttcggattgctaatcaggtccgcaaactgtttcttggtgaaaacggagaagatggtcagctcagcatcaccatgtccacccggacgttggtacgttgggcaaaactgtctcttgcgttccgtggtgctcccaacgcccttgaatacgctctggatcaagctctgcttatccgggcggccaaagaggagcgtgaagccatcctgcgtgttgcgaaggatgtgtttggggatcagtggcgctaa

SEQ ID NO: 196156 - DNA, 186 bp, Klebsiella oxytoca; identical to SEQ ID NO: 52328

SEQ ID NO: 196157 - DNA, 321 bp, Klebsiella oxytoca
atgcacatcatcactttcattgtagttctgcttgcatctctgggcgcattgtacgtgggcgcgaaggcatttgcttattccttcatcgttctcgctaaagtgttccagcgtatcggtttgttcctttggaacaaatttgcagttcctgcaatgcggtctgtgcaggccgtcatcaaagaacgcgctgctaaggctaaacaagccaaagcagtcgttgggcctggggtaactcaagctcaagaagtcgctaaacaagaacctgattgggattatctcgaaattccgacttacctgcgtaaaggaaaggaccttgtttggtaa

SEQ ID NO: 196158 - DNA, 651 bp, Klebsiella oxytoca
atggcagaagcacaagcagcagtaggcacaagcagcgaccgcaacaaccactactctcgccctgttttcaaacaagctctgaaagtaaacagcctccaggcccagcgcgtcatggaacgcagctttgagcgagtatccaactccctgttttccatcgacgttattcttcggatcatcggtgagcaggacgaaattgaccaggttgaaaccgtcatcctggagcacatcgccaaggtttccgaagacctggacaaagctaccgcccagctcaacaagctgatggaagacaacggcatcgacatgatgcccggctacaccaacccgaccgaatacaccatcgagatcaactctccccaagttgcccagtttgcacacctgatccgcaagctggataccctgatggggatcgttgataccctctggttgaacactgtactgaccagcaaacagcgcaccgacgccacgtatcaatggcagcaacgtctcattaaactggccggtcgcatcatcggcatcgagaaacgagcccgcatttccgcccacaccaagggcaaagaaggggaagtagcccaggccgccccggaatctgtaaccggcgacaacgaactcgcagccgaagctgcaaaaactgatgacgagaaagccgcataa

SEQ ID NO: 196159 - DNA, 861 bp, Klebsiella oxytoca
atgaaacatgcttcaatcaccactgtggctctagttgtagcagctctgtctggctgtgcatccaccagtagttacgaacccgcagcgtacaaaaccaatcacagtcgcgcttacaacatcgcagaggccggtggcctggtaacaggcattcaagacgcttcggttccgcgtgacaagctggaacgcttgaccgacaccaaaacgtttggtgctgcctacgtgctgtctggctatatgtcccctcaggttggtatgaccgactggcaaggtggcttagtcaaccttgccaactgggccatcggtcctaaacagcacggagctcgcaatagcttgatcgcctggatgcctgctaaagaagctgcgtcaccggcagatgctcagggcaaacttctttcacatgtgaaagtttccatcgagtcagctctgactgacttgggtgcgaatttcacacttctgtatgacaaagacggtcgtctcacctatcagttctacaagaacgaatggggttgccctacgtgggtgaacggacaaagtaaggtggctgacatgtgttcagtcaaagtaaatatcgtggagcctcgcattgggaccgcgcctgattttgtctctggtgtccaaggcacagcgtatgccttcacatcaggacatgagactgactacaactttgtgaaagtcggcaatggaacagcaagccatgctcctcagcaagcgatctacgccgctattagcaaacagctaccagcttggtcctatctttaccttgctccaaaatcagtggaactggagagtggcgacaaagttgggttcccttaccttcttggtcagggaaaggctgagttatttgtttacccagaagcatga

SEQ ID NO: 196160 - DNA, 2739 bp, Klebsiella oxytoca; identical to SEQ ID NO: 52329

SEQ ID NO: 196161 - DNA, 213 bp, Klebsiella oxytoca; identical to SEQ ID NO: 149220

SEQ ID NO: 196162 - DNA, 318 bp, Klebsiella oxytoca; identical to SEQ ID NO: 52346

SEQ ID NO: 196163 - DNA, 453 bp, Klebsiella oxytoca
atggaacggcggcattggccgcgaggggcaacgtgtgcgacccaagaagcggacggggaagttctctactgggacgccccggttgatgtcgttgaggaaggcagaaaggtcgccggtaagcacggcatgatggccgaagtcgggttaaagcatcaggtcgatgcttggtatgcagacatggatgagactcggctcgcaaccgactggaactccgccgtcatcacgccccactgcttgttgctttcctacctggatatgcttcaaaggaacaaagttccgttttgtgaaggagttcaactggctgctgaatgggtgaagcaacttggaggggagtctcgtgaaggcaccgaggatgcgccgggaactgaggttacggtgctttccctggggagagccaccgctcattgttttaagcagtatccagacacaaaaaacttctattacgaggcctag

SEQ ID NO: 196164 - DNA, 519 bp, Klebsiella oxytoca; identical to SEQ ID NO: 101170

SEQ ID NO: 196165 - DNA, 273 bp, Klebsiella oxytoca
atgaacaaaagcgaactgattatgaaagtggccgaagacgcagacatcagcaaagcacaggccgaagctgcggtgaatgcgctgatcaactctgtgactgaggagcttaaatcaggtgggactgtagcgctcacagggtttggtactttccacgttaaggcgcgggcagcgagaaccgggcggaatccccagactggagagaacatccagatcgccgctgctaacatccctgggttcaaagctggtaaggggttgaaagacaccgtgaattag

SEQ ID NO: 196166 - DNA, 324 bp, Klebsiella oxytoca; identical to SEQ ID NO: 101169

SEQ ID NO: 196167 - DNA, 144 bp, Klebsiella oxytoca; identical to SEQ ID NO: 101168

SEQ ID NO: 196168 - DNA, 195 bp, Klebsiella oxytoca; identical to SEQ ID NO: 101167

SEQ ID NO: 196169 - DNA, 342 bp, Klebsiella oxytoca; identical to SEQ ID NO: 101166

SEQ ID NO: 196170 - DNA, 729 bp, Klebsiella oxytoca; identical to SEQ ID NO: 101165

SEQ ID NO: 196171 - DNA, 261 bp, Klebsiella oxytoca
atgctcacagccaaatgtatcgggtgcggatgtaccgatgatcatgcttgtgttgaaaatggtcaaccgtgtcgctggcttcgcgtgaatagagtggaaggcatcggggtctgctcttcgtgcccggaggctcttgatcagttcgcatcgaccagccaggaacaaacgactggacagtgtgactatcggagcagcccagaatggaaggattttgcatcacgcattggtaatgcgctatgcgggggccggggcaaagcataa

SEQ ID NO: 196172 - DNA, 933 bp, Klebsiella oxytoca; identical to SEQ ID NO: 101164

SEQ ID NO: 196173 - DNA, 1464 bp, Klebsiella oxytoca
atgagcgatattacacagcaaatggacaaacttgagattccaatcaagttgtcctttccagtcataaacgttagcacctttgagctgggccgcgcagagagcgttttctctgaaattgccaagaaagttggcaaacactttatcgtaatgccattcaagaagctgccagatccgggcaccatgaaggcaatggccgacgaggccaagaaggcctccaaaaacggtcttgttgtgttcgacactttctttttcgaccgccaacgtgcaaacccagaaacactcccagccctcaagtcatctctgatttatctggagaacgaggggatcaactacatcatcgctggcaaagatgtcttcaatgaagagttcgtctatcacatcgacctcccggccatgagcaaccaggaaatcctgcaactgctcaagacctgtgaagataacgtgcaagaaggtggggtcttcgagagcaacgagcgtgttgtcatcgcaaaccacgccctgggcttgtcacatacccagatgaaaaacgtcttcacttactccgcctacctgaaatacaagggtgaagaatatctgggggagatccgaaaagaaaaagcgcacattttgcgtgatgttggcctcgatgtgcttgaggccattgatattgggaatgtaggcggtctcgaaaacctcaaagagttcctccagatccgtaaagccggttgggacaaagacctccctgttaaaggtgttcttctggctggtgtacctggtggcggtaaatcgctaacggctaaagccgccgctggtgtacttggtacaaccttagttcgcttggatatgggccgcttttacagcaagtatctcggtgaaactgaacgccagttcaatcgtgcattgcagaccattgagcagatcgcacccgttgtagtgttgattgacgagatggagaagttttttggtaatgccgatggcgaacacgaagtatccaaacgcctgttgggttcctttctctattggctccaggaacgcaagaagaagatcttcattgttgcgacggccaaccgggttcagtcgctacctcctgaattgatgcgagctggccgttgggaccgggcgtttttcattgacctgccaagtgtggctgagcgccagaagatttttgagatccacctcgctaagcaaaaggccgacatcgccgctttcgacatgcctacgctactgcgtacctcagaaggatacacaggggctgagattgagcaggcagtcattgacgcgatgtatctggcaaacgcccaagacaaagagctcgacaatcaagttcttgtagatgcggtcactcgcattaccccgaccagtgaaactcgccgggaagacatcaaccagatccgcagtttgcgagagcaaggcttctatcctgccaataacttcgatgttcaagagcagaatggctctggacgcaagctcgccataggtgactaa

SEQ ID NO: 196174 - DNA, 393 bp, Klebsiella oxytoca
atgagccatatcgtaaaaggccaggtgcaggtcgcctacaaaaacaaggagctgctcttgaaggctctggagggggttggtgttgttgttgaaaacgaaaagctattccgcgtgggcgcaggctacaccttcgagaagtacccgatcgttctgatcgaccagaacaacaaggagcaccggattggctacaaggaaaaaaacggtgtttgggagcagtaccaggaaaactacggctcttatggccgctggacgcagcaggcaagcagcaaggtgcaggatcgctacattgccttccactacgagcagcagttgaaagaggaaggtttcagcgtgacggtgaagcagcatcacgatggcactttggaacttgaagctgaggaagctgtttggtag

SEQ ID NO: 196175 - DNA, 195 bp, Klebsiella oxytoca
gtgaaaaaggtaaacatcaagatcaaagacggcaagattgctgccgatttcacggggttccagggtaagacctgcgaagcgctggagcagcgtatccgtctggaggaactcgaagtcgaagaaaaagagctgaaacccgagtaccactttaacgctggtcaaacccagcacgaaacggaacagaacgaatggtga

SEQ ID NO: 196176 - DNA, 1185 bp, Klebsiella oxytoca; identical to SEQ ID NO: 101163

SEQ ID NO: 196177 - DNA, 348 bp, Klebsiella oxytoca; identical to SEQ ID NO: 101162

SEQ ID NO: 196178 - DNA, 429 bp, Klebsiella oxytoca; identical to SEQ ID NO: 101161

SEQ ID NO: 196179 - DNA, 555 bp, Klebsiella oxytoca; identical to SEQ ID NO: 101160

SEQ ID NO: 196180 - DNA, 546 bp, Klebsiella oxytoca
atggaagaaatcagaagaggcttgaccctcgaatacgcaaaagagaagcgtgagaagctcttggctgagctcaaatcagatgaacattacaaccagactgaaacagtagcttacgggcaccacgacccgctaagcgttcctgtcgctgtttgcgatagctgtcatggccgggcgcagatgcaaaaggttataggctcacctgttcgctggaacatggtctgcctggtgtgtggaaagacgaccccgcaacaccagaaacgcccgtggcaagccgcaattgcgtggaaccaaattaacttgggaacacaggactacagacaactacccctctttggacttggtagtctatcacccgagtcagcaagacagaaaatggtgggaatacgccggaacctggagctgagaaagagcctcgccggtatagagaggacgatagctcagagggaaggtcaacgccccccagggaaagagtaccagcaaagacttgaagcatatctgcaatgggccatgctggcgctgaggttgctcaaggtcaaagcaagttag

SEQ ID NO: 196181 - DNA, 438 bp, Klebsiella oxytoca
atggctgctatcaactcactccgcgccctcaaaggtgtaactgcccccgaagaactgaaaaaaggggatggattcactatctctccgctgcttctgctggaggaagaagggtttaacacccgtggcgctttctgcgagaactactacgagcgcccggacatcaaggctggcattcgagtgctggcagatgcctacaagcgtggcgactatgttccgccaatcatcgtcaaggttatcgacggaaaggtgtatgtccgtgaaggtcatcgccgtcgccgtgccatcctgcttgctatcgaggaaggtgctgacatccagttcgtgcaggttgtagagcatagaggcgatgaagctgaacagagccttctgatcgccaccagcaacgacgggctccctctttctccgcttgaacgagcagtgatctacgctcggctctga

SEQ ID NO: 196182 - DNA, 213 bp, Klebsiella oxytoca; identical to SEQ ID NO: 149220

SEQ ID NO: 196183 - DNA, 318 bp, Klebsiella oxytoca; identical to SEQ ID NO: 52346

SEQ ID NO: 196184 - DNA, 492 bp, Klebsiella oxytoca
atgagcgaagaaaacgattttggtgaaagcatcaagttctactctgatgggcaacaggatccagtcaagcggacaggcctgaacgcccagtacaccatgacgaaggcgaactacccgacagtcagcatcgaggttgctccgatctcgaagccacgttcgtccccaaactgggagaaaaaaataacagtgcagcttaccaagggagagttgaacgccgtctgtggtgtgttgtttggtctccgaaaggaggctgctgggtcttaccacggggacgccaataacaagagctttgcggtttacaacaatggtaaagcaggggtggctcttattgtgagtcagcgaggagagcagcttcaccatttcctgtctgccgatgatcggatggaggccgccgtattttttatccgacgtttggcggaagcttggaaagtgttgtggtcaaatttaaatggacactttgatcgggtgttttccccccgacaaggaacatga

SEQ ID NO: 196185 - DNA, 1314 bp, Klebsiella oxytoca; identical to SEQ ID NO: 101176

SEQ ID NO: 196186 - DNA, 252 bp, Klebsiella oxytoca; identical to SEQ ID NO: 101177

SEQ ID NO: 196187 - DNA, 1005 bp, Klebsiella oxytoca; identical to SEQ ID NO: 101178

SEQ ID NO: 196188 - DNA, 564 bp, Klebsiella oxytoca; identical to SEQ ID NO: 101179

SEQ ID NO: 196189 - DNA, 282 bp, Klebsiella oxytoca; identical to SEQ ID NO: 101180

SEQ ID NO: 196190 - DNA, 636 bp, Klebsiella oxytoca
atgtataagagccttgaagagctgatggcgggtatttacgagatggccgcaccacatggcatcatctgtaacgaggtttccaagttccttgcggccaaccaggtcaagccagaagacataagctccgggatctggttttttctatggcttaaatcagcccccaaggatgcaaagccaatccaaaaagaaatccccggattcggtgtcgttctaaacatgccgacttatggcggaaccctcaacgaagcaatcactaagttgatcgagaatgagtgccgtcaaatacagcttgccgaaggacatcctagccttgaggcttggcttgaattggtattggccggtcgagatgacgaagaggaaaatgaggctgcggccagtatcgtggacttgcttaatgggtgtcacgacttgctggatacagcaataattaactacctctccaaggtgggtaaaataaatgaacaagaaatcttgtcgcttatttattatggggagctgtgtgatcactctctttttggggtcgtttgcgggagggggcggaatcctacgctaaggctttggccagcgatattctccggtgagattgatgtgttcccatccgagcggcgaaacatgggccaagagatcgggcgatag

SEQ ID NO: 196191 - DNA, 2886 bp, Klebsiella oxytoca; identical to SEQ ID NO: 25667

SEQ ID NO: 196192 - DNA, 318 bp, Klebsiella oxytoca; identical to SEQ ID NO: 52346

SEQ ID NO: 196193 - DNA, 213 bp, Klebsiella oxytoca; identical to SEQ ID NO: 149220

SEQ ID NO: 196194 - DNA, 285 bp, Klebsiella oxytoca
atgagaagacatagtaagagactcagtgtcgttaaatgtttgtatgacgcgaaaaatgtgaaccctctactaagtggcataagtgttttacacaatgcctcaaaacctactatgagtaaccacaaaaaagtaactttccgagaaaagttacttttctcagtcgttataccaggagtcgtttcaatgcaactgtcgcactcaacaactgacatcgttctcgccaaggattccatgtatcttaaggctgtcagtttccctcgatacagtggcggggaggttaaatga

SEQ ID NO: 196195 - DNA, 852 bp, Klebsiella oxytoca
atgaaaaaaacattaatagctatcctcacctgcacttttctggccggttgcgcctctcaaccaacgagtccagataaccgtatgtttacaaaagaacatggtgtttattggcatgctgattctcaaaaatccatggcagtaaacgcgtattcgttggctggggttcaggtaaacgtcgaagaagctgagaatgcttctggaggtgtcgatgaagggcttgcctctaaaatgcttttgaatacggcgacaggagctatcaccggcggactcaaagctggtattgggatgtttactgcttctttttattctgaagctgatgctgagtatcttcaggtacctcagtttgttgtttttgtcgaaaatcctcacaaacttccgatcgatgatataacactagttaagtctggggcatcaatcattatagaagctctcaaagatactcccaaatataataattctacttatgaaaatcagaaaatcgcgctctctcaatgtatcataaataaatcagtcataaataattgggatacttgtgatacaccttctgttgtaaaaggtgcaggtggtagtggcaaggaatttctgacattccaagctatacgtcctgctacaggagatgaacttccagcattaaacctgcctaagggtaattattcaataattcgctatatggggtttgttcccaaagacctagtctttgatacatcttcttttcctggttttcggttgatgccacaagattctcgtacgtctccaggttttgcgagcgtcacgatcaatggaaaagaatactatttcattaaaggtgctgctggtaaaaaaggtttccctctaaaaaaacgagtagattaa

SEQ ID NO: 196196 - DNA, 426 bp, Klebsiella oxytoca
atgagtgagcaggataataaatttagcgattatcttcgccgccgtcattcggtaacgaagcttgttgttcacctgattttctgcacgaagtaccgacgcaagctgttagacggcacaatgattgttcagatacaggaagcgatgcagcacgcagctgaacggctggagatagatattctggaagtgaatggagaggaagatcacgttcacgtcctggtggcgtacccgccgaaattatccgttagcgtgctggtgaataacctgaaatcaatcagcagcaggatggtgcgccagcaaaacactcacctgcgaaaacagtctaatacaggcgttctctggtcacgctcttatttcgcctgtagtgctggcggcgcaacaatcgaaacattgaaggcttatgtagcctcgcagaaaacaccagattag

SEQ ID NO: 196197 - DNA, 948 bp, Klebsiella oxytoca
atgcatagagcgacaaaagtacgcatttacccaacgcaagaacaaactgaattgctggaaaagcaattcggcgcggtgcgttttgcgtacaataaagccctgtatattcgctctcactggtacaaaaaacatggcgtatcgctgaataatgcaaagcatattcagcctctgctacccattgccaaaaagtcccgccgctatagctggctcaaggcagcagactccaacgcattgcaggtatctttgcagaatctggatcgtgcattccaaaacttctttgagaaacgggcgaaatatccgaagttcaaacgcaagcacggaccgcaatcctcctatcattgcagtagcctgaaaatcactgccgacacaatcaagatcccgaagatttcccctatccgggcgaacattcaccgggagattgtcggcaaggtgaaaagcatcaccatcagccgcgcaccgactggcaaatactacgcctcaatccttgccgatgatggacaggaagcgccagcgaagccgacctacataacccaactgacaggctatgacattggcctgaaagattatctgatacgcgatgacggcaaaaaaacgcctaacccgcgtcacttggtcaatgcctatcgccgcttacgtcgcgatagcaaggcgctatcccgtaaacagaagggaagcgcgaatcgtcgcaaggcacgtattcgcctagcagcacaacacgatcgggtagccaatgcccgtaacgattttcagcacaaactttccagaaatattatcgtcgaaaatcaagcggtgattgtggaaacactgaaaacggcaaacatgatgaaaaacaaacgccttgcccgtcatatcggggatgccgcgtggtctggtttcgtggcgaaactggcctataaagcggaggcgtccggcgtccacctggtcaaactggatcagtggttcgcctga

SEQ ID NO: 196198 - DNA, 939 bp, Klebsiella oxytoca; identical to SEQ ID NO: 101174

SEQ ID NO: 196199 - DNA, 1641 bp, Klebsiella oxytoca; identical to SEQ ID NO: 101173

SEQ ID NO: 196200 - DNA, 273 bp, Klebsiella oxytoca; identical to SEQ ID NO: 101172

SEQ ID NO: 196201 - DNA, 303 bp, Klebsiella oxytoca; identical to SEQ ID NO: 101171

SEQ ID NO: 196202 - DNA, 336 bp, Klebsiella oxytoca
atgaccgacaagacaaccgacacaaccaagaatcgccgaacctttgatccagcgttcaagttacaggtggcgcgcatggtgcgcgagcaaggcgtcagcgtcagccaagtctgccgcgaaatgaagctgaccgaaagtgtggtccgacgctgggtacaccaactggatgacgagtcagccggcaggccggggattggtaaaccgttaacggctgagcagcaacgtattcgagaactggaagccgaagtcaggcgactaaaatcagacaatgaattattaaaaaaagcttcggccttcttggggtcggttccggctgagggcgaaatgacaccctaa

SEQ ID NO: 196203 - DNA, 213 bp, Klebsiella oxytoca; identical to SEQ ID NO: 149220

SEQ ID NO: 196204 - DNA, 498 bp, Klebsiella oxytoca; identical to SEQ ID NO: 16552

SEQ ID NO: 196205 - DNA, 372 bp, Klebsiella oxytoca; identical to SEQ ID NO: 16551

SEQ ID NO: 196206 - DNA, 378 bp, Klebsiella oxytoca; identical to SEQ ID NO: 16550

SEQ ID NO: 196207 - DNA, 126 bp, Klebsiella oxytoca; identical to SEQ ID NO: 16549

SEQ ID NO: 196208 - DNA, 1617 bp, Klebsiella oxytoca; identical to SEQ ID NO: 16548

SEQ ID NO: 196209 - DNA, 1527 bp, Klebsiella oxytoca; identical to SEQ ID NO: 16547

SEQ ID NO: 196210 - DNA, 1668 bp, Klebsiella oxytoca; identical to SEQ ID NO: 16546

SEQ ID NO: 196211 - DNA, 1194 bp, Klebsiella oxytoca
atgatcacgggcttttatatcggctttgaaaatccgtcttatgtggtggcgatgcaggcttttgtaaatgcttgctctgacaaaacggccatttgtgcccagcatgatattgagattagtagctcagactggccgtgtgtaggtttgccagatgtgttgctagcggaccgtggcgaattaatgagtcatcaggtcgaagccttagtttctagttttaatgtgcgagtggaaagtgctccacctagacgtggcgatgctaaaggcatagtggaaagcacttttagaacactacaagccgagtttaagtcctttgcacctggcattgtagagggcagtcggatcaaaagccatggtgaaacagactataggttagatgcatctctgtcggtatttgagttcacacaaattattttgcgtacgatcttattcagaaataaccatctggtgatggataaatacgatcgagatgctgattttcctacagatttaccgtctattcctgtccagctatggcaatggggtatgcagcatcgtacaggtagtttaagggctgtggagcaagagcagttgcgagtagcgttactgcctcgccgaaaggtctctatttcttcatttggcgttaatttgtggggtttgtattactcggggtcagagattctgcgtgagggttggttgcagcggagcactgatatagctagacctcaacatttagaagcggcttatgacccagtgctggttgatacgatttatttgtttccgcaagttggcagccgtgtattttggcgctgtaatctgacggaacgtagtcggcagtttaaaggtctctcattttgggaggtttgggatatacaagcacaagaaaaacacaataaagccaatgcgaagcaggatgagttaactaaacgcagggagcttgaggcgtttattcagcaaaccattcagaaagcgaataagttaacgcccagtactactgagcccaaatcaacacgcattaagcagattaaaactaataaaaaagaagccgtgacctcggagcgtaaaaaacgtgcggagcatttgaagccaagctcttcaggtgatgaggctaaagttattcctttcaacgcagtggaagcggatgatcaagaagattacagcctacccacatacgtgcctgaattatttcaggatccaccagaaaaggatgagtcatga

SEQ ID NO: 196212 - DNA, 321 bp, Klebsiella oxytoca
atgagcaatggtacagacacaatggataattacacataccggtttccattcagaattaatctccctttgttaattcttttctttgatgcgaagcaaataggagtcgtcatggggttgctttcatttggtaatatttttgaatgtatgtccatagcaacatttgcagcaatcggatattggattgcatacggcaaggctaaggagagtgcgatcagggggagattaaaacataagttgtggtggaatggatttctaccgggtaaatccgtttttcaaagtcgctatttttctgacccctttatgagaagattttacagctaa

SEQ ID NO: 196213 - DNA, 321 bp, Klebsiella oxytoca; identical to SEQ ID NO: 67344

SEQ ID NO: 196214 - DNA, 1206 bp, Klebsiella oxytoca; identical to SEQ ID NO: 129164

SEQ ID NO: 196215 - DNA, 417 bp, Klebsiella oxytoca; identical to SEQ ID NO: 10349

SEQ ID NO: 196216 - DNA, 291 bp, Klebsiella oxytoca; identical to SEQ ID NO: 16838

SEQ ID NO: 196217 - DNA, 576 bp, Klebsiella oxytoca
atgcgctggcggcatccgaggcttggcctgttgccgcccggccagttcctgccgctggccgagtcgttcggcctgatgccggaaataggcgcgtgggtgctgggcgaggcctgtcgccagatgcacaagtggcaaggaccggcatggcaaccgttccgtcttgccatcaatgtgtccgccagccaggttgggccaacgttcgacgacgaggtaaagcgggtgctggccgatatggccctgcccgccgagcttctggagatcgaactgaccgaatcggtcgcattcggcaatccagccctgttcgccagtttcgacgccttgcgcgccatcggcgtgcgcttcgccgccgacgacttcggcaccggctattcctgcctgcaacatctgaaatgctgccccatcaccacattgaaaatcgaccaatcctttgtcgccaggctcccggatgatgcccgtgaccaaactatcgtgcgggcggtgatccagctcgcgcacgggctgggcatggatgtcattttcagaagacgactgcaccagttgattgggcgtaatggctgttgtgcagccagctcctga

SEQ ID NO: 196218 - DNA, 4242 bp, Klebsiella oxytoca
atgactaaaattaataaaatctcattgctgatgttctgttctgtgttcagtgctgtttctaacgcagaatctatcatggtttccgggaccttagagaccgccttacctgatgtcaaattttcgacatcaccacaagtaaatacagcgtttgtaaaagaaaatacggtaactgccataccagtctcggatggctgcgatgtatcctctgaccctaatgtcaaaagcacggctggaagcctgaaatgtgttttcgagtggttacccaataactccggtatgccggttgccaatggtttttcgctcaaggggttccccgcaattgcaggtgacattaaattgccctggcagatcgcctactactcaggctcagaaagagaaaaagtgattgttcgtgaaggggagtacatatttaagactgtggaacccgtagcccccgttttttcaagtattaaagggtcaatgagtaacggcacctcgggctcaacgctgatttcatacataaagaatgaaactctctcaaatattgagatctctgtggagccccgcgattacgatatggttgcttctgtcggttccggaacttcatgtgctatcgcggctggcgcatccaaatgctctatcacgactggaagtgtaggtatcagtgacggcagtaccgatttcggcagccgggatgttgccataacactgaactcggctaataactttttttccccacctatcgcagctaatgtgagactaagctgggattaccgtgctccggcagtcgatagcactttctggaacgtatctaaagaagctcgggcttttaaagtaggtgataaagacatttttgtcggtccgaaaacaatcgctgttgctgtctcggttccagcaaagtctagtaccggtgactggtggaaaccagcggcaatgtcgctgacattagctcctgatggtggtttttcgccaaccacaaaagttactttggacgatggtactgaactcaattttaacaaaatctggtctactccttcccggagaactctgcagccagttgctgggtatcaggaagttgccgggaaatatgtctatttctttgatataagcgatcttgccagtgcgtcgtatattgcgactttctctgtcgcaaacacagccggaaacgactcaagttatacagaacctgattcgaaattagtactttctgatgagccaacagttactgtctacaaggaaggtgcggagctcgttaagcgggatcaagtctattttctgaatgaaatcgttattgcagccttccaaggcgaagagggcgtggccgatataaaaagcgttgctattgataatgtcatggcctcatacagcccaactaatgtgaaaggcatatatcgtttaaatcagatgacgtcactggaaacaaacaaagtacatactttgacaattgtagctgaaaacgttaatggaatatctaaaacctattcgattgatttcacctacatgccgatgacgttcaccctgaagtccatcgactcagcatccacaatttacagttacgtacgtccctatacttctctggtcactcaacaatcaggaaatacctgcaaaatattctccactgaggaagatgctcaggctctgcttggtcagttcggcaatgggatttacgctactgcctgttatgtacagtggaacaacgttcctgcaggtatggagttttactctaaatctaaagtgccaggcctgacgggttacttctctaaagttggggataacatccttgattacaacgtttatgtgataaacacaaaaggctcaaaagctcttgcagctcataaccgtaaaacgctcccggcagtagaacctttcgcgcccgagatttcttacaagttaagtaaaacggttagtaccttaggaaaaaatacggcactggtctatatctctggaggcgacgcggcaaaagttctggcgaagtcggtaccggccaacattgtcttgacgtctaaggttgagggtcaggatccggaaacgacgacttataagaacaaatcgagtggtgacacgcctgtaacttattccgagcgaattaaagttccagcagctccattatggacacaaaccaacgttaacattgatgttgcctatgagaacgaaccgagtattaagtcctccagtattctcaaagtgtataccgttcctaacttcagcattcgtgcttacatgaaggtggaagagcgtaaatcggcaacgagcctcaaagtgcctgtgtcggttaacattggtcaatggaataacagctgtagttgtactctatacgacgaaaaaacaatgggtaactgggatgtagtggtttacaaagttacttcaaaatgggtgacagatgctgaaactggtaaagattattcagtttctgaacgaactccattgaccggtaagttggcagtcaattcagaggggattgcagctggcgagcttaacatggatgatctgactctgggtagccaccggattattgctgtagcaacagtaaggagcccgtttgatgactttgagctccaacgtgaaacgtccacaactagtatccgggtctataaaggagctgaccttgaaggtggtctttctaaatcgctgattgttggccgtgtaccactttcggcaatggtctctttcagaaccaaaagtactgatgattatgattcacttagcccgactgaatggcagatctccagtaacaatggatctacatggagtactctcgaggatatgactggtcttcgcagtgtcagtattaaacaaaaagaggtgggcaagtggctctatcgtgcaaaattaacgaacaaatacacgggtaaaacgtcatataccgataatctcactgtggtcgcatacagagaacctaagccggttataacggtaggcaaggtgcttgaggggcacagtatccctgtaacgctgaccgacaacaatgaagaaatcaaaggtagtgctgtagacgtgcaatggtccgaggatggcgaagattggactgaagggggggtaaaatacacgatcacctcctcggaggtcccgaagtatatttttgcgaaggtccgatataccgaaaccgatgaaatggcaggtacatccgcgtggaaagaaacacgagctcgtgtaaccgtcattaagcacaagaaactttcagtaaaggttgagggtaatgcgcaagtagaggttggcaaaaaagtaactttgcagggaacttacacgaacccaaatactgattactcatctgatgctgaggttttagaggagtggatactgcctgatgggagcgttaagaagggcgggcttctcgatacagtgctaaccgaagatatgcttgatgcacgtggttacgctgcatttacctatcaggcatacatgccagaggctaaggaaaggacattagcgaagcgcacgattagcgtgaaatcatgggtatataaattccctgagcctcgccttaatacaaagctcaaatacacaatgatcccatccgaattggcagtatcggtaacgggagtggatgttacctatccaggtgtagttttcactgaggactggcaatacaacaaagatgtcatgacacttgatagtgatactaatgggaaaaaagtgttccaggtgttcaagtcagggacgcatacactaacctatgttctgaaagataaccgtaataatgaggcaagggttgaatatactttcgttgtaaacgaacagaacccaatggagattacggttaaccccaaatattcaaacaagttcatgagggcaccattagatctatctatgaggtcgagtgtaaaactagctcactcagccgacagcattgataatgtctcctttaagctgaatggcaaagctgtagatggaggaaaaaactactggtcccagacatttgagaacattatggagggcagctacaagcttgaaatggatgttgtcagtacgcagggccagagagggagtgtaacggtcgactttgacgtgatacctaacacaccaccgaattgtagcctgacttatacagaaacaccgctgagctgggcttttacggctaaatgtaatgacccggatggaaagatatccagttatgtatggaaggttaatgaccaggttcgcggcgtttttggtagcacagctacactgtcaaagtcacaaaacaaaggtaagctggtggtatcaatcactgcttatgatgacagtggtgatacggcaacaagttttatcacactaaataactga

SEQ ID NO: 196219 - DNA, 258 bp, Klebsiella oxytoca
atgaccgacatcaccaggcaagaacatgactacctgatctgccggtccccggccaaccacagggcgtgtttcgcctttgagttcaagaagggcgtttgccaccagcgacacgttggggccaaagcggaagctatgcgtgagatagagttggtcggcgttcatgagctctttgctatcaagagcgttgtttgcacctctgaacctatagatctgctggtggcgatctccaaccaggattaccttgcatttctgctgtag

SEQ ID NO: 196220 - DNA, 249 bp, Klebsiella oxytoca
gtgtacggtcgggaacggatcttgaaggttggtcatccgcttccatatcagttctgcaccttcgactacctggatttggtatctctcctgtttggatgtaagcaccttgcctgtatcggcacgagcaaaatgcgtataaagaatccgcatatctgcactgcacatgaaggcgttgagtgtgtcgagaatatctttggcaaacgtccagtttttggtattaaccgcttgagcaatatcggtgagtcttag

SEQ ID NO: 196221 - DNA, 399 bp, Klebsiella oxytoca
atggtagccccttcctatagtggcgtaggcaagctggtgggacgttttgcagtcaacgtttgcaggaaatttttctctggcctcatcgcggatggcccggttgtatgccagatagaggatgcgagagtcgaggttgttatgagcgtatttcaccagtgtggtggttttgcccgtgccagcataggccttaacgacaaggcgagatcctttgtactgagtgatcagcgattgctctggtgtgtcacgaggaagttgcttcatgaggccccctacgacaagcacatctggagtgtgatgcgcttcttttgtgtcgaaaggaacgtgctgacacgcttctcttctcggggaagggatacttcacaatccaagtctgtccaccagtccggggctttaccttga

SEQ ID NO: 196222 - DNA, 279 bp, Klebsiella oxytoca
atggcaagaaaggctaagtattcagaggaatggcgaagcagagctgcggctcttcaaaccgagattgaggaggctatgacactagccacctcatctattggtgactatagctggttacaccgccttcatagctgggttatggaggtggctcaaggtaaagccccggactggtggacagacttggattgtgaagtatcccttccccgagaagagaagcgtgtcagcacgttcctttcgacacaaaagaagcgcatcacactccagatgtgcttgtcgtag

SEQ ID NO: 196223 - DNA, 1041 bp, Klebsiella oxytoca
atggctagaaaattagttgagtttaacgatgtagcggcagcagcccaaaagctcaaggacgccggtaaacgccccactgtcatcgcaatcagggaccttcttggtaaggggagcttcaccaccatttcgacatacctcaagcagtggtcagaggaacactctctcgatgaagagccggttgaggttgtcctgccagaatcagttatgagcgatgcagagctattcctgcggaagatctacacggtagcgaaaacaagcgccgatgagcagcttgagcgcgagcgtgaacagctacgacagagagagcttgagtaccaggaagacatgcagcaagccgtggacatggcaaatgatgccaccgaacgggctgaactactggaagagcagcttgaatctctcaccaacaaaaaaacagagctcgatgcagcccttggtaaggcagaaaactcgctatccctcaagtctgctgagctggaacgctcacaggctgacgtcgataagctggagaagaggctcgttgagttggaaggcaaactggaagcgaaagcagccgatctggcccgagcacaggatcgcttggagcaggctgaaagtgaaaatcgctctttgagccaaaaattggcaactacagagggtgagttggcattgcaaaaaggcaagagtatagagcagacagaaaagctccgggcagctcaggaacaaagtacatccctaaaagaacagctcgaaaatgcacaggccaaactggcccaatcacaggactcccttgccacggccaaagctcatggcgaatctgctgaacgagagtgccagcgcctatctggagaggtagaaaagctggaaaccaaactgtccagcgccgaagcagaagctcgctctcttgttcaagacaaaggcatgatcgctggtcagttgcaggaaaaagaccagcaggccaagagcctcgaacaaagactgactgatgcgctgaccaaaatttctgggttggagcaagagcgaattaaagctggtgggggagagaaaaagaaagaggaaaactga

SEQ ID NO: 196224 - DNA, 876 bp, Klebsiella oxytoca
atggcgaacaacttcatctcagaacaattctcggcaatgtgccgcgacctgacgagcctctcttcccttatcaaacgactacctccacggtacgcaaaagttgcggcaatccctccaaccagaaaaggaatggagaatgaggccatcaacaggattgttgtcacagaacaaactggccgcgaagctcttgagctggcagcgcacagctacagggatcttcacatcaacccagactattcgcagaagtctgccaggcgcaccgtaggggtgctctggttctccccttccaggattggtgttgctgacgaaattgcggcgacggttgaacgcataaatgcggccaaagctggtatcgaggagttcattatctcgacgtaccccaccagacaagagaggtttgaagcactccgagcggaatgccctggcgtcatgactctgcacctttacagacaaatcaggtgctatgccaatggcgacatcgactctatccgcttcacttggcaacggaaggactcattgaaaaggccggtaaaagaggagcttttgcaacgcatcagagaggagctggagcgatcagggccagactatcaacttcccctggagcagcttatccagaagatagcaaacaccccggagccttatctccgggagcgaagggaggtgaaggttcagccggtggcaaacatcatggccgctggcgaactcaaaactgtcaccgcgccaatgcccctaatcgtgctccaggataaggatattcagctcaaattgcttcgtaacttcgacgcctcagaacaacgcaaaacgcgatctgataaagcggcatcggaaatccttggcaccttcggtggcatcactatcgaatccttccccggatga

SEQ ID NO: 196225 - DNA, 558 bp, Klebsiella oxytoca; identical to SEQ ID NO: 101130

SEQ ID NO: 196226 - DNA, 1434 bp, Klebsiella oxytoca
atgggctggtcattaccagaggttcccgcgaggcctgatgcacaaccctggtcaccctggatatgcctgtcaattactttcgccggtgtatttatcgcgttagtgcgggtggtactgtattcaccctccggtgatttaccaacgcttgcaagcggttactggctaccactgaccggatatactttggtgggtgttactgttgccgtaaccttttatttgttatggtgggaaatacagactttccgcgtccgtaactggaataactggcgacgaaatatacatctggcatggcggcatcaagcacacctgcatttatgcgtgaccagatgtgtggtattaaccgcagacccacaattgctttctcgactggcgggtgttatgcctgaaaacagcgacgaaactcctttattaacattgcttcctgaggaaaatttaattcctggtatttcacgctttgaacaactttgtcgtttgttaataaaccagattaaaacaatacttttccagtcctgtccttcaggtccgttaacggtggtaatacagacatctgctcctgataaagaacaggagctccagtatttttcctttctctgggaagatgaagaattaccatggatgccagatattcatgccttacccagttcgtcaatttttaataactggaataaattcctgtctactgctcgttatccactactggtgctggcgctgcattaccgccagccagaagaaaacttaccggaatttgcctgtgcgttgctgctgttgcccgatgcgatgctgaaatcgtcagaacagcgcgatgcggtgcgagtatttcgcgccatgccgctgaatactgatgcattgccccgtgaattgacggaattacgtgatatggcgcagcagcctcccggggtaaaacatctggtctggcacagtgggttatctgcgccgtccgcgcaggcgctggggcgggtggttaatgagttacctttgcccctgcaggctgatatcgccgccggtggtattgtcgattttgagaaaatcagcgctaactacgggcccctggccggatggctgatggtggctgcggcagcagagatggtcagttacggtccggggagccactggctgctacaggcgcatggcaaacaggccagtgcgatggttgtcggcaacagtctgccggttacccatgatgaagatgtaagattggctccgttaccttatccggctgggtcgctcagccttgcggtattgctcaatattgcggtttttggagcaactgcccgttttttcccggactggctgttttcctggtacggcgtgttcagcgtgctgctgtcgctggccgtgtctctgcccggcgctgttttcctgctgcgccgtgccctcactgctctgcaacgcccccattttattcaggcagccggacttgcccgcaaggaataa

SEQ ID NO: 196227 - DNA, 327 bp, Klebsiella oxytoca; identical to SEQ ID NO: 103023

SEQ ID NO: 196228 - DNA, 213 bp, Klebsiella oxytoca; identical to SEQ ID NO: 149220

SEQ ID NO: 196229 - DNA, 822 bp, Klebsiella oxytoca; identical to SEQ ID NO: 16544

SEQ ID NO: 196230 - DNA, 465 bp, Klebsiella oxytoca
atgggcatcattcgcacatgtaggctcggccctgaccaagtcaaatccatgagggctgctcttgatcttttcggtcgtgagttcggagacgtagccacctactcccaacatcagccggactccgattacctcgggaacttgctccgtagtaagacattcatcgcgcttgctgccttcgaccaagaagcggttgttggcgctctcgcggcttacgttctgcccaagtttgagcaagcgcgtagtgagatctatatctatgatctcgcagtctccggcgagcaccggaggcagggcattgccaccgcgctcatcaatctcctcaagcatgaggccaacgcgcttggtgcttatgtgatctacgtgcaagcagattacggtgacgatcccgcagtggctctctatacaaagttgggcatacgggaagaagtgatgcactttgatatcgacccaagtaccgccacctaa

SEQ ID NO: 196231 - DNA, 684 bp, Klebsiella oxytoca
atgaaaaccgccactgcgccgttaccaccgctgcgttcggtcaaggttctggaccagttgcgtgagcgcatacgctacttgcattacagcttacgaaccgaacaggcttatgtcaactgggttcgtgccttcatccgtttccacggtgtgcgtcacccggcaaccttgggcagcagcgaagtcgaggcatttctgtcctggctggcgaacgagcgcaaggtttcggtctccacgcatcgtcaggcattggcggccttgctgttcttctacggcaaggtgctgtgcacggatctgccctggcttcaggagatcggaagacctcggccgtcgcggcgcttgccggtggtgctgaccccggatgaagtggttcgcatcctcggttttctggaaggcgagcatcgtttgttcgcccagcttctgtatggaacgggcatgcggatcagtgagggtttgcaactgcgggtcaaggatctggatttcgatcacggcacgatcatcgtgcgggagggcaagggctccaaggatcgggccttgatgttacccgagagcttggcacccagcctgcgcgagcagctgtcgcgtgcacgggcatggtggctgaaggaccaggccgagggccgcagcggcgttgcgcttcccgacgcccttgagcggaagggcactgttgcaaatagtcggtggtga

SEQ ID NO: 196232 - DNA, 684 bp, Klebsiella oxytoca
atgctgaaattcatgaaattaactgtgtttgcacttgcactgtttagtggggtagtgaaagcagagccaggttgccagaatgccgaggtgattggtgggaagctgataacagatatatgttggagttgcctattccctataaaaattgcaggggtgtcaattagtggtggaggcggtgttgtgcctagtgatgcggttacatcacccctatgtgcctgcaatgataatctgggtgttccaaggccaggggtaactacgtctatgtgggagcctgcaaggcttattgagttccaaagagtcccaggatgctcctctgtgttgaatggcactcgtttcccatttgatcgaacaaatcaaggtcatcatggaatgggggatatggatgggggtgatggctcttttatgcactaccactattatgcgttccccctgcttattatgctcgatatgttcataaaagagagctgtaatgcggatgggtacatggatctagacatcatgtatctttctgaggtggacccgacttggaacaatgacgagctcgctttttttactaacccagaggctgcggcagtagcaaatccaatcgccgcaacagcctgcactgctgatgctatttcttctacggcaggaaaaccactcaagcagcttttttggtgcgctggttcatggggggcgcggtga

SEQ ID NO: 196233 - DNA, 207 bp, Klebsiella oxytoca
atgttcacagaatggccaatcaaaaccttctttggccatacccaacgcaatgataatgtctatgtcatcggcagcttttatattacgcagataggcttggatttttggcctttcaatgggattatcatccaccagattagccaatttcagcaaacgtccatctttagcctcaatatggtatacacctgtaactgtgtcacgttttag

SEQ ID NO: 196234 - DNA, 141 bp, Klebsiella oxytoca
atgtatatgcaagtatcccagtttctgaagcattcgcaaaaaaagctgtacagaaaaaatattggaataagacaccaaatagtgaagctcaaggatttttggctgttgaaaatccagctgatcttgcaattgaagcaataa

SEQ ID NO: 196235 - DNA, 318 bp, Klebsiella oxytoca; identical to SEQ ID NO: 52346

SEQ ID NO: 196236 - DNA, 213 bp, Klebsiella oxytoca; identical to SEQ ID NO: 149220

SEQ ID NO: 196237 - DNA, 285 bp, Klebsiella oxytoca
gtgaaacgctatggtcgtggttttctcattaaattcttcgataaacatgatgataaacctgttcgtctgtatatcgataagaaactgatggaaaaaggacgattcggccattacgttgatgaaattttgggaactgaagatgtcagatattttcaagtttttttgttaaatccggatgtctccgaaagagaagatcgagcaggcaagcccgttatcaaccttgagatatcaagcctgcgacaaatggcgatttactacgagcttaactcttctaaggaggattaa

SEQ ID NO: 196238 - DNA, 126 bp, Klebsiella oxytoca
atgtgcaactttgaactttttaccgtcttccgctttgacatggtaattaacgccactaatggtgacgttgcagttccgatcgctgcaggagaaagtgaatcgttgtctgtcgtgcggttttcttga

SEQ ID NO: 196239 - DNA, 249 bp, Klebsiella oxytoca
atgaaggaagaaataaaaaaaaatttttttatagccattccacatagaccaatttttaacataccatgcatcaaggtacactcttgtgtcataatcgacatcacttcgcccacttacttgccacaaacctgtcatgcccggcttactcaagagatagtaatcaacttcatcattataccttgcaagctcagcagtgataattggacgtggtcctaccagactcatttcacctttaagtacgttgaataa

SEQ ID NO: 196240 - DNA, 204 bp, Klebsiella oxytoca
atggagcggttctttctgaatttgaaaatggagcgtgtctggcagactcggtatgccaaccatacagaagccaaacaagacatcaccgactacatcgttaacttttataacagtacccgattgcattcaaaacttggctaccgatcacccgcacagtacgaaacgctggccagccctgccgcccagttgcccgcctgtgcataa

SEQ ID NO: 196241 - DNA, 474 bp, Klebsiella oxytoca; identical to SEQ ID NO: 185876

SEQ ID NO: 196242 - DNA, 1518 bp, Klebsiella oxytoca
gtgaacaaaaaaaaacctcagcctctaactttacttcaattaaagaaaacagaaatttataactattattccaagttgtttctcagaaaagaattaactatgagagagatacaaacattactgtcattgacgattgtttttgtaaatcaggaggatattcacataagaaggtttggttataggatagctttgctttatgccaataagacaaaggattatattccgttatatgagattgccataaaccaaggcctaattcctgtagctaaacatcttagtgatgattatttaacatctgataacgatacattcattaaaactttatctgatagtttcgctgataacttttttgagaatggaatcacattgactcaacagcaaagtgatatgaactttttccttcaagaaagtccagataataatgttgctattgtagcgcctacatcgtatgggaaatctaatattattattgaagaaataaagaaaacccttggtggaaatagatgtgttatcgtaccgtctaaagcattaatctcacaaacaaaaaataacattataaaatcatataatacaaaagtgaaagtaataactcatcctgagatgtacaaaaaaggagaggataatatttttgttttaactcaggagcgagcttctaagttattatcaaaaaataaagatttttacttcgatcttctattaatagatgaagctcataatcttctggaaaatacaaatagaagtaaattattagctaatgtaatctgccgagcaatttttcgtaaaaaaaatcttaaaattaaatatttcacgccgtttttgaatgatgctaataatcttgcattaaaaaagatagaccaaaaaattgcagactataaagtaaatgaatatgttaaaagtgagattatctatctttatgattacagaactcaacatgaaaattttcaacgatatgatcaattcttagataagtggagcagcataaagaaaacttcaaataatcatattgagctcattaaaaataagtcgttagataaaaacattatatactttaatagccccaaaaaattagaaaatttttctagagaactttctcaatcccttcaggatattacctgtgctgttgtagataaagcttgtatggagttatcagaaaacattgatgaaaactaccttattataaaatgtctgaaaaaggggattgtgtatcatcacggatcaatgacagataatgtgcggctatatattgaaacgatatttaaaaaatctcggcatgttaaatatcttgtaactaactcaactcttcttgaaggcgttaatttaccagtagaaaggttatttattttagaaaataaaaaaggccggacctcattaaaccattcccaattcaataatcttgcgggcagaatcaaccgatttggtgatatttttaataatgataagccaatccaaattaaaaaactattgccagccatatttataatcggaactgaacaatatttcctgcatatttttctttaa

SEQ ID NO: 196243 - DNA, 765 bp, Klebsiella oxytoca
gtggaaacggaaattgggaaaatattatacgaaaataatatatctgaactaaatatacatgattgtgaacatattattcaggaagagattgatcattaccgtcagaatcaggatttaatatctgatgaggaatcattaatatctttgatttcatcattattcattaacaagataattgatgatggaaaatacaatgacttaaccaggttgaaaaatttggatgcacaaaaattttacgcgatgtttttaacttggaaggtaaaaaacacacctttcaaattaattattagaaactttttaagttattggaatagtattccaaaagatacgcagaaagaattcgtatttgttggaaaatggggtgatgaaacattcgggaatggatatcgtgaacactgggttaacattaataaaaaaacaaatgctgaaaaaataaatctagctatagtgagaattaaagaagaagatgattttttagattatcaaatatttaaatttattgaggtgattaatgaggttggtcttattgaggaaaccttttatctcaagataaagtatggcactaaagataaaagaataatttcattaataaatgatgggtttagccgaggcttatctgatctacttgttaataaatatgacaggcatctaatcatatctaaaaatggcgacgtcactatcgataaagaaatgatgaaagcaatggtgaaaaataaagagagtgaaatgttgttgctagaggcgaagttaaatattggaaattaa

SEQ ID NO: 196244 - DNA, 198 bp, Klebsiella oxytoca
atggtcctgaatatttacaatctggtttgcgaccaactggatcattgtctgcttagccttctggccgaaggcttgcttactttcaggggcatcaattccatagagccgtattcttgtatttattgcaccgtcataagcctgtacagtatcaccatcaattactctgacaacttttgccgagaaagttttggcaattga

SEQ ID NO: 196245 - DNA, 324 bp, Klebsiella oxytoca; identical to SEQ ID NO: 191272

SEQ ID NO: 196246 - DNA, 234 bp, Klebsiella oxytoca; identical to SEQ ID NO: 191271

SEQ ID NO: 196247 - DNA, 390 bp, Klebsiella oxytoca
atgggggatgctgataaagtcgctgccgctgtcggcggcgcggaccgcagccgtgcagacttcgagaatatccgggcggaattttgccagttcggagagatactttttcgcccggaacatgaacatgccgctgttccagtaatattctccggaggccagataggcctgcgcacgctccaggtcgggcttctcgacaaaacgggcgacctgataaggagtatgctccgcttccaccagagcttcgccgcgctgaatatagccatagccggtttcaggggtgttaggtacgataccaaaggtgaccaagtggtcagcctgcgcgtactgttccgcaactcggatggcgtcgtggaagacctgctgattattaataatatggtccgccgctaa

SEQ ID NO: 196248 - DNA, 393 bp, Klebsiella oxytoca; identical to SEQ ID NO: 179675

SEQ ID NO: 196249 - DNA, 420 bp, Klebsiella oxytoca
atgaataaaaaccgcgcccaggacgtgaaaaaggtcgtggagtacctgaaggccaaccagcgcagcgaatacaaacgacaccgcgaaatctaccgtccgtggggccgctgtgacgtggtggtccagacgccgcgcttcaacgttaaccgtatcaccgtcaagccgggcggggcgttctccatgcagatgcaccaccaccgcgccgagcactgggtgatcctcgccgggacggggcagataacggtcaacggcaagcagttcctgctgactgaaaatcagtcgacctttattcccattggtgccgagcactgcctcgagaacccgggacgtatcccgctggaagtgctggagattcagtccggctcctatctgggcgaagacgacattatccgtattaaagaccagtatggtcgttgctaa

SEQ ID NO: 196250 - DNA, 417 bp, Klebsiella oxytoca
gtgatccacgtactcctgcagaaccgatatctgacacagggtgccgcgacgggacgcgtccaccggcgcaaactgattctcttccgccaggcgctggatatcgcgcagcccggtatccccgctgatgggcttggcgttttcacgcaccagcttcatgccgttgtagttcatcgggttatggctggccgtcacctctatcccgccgtccacgcccagatggaaggtggcgaagtaaatctcttcggtaccgctcagaccaatgtccagcacgtccgtgcccgcatccatcagaccattggccaacgccagcttcagggactcgctggtcagacggacatcgccgcccacgacgatcgtttttggtttcaggaattcaccataggcgcgtccaatgcgataggcgatatcttcatttaa

SEQ ID NO: 196251 - DNA, 294 bp, Klebsiella oxytoca; identical to SEQ ID NO: 179894

SEQ ID NO: 196252 - DNA, 162 bp, Klebsiella oxytoca
atgtccacaatgaagcctgatgcagtctggtatcctccgcagtttccgaagcaggtacgatggttgacgcgccttgtttttatcgctgtggcgatgttgctggctggttgtgacaggtctgccagagaagagagtgtcagcggcggcagcggcaccatataa

SEQ ID NO: 196253 - DNA, 162 bp, Klebsiella oxytoca; identical to SEQ ID NO: 196252

SEQ ID NO: 196254 - DNA, 465 bp, Klebsiella oxytoca
atgatatcctttgtgacgggagacgttggaagaaaattacgtcatcatgcaaatgatataattaacaataaaaaacaaaaaactcacaatattttcactccctgccctcagccctatccgggagatttaaactgttttttcttcttgagcgcagcaacgtccgcgcataaataccgtaacagtagacaagttaataccgcagctctgcctgatatgaccgcaccagagctcacgcctccgattgctttccggcttttatatcgccgccattcggcattatcatatccatacaagctcggccagagaaacgtaaaacaatacccgacgtggaatatgtccacggtaataaaaacccaggttgacaccgaccacgagttggcgtcaaatacttatattccaggggctcattgcttatatcgaccgtgcattcagtctcttaaccgcccctttgcaaaattgatgtaa

SEQ ID NO: 196255 - DNA, 183 bp, Klebsiella oxytoca
atggcaactcgatatattggcattaaagaaatgtgcaagctgaccggaaagagtaagccgaccttgtggaggatgtacgcgaagaggaaagaatttccggcaccagagcgaacgcccagcggaatttttctcggatggccagaaacggtttacgaagcctgggtgaacaaaacgaaaacctaa

SEQ ID NO: 196256 - DNA, 846 bp, Klebsiella oxytoca
atgagtaagaaaatagaaaacccagtcgtgcttatccacaagcgcgataatagcgattcgtatgccgtggccatcaccagcggcagccagaattatcacgacgcacttctgatggcttcaatggaaccagatgaaaatggtgatgatattgatacctggagcaaaactggctactacatggcgcaggaaattgagcgctggcgccgggctgctgcacttgctatctccagccttgacgctgccgatgaaagcaatgtatggcgggctgtcgggttcgttttgggtgcccttgagtgtgctacagcgggcgaaattgcaggcgctacagaaaatcgcaggagtagcgaaaaggtgcaggcggtgcaggttcagtcggtacccggcatcaaaccagcgccagctctgggttctttgccaaaaagaggcgaagtgctgcccaccaactctcgggaacaaagtcctgtcgtccacgcctatcacccagactgcgggtgcgtagtctgtaaagttgccacttccagcaactcctcagatagcaagacgataagtgaattaacattcgtcattgggtttgacgcaggaaaagagccgccaatacatgcccatatggaagcgtttggtggaaaggttgtcgcggtcgcgttccgtaatgttttagaagaacacgacaacgatgatgcagcctccaaaatactggatatcaccctgcccgacattagctcaaaggcattttggagcggtagcggcaaagacgaagttttccatccagagacatacaggcgctgggtaaaagaggcaatcgagcgttactgcactatcgcccgtatcgatgtcgaggtgaagtga

SEQ ID NO: 196257 - DNA, 408 bp, Klebsiella oxytoca
atgagcatcacactcgaaaatggacgtattaaccttgattccctggtgacaattgaagatcacttgcgtggactcgcgctggcaaacaggacgctggacagtattaaagaccagatgtctcagcgttccgataaaaaatcagactggtacagacgggctacggtggcacacaaatcatggttctgggctcgctcacgaatctgcgaacgactggctatcttgcgccgtcaggaaaaggacgttaaccgtcttcgctggcagtatgaaaatcaagccctaatggtgcaactgaaaagtcaggtgagcaaagaagttttcagcgaatgtttgcgccgggcaaaagttaaagctgaacagcggctggagcaagactttcgcgctgcgatgattgaggtgggcaatgagtaa

SEQ ID NO: 196258 - DNA, 450 bp, Klebsiella oxytoca
atgatcgacaaccgcaccgccagcgctatcgaccttgcattacagaaatacgacacgcctgtcggtctactgttcgcggccgttcgccacggacgcatgaagcgctgtttcagcatggacacggcaatccgctatctggcttttttcatgacaaccgaagtctttgaacgtttcggatacgaacaacgatacccggatgtagaaaaaatccatccaactgatcccgggctgagttgttgggaacggggccagacaacacgcgaatattatcacgcccaccagcgctgtattcggcgcctgcgccgaatcctcgcccgcaaacgtgaaatgcagaggtggtgcgaaaagtgggatgccatgcacgaccgctacgtgaaagagcgtgaagaactcaaagccagcaaaccagcagaggtacgcaatggatcacacagtacacgcagtatttaa

SEQ ID NO: 196259 - DNA, 189 bp, Klebsiella oxytoca
atggctgatattactttacataaagctgcggaaaaagcttatcaagctgaattagtttcaagaatgcttgaagagtacccgagcaaattaactgattctgacattgcaaccgtggcttcacttttatcaaacctgataggttccgttactgcgtatttagttgaagaagaatcgaagagccctttataa

SEQ ID NO: 196260 - DNA, 315 bp, Klebsiella oxytoca
atgagtacacagaaattttatcagttagtagacattccagattacaggtttagaagtgatgactccaaaatcagcggcatcgattttgatgctatatctactgattgcgatacaaaaaccatttctctgcttgaggccatcagtcatatcgggcttactgtgcttaccttaagtaatgaggatgaccttgacaaagaaaaattaagcagtctttgttctgtaattaccgatcttgcagagttggcaattgcaacaaataaaatcgccaaatctgcgacttattcaattggatataaggatggcgagaatggctga

SEQ ID NO: 196261 - DNA, 693 bp, Klebsiella oxytoca
atgaacacacttgcagacaggctcaggctggcaatggctcatgccggggctacccaaagtcaattagcgcatagggttggtgtaagccaaggagctatacaaaagctcacctcaggaaaagctcagtccagcggaaaaatcgtagatatagccaaagcattggatgtagatcccatatggttaagcactggcgagggcagtatgggaccagcaaaaaccccagagcaaaggatgtttggtatcgatccttgggataagcaaacgccgcttgaggatgatgaggtagaggttccttacttgaaggatatagagttcgcgtgtggagatggcagtgcgctaaatgacgattacaatggaaaaaaactaagattttccaaagcaaccttgcggaaggtgggagcaaacagcgatggggatggcgttctgtgtttcgctgcccatggaaacagtatggaaccagttatcgctgacggctctacggttgccatcaattgccatgacaagcgtatcgttgacggtaaaatttacggcattaatcaaggcggttggaaaaggttaaaaatactttacagatcagcaccggacaaggtgacaatcagaagctacaactctgatgaataccctgatgaagaagtcgatatggatagtctcgaagttttaggaagactgttttgggtatcaacaatattctga

SEQ ID NO: 196262 - DNA, 243 bp, Klebsiella oxytoca
atgagtgatgaggtttttgaatccccaatggcgaaagctgtttatgttgccggcggacaaagttcgcttgctaaaaaagttggcgttacgcaaggggccgtctggaagtgggttagagggattaaaaaggtgtcgcctgtccatgcagttgcagtctccaatgcagtaaatggtgtggtgaagccacacgaactacgtcctgatcttcctactcttttcccacacccgaactctgaggtgtga

SEQ ID NO: 196263 - DNA, 210 bp, Klebsiella oxytoca
atgtcatgctcagtcactgccgaaaatatagttaaaccattggatatcgattatcgcgatccgcgtggtgttgtagtgcacgtcactgggtggaaccgggagaagcaacaggtgtatttcaccagacagaattacccgcatgaatgcatgcagccagtctggaagtttcaacaatattttacaaaggtcgcggaggcgcaaaatgcgtga

SEQ ID NO: 196264 - DNA, 1023 bp, Klebsiella oxytoca
atgcgtgattatggaaaggtgtctcctcacttctggattggtagaacaggtaaagaactgcgtcaggctggtcctgagtctcaacttgtagctttgtacctacttaccagtcctcacgccaatatgatcggcctttattacatgccccttgcgttcttatcacatgaaaccggcttaaccatggaaggggctaagaaggggcttaatagcgccattaaagcagggttttgtaagtacgacgagcattcggagatggtatgggtaatcgaaatggcaacacatcaaattggtgaggcactaaaaccgggagataagcgttgtgctggggtgcagaacgaatacaacaaggtatcagataatctttttctttcagagttttacgtaaagtattcgaagcaattcaatatgacgtcttcccgcaatagcgaggccctgattgcggaacaagcagtaggggcttctgaggggcttgcaagccaagatcaggaacaggagcaagaggaagaacaagataaaactaatttgtccgattcgcatcggaccgatggtgataatccggatgcggcgaaagaccagcctgcacaggaaaattctcatgcggaatctgatgatgaagggcaaccagatccggtcgaagacgctttcgaaaatattttctggggggctgggctgaggaaggattctaaagtgaaggctagatcagcgttcaggaccaaatatcgcgattggaagaaagcaacccggggtacgcctgaagagtttgcctgcatgctggctgaagacatcggagtcagggtgaaggcgcagcaacttggcttcgacaaacttcttccaacgtcatacctcaacggcgagcgatggaacgatgaaaaaccagctgacgcatcttcatcggtggacagatccgcctgcgatggtagagcgacaggttcctggtatgcaaaacccaacgatagctccgcagaggtgtttatcaatcaagccgctattgaccgccttaagcgcggagctaaccgcccatga

SEQ ID NO: 196265 - DNA, 324 bp, Klebsiella oxytoca
atgaaaaatgaagttttaaaagaagcgattgaaaactatcagtgcctgaaagcgcaagttcgccaacaggaatctgaaagtcatgatccgttatcgtttggaggtgtggatgtggacctgtttgagtcatttatgtttgcaaaaaaccagcttcaggaactgattaaccccgatgaatatttggagttaaagaggaaagtatctcacctcaataacgaggttggtgcgctgatacttgaaaacatcgtccttaaaaatgaggtagccaagctaggcggcgatcctgatttgttgggtaatgtggatgttgaggggaaatcatga

SEQ ID NO: 196266 - DNA, 1221 bp, Klebsiella oxytoca
atggctagcactcttttaacagacagcaaaatcaggggcctgaagcctaaaaattcagcctattatacctggcaagcagccgcaacccgcggcactggcagactcggtgtaaagacctacccatcaggaagaaaaacattcgtctatcggtatttcgtcagcggaaaagagaagtttatcggtctgggcgacttccctacccttaccctttccgatgcaacggagaaggccaggatcgcagctgccagcgtatcagagcccgctaaggccatggtagaacacgcatcacttaaaaagctatttgatgattatattgcagaccaaaaagccagaggcaagcgatcttacgacaaaacgcaaaaccgaattaatcaggttctggcaagccagcatatcaccccggatatgccagctaaagatgttaccccggaccacatcaaacgcatactttcagagtttattgtgagggatgcgcgcgccggcgcaaacaaagtacgttcgaacctgcatgccatttttaactttggcctgtttgcagataacgatcctgccaacatcgataagaaaacagtttatggacttgatcgcaacccggtggccgcggtcccatcgcagcgcggagcagataaagcccttgaccgatttttatcatgggatgaattatccacgctgctgggcgtccttgcccgttcagcagaaacaatcccaatgcatcctgattttgttcagttgctgctgtgttgtttgcacacagcagggcagcgcccatgggagctcatgacaaacacaaaagataactgggataagaaagaaaaaacgttgacggtgccgccgcacatatcgaaaacgggtgattatcatgtcattccgttgagtgattcagcgacgcagatcctgaaggtgatggaaaaacgctatcccaaatcggggtttcttttccccgcggatacagctgaaggacatcttctttcggctgagttcgggaagcaggtcagaaaattttgtgaacgggagccatttaataaattcacgccgagggacgttcgacgcacatttaaaacgctcgccggcgcgatgggcgtaagcaccgaaatgcgcgacagattgcagaatcataagagggccggcgtatcagccaagcactatgaccgatacgactacatcaaggaaaagcgcgaaattatatcgcaatgggaagaaaagttactttctctttgttaa

SEQ ID NO: 196267 - DNA, 654 bp, Klebsiella oxytoca
atgatttatgcggtaaacactggtttggttgatgccaatccagcatcaggtattggaatggcctttgagaagcccaaaaaacaaaatatgccgacactgcgaccagaagagttgccgaagctgatgcgttctttggtaatgtctaatctgtctgttcctactcgctgtctcattgaatggcaactcctgacgcttgtgcgtccttctgaggcatccggagctcgttgggctgagatcgatctccatgcaaagctctggactatcccagctgaacgaatgaaggcaaagcgagaacacatagtccctctatctcctcaggcattagagattcttaatgtgatgacgctaatcagcgccaatcgtgaacatgttttcccgagtcggaatgacccaaagcaaccaatgaatagccagacggcaaatgctgctttaaaacggattggatttggtggtagattggttgctcatggattgcgttcaattgccagcaccgcattaaatgaagcaggttttaatgcagatgtaattgaggctgctcttgcgcatagtgataaaaatgaagtgcgcagagcatataatcgttcaacttaccttgagcaacggataaaacttatgaattggtggggccaaaaagtgtccgagcgcaatcaataa

SEQ ID NO: 196268 - DNA, 156 bp, Klebsiella oxytoca
gtggcacggacaacacgccccctgaccaacaccgaagttctgcgcgctaaagcgttagagaaggatctcatgctgcatgatggcgatggactcttccttacagtgaaaaccatcgggaaaagctctggcgtttccgttatcaacgtccggcaataa

SEQ ID NO: 196269 - DNA, 639 bp, Klebsiella oxytoca
atggaaaatatcgcgcagttacccgagttcgccgcgcaattcccgtcaatctggggcggctttttattcctgtccggactggcgttcggcagcttttttaacgtcgttatccatcgtttaccgctgatgatggaacgcgcagagggggtgaatctctgcctccccgcgtcgttctgtccgcagtgccgtcagcctatcgcctggcgggacaatatcccgctgctgagctttttatggctcagggggcgcgcgcgctgctgcgggcagccgatctcgcgtcgctatcccctgatggagctgacgaccggcgcgctgtttgtactcgcggggtacctgatggctccgggcatgccgctgctgggcgggctaattttcgtgtccgtactgctgatcctcgccgccatcgacgcgcaaacgcagctgctgcctgacagactgacgctgccgctgctgtgggccggtctgctgttcaatctttccgataccttcgcgccgctggcggaggcggtcattggcgcgatggccgggtatttgtcgctgtggttggtgtactgggtgttccgttactcttgtttttatgtatttagagttaaactctacttttctatttttagaattcaagctattcatcgtaattga

SEQ ID NO: 196270 - DNA, 204 bp, Klebsiella oxytoca
atgagaaagcaaaccaagatgatatcgaacagtcggataatcggtggaaacaccttaaccttgacgatctgcaagcgcttttctcacgaatgggaggtgatattaagtcgctacagggggcctctctacgtgagttcaccgggaacggcggtcggcgtacgtcaagtgcggttgcggctcagggggcacgggatacagcactaa

SEQ ID NO: 196271 - DNA, 783 bp, Klebsiella oxytoca
atgcagcagccacaaactaccccgccaagggtggagatgatcaatatcaccaagacctacgggtcgatacgttcattgcgcggagtcaaccttgagctggctccgggcgaggtgctgggcttagtgggcgataacggcgcggggaaatcgaccctgaccaaagtgctctctggcgcggtgatcccctccagcggcacgattcgtatcgacggtgaacagcagcagtttactaatccggccgattcgcgccgctgccatatcgagatggtgtatcaggatctgtcgctctgcgacacggtcgacgtcgcgggcaatctgtttatgggccgcgagccgatgaaatcacgcctcggtatccccttcctcgatgaggcaagaatgcacgccgatgccagggagatgctaaaagggctcgggatctccattcccgatacccggctgctggtgcgaaatctctccggcggccagcgtcaggccattgccatcgcccgcgcggcggcctttgacccgaaggtgctgattatggatgaacccaccgccgcgctggccgtcgcggaagtcgaagcggtgctggagcttattcgccgcgtttccgctcgcggggtgagcgtgattctgattacccaccgcctgcaggacctgttcctggtctgtgaccggatcatggtgatgtatgaaggtaccaacgtcgccgacagacgggtggccgacaccagcctgagcgatatcgttaacctgattgtgggcgaaaaattcaccgcccgctctgcggcggcacattga

SEQ ID NO: 196272 - DNA, 1116 bp, Klebsiella oxytoca
atgcggaacgcgcttatacggcagggcaaacacgctatccatctcttcggtggagagcgggattgcgggcggattaacccagatatagcgctcgccgtgcttctgcatcagcgcgcgggcgcagccggggttggtttcatggtgcagaatacgcgacgcgtgcgcgtagagaaccttgtcgcctttcaccttctcaaaggaaggcagcaggacgtaggtcttctcccacggcttcggacgcgggggctgcacggtaacgcgcttcgcttcctgttttggcggtgcgacggttttgttatccgcgcacggcaaatcttcaccgtacggatgcggaatcgggtcgattttccccggcgtatccagacgcgtggaatccactccgctccagcccggcagcgcctctttcaccatgatggcggtgttgcgtacgtcacgaatttgcccgatgggctcgccggcggccagacggtgcgccacttccaccagcggacgctcgccgttgccgaacatcagcatatcggctttggagtccaccagaaccgagcgacgcacggtatcagaccagtagtcgtagtgcgcggtacggcgcaggctggcttcgataccgccgaggatcaccgggacatctttccaggcttctttacagcgctgggtatagaccagcgtggcgcgatccgggcgtttaccggcaacgttacccgccgtgtaggcatcgtcatgacgcagcttgcggtcggcggtgtagcggttgatcatcgaatccatgttgccggcggtgacgccgaagaacagattcggtttacccaggcgcataaaatcgtttttattattccagtccggctgggaaataatccccacgcgaaacccttgcgcttccagcatgcgtccgcaaatcgccatgccgaagctcgggtgatcgacataggcatcgccggtaaccagaatgatgtcgcagctatcccagccaagttgatccatctcttctcgcgacatcggcaagaacggcgcggggccaaagcaggcggcccagtactgcggccaggagaaaaggtcacgatccggttggatcagggatattgcgctcatattgcttccggggaaatgataaaaaaataa

SEQ ID NO: 196273 - DNA, 198 bp, Klebsiella oxytoca; identical to SEQ ID NO: 112468

SEQ ID NO: 196274 - DNA, 333 bp, Klebsiella oxytoca
ttgttatcagatcctgttattagtacgcgtaataacgccggtactttcccaaaacaggatttccgcaatgcgcttctatcagatcgaaccgacgctgagaactactggcgcggcattattctttttggcaaaaacgtcgcctcctataagtttgcgctggcgcatgcgctgtacgatatccgccgcgacggtagcgatctgatacgcctcgaggagctggcggtgccgttcagccagcatctgtgtcgccatcttgagcaggcccccaaacagatcacgtcctcaaaaagccagtttctcagcgcctgtagccgcttcaatcgcaggagataa

SEQ ID NO: 196275 - DNA, 306 bp, Klebsiella oxytoca
atgatcaatgccgagacggggcagaataccggtcagttccgcatcaaaggtattgttggtctcgccaccgccgttatcggagtagtacaggaacggtttaccgtgatttttaatcccgtgacgcaacgcatccgcaacagctatcacggtttcagacagcgccagactccacccaacaatgtagcggcagctgccatccagaataaacgtcacctccggggagaacgggtttccgtggtcaggatgggcgaccttcattttcatgccgtggccgtcaccaatccagacgtaattaaccggaagtga

SEQ ID NO: 196276 - DNA, 1401 bp, Klebsiella oxytoca
gtgaggttcaaaatttccctgaccacacgcctgagcctgattttttctgcggtgatgcttacggtatggtggttatcaagttttatcctgattagcaccctgaatggctatttcgataatcaggaccgcgattttctgacaggtaaacttcagctcaccgaagagtttcttaaaacagagacgttcaggaacaaaacggatattaagtcattatcagaaaaaataaacgatgcgatggtggggcacaatggcttattcatttctataaaaaacatggaaaatgaaaaaattgttgaactctatgccaaaaattctgttgttccagcggtcctgcttaataagtcgggtgatattctcgactatatgatccagacggaagaaaataacaccgtgtaccgcagtatctcgcggcgggttgccgtgacgccggaacagggtaaaagcaaacatgtcatcattacggttgccacggatactgggtatcacaccctgtttatggacaaactcagtacctggctgttctggttcaatatcggtctggtctttatttctgtttttctgggctggctgaccacacgtattggtctgaaaccgctacgggaaatgaccagtctggcttcctccatgaccgtacacagcctggatcagcgtctaaatcccgatctggctccgccggaaatctctgagaccatgcaggagttcaataatatgtttgatcgcctggagggggcattccggaaactgtcagatttctcgtctgacatcgcgcatgagctgcgcacaccagtcagtaatctgatgatgcagacgcagtttgcactggctaaggaaagggatgtttcgcattaccgcgaaattttattcgctaacctggaagaactgaaaaggttgtcacgaatgaccagtgacatgctttttctggcacgttcagagcatggtctgctgcggctggataaacatgatgtggatctggcagccgaactgaatgaattacgtgagttgttcgagcccctggcagacgaaacaggaaagacaatcacggttgaaggagagggcgttgttaccggagacagcgatatgctgcgccgtgctttcagtaacctgctttccaatgcaatcaagtattctcccgataacacctgtacagcgatacaccttgagcgtgacagtgactgtgtgaacgtgatgattacgaatacgatgtccggccaggttcccgctaatctggaacgtttgtttgaccggttctatcgcgcagactcatcaaggttctacaacacggaaggcgcggggctgggattatcaattacaaggtcgatcattcatgctcacggcggcgagctgtcagcagaacagcaggggcgggaaattgtgttcagtgtgcgtctgttaatggattaa

SEQ ID NO: 196277 - DNA, 549 bp, Klebsiella oxytoca
atggatatcaactactacgatgaacatcaggaagaatttgaggcggttaaactggcgctgaagggcgaaatggagaggatctggggctccatgctgaaagaaagcggggatagcctggatgatgaagccacgtacctgaacctgtttgaagaactgcagtacaccttctctccgtccagcttcagtaagctcaccccgtcgcaggatctggatgaagataaaattgccgcctttgtggccagaacccgcggctataagtacggcatcacgatcaaagcccggccaggccatctgcagaaatggctgaaaggccgaatccagccacttgaggacgcggctggcacaaacctgtgctggatcgacacagccaccattgtgcatatcggtgccggtcagcagttcgacgatcagtattacctcaccgtgaccacaaagaccggacagagctaccgcgtgaatgatgtccgtctgccaggtcgtcttctggaagccgcacaggaaaccctgttgttcagggcgctggattcaagcactggcggtaatttctga

SEQ ID NO: 196278 - DNA, 720 bp, Klebsiella oxytoca; identical to SEQ ID NO: 112761

SEQ ID NO: 196279 - DNA, 273 bp, Klebsiella oxytoca; identical to SEQ ID NO: 134208

SEQ ID NO: 196280 - DNA, 306 bp, Klebsiella oxytoca; identical to SEQ ID NO: 112760

SEQ ID NO: 196281 - DNA, 321 bp, Klebsiella oxytoca; identical to SEQ ID NO: 83621

SEQ ID NO: 196282 - DNA, 849 bp, Klebsiella oxytoca; identical to SEQ ID NO: 134212

SEQ ID NO: 196283 - DNA, 438 bp, Klebsiella oxytoca; identical to SEQ ID NO: 134213

SEQ ID NO: 196284 - DNA, 267 bp, Klebsiella oxytoca
atgactctgatgactctgatgactctgatgactctgatgattctgatgattctgatgactctgatgactctgatgactctgatgactctgatgactctgatgattctgatgattctgatgactctgatgactctgatgactctgatgactctgatgactctgatgactctgatgactctgatgactctgatgactctgatgactctgatgactctgatgactctgatgattctgatgattctgacagctccgatgattcttctttaa

SEQ ID NO: 196285 - DNA, 354 bp, Klebsiella oxytoca
atgagcattctgggtatggcggccattcgcattaatggccgcgaaatcaaaaccgaggggaaatccaccctcaatccgggcggaaaaacgcgcacccaacatatgggcggcggcaaggtctggggcaactcaggcaagatggcgggtccctcgatccagatgaccatcgctgcagcgcaggacatggacgttatcgaaatcagtggctgggagggggtcaccgtcatgttcgagggtgataacggcctgacctacatgatgaccggcgcggcgactgctgaaccggccacgctggaggaggacggcggcactatcagcgccaacttcatcggcgaaaaactggtgaaggtgtaa

SEQ ID NO: 196286 - DNA, 1074 bp, Klebsiella oxytoca
atgccatttaatgtacccacgttacgacagttaattaaaaccggtgagcaggatatagaaatcggtcttgatgaaaagctcccgccggtgggggttgaacgtgcgctgaatacctcattcagtagcgcagtacgcgatgtttacgattaccagtcgtggattgcggatcaagttgttcccaccgttaaatccgacgatcagaccattattgatattgccagctctgaaggggttatacgtaaagcggcaacctccgccgccggactggtgacctttaaaggctcccgacccattccactgaacacggaaatgcagttcagtaacaatgctggctatcacgtgattaaagccagtgcgccggtgagcaatatccagaccgtcaccattcaggccgacgacgtcggcgcatcaggcaacctcgatgcaggaactgagttaacgctggtgtcgccgattccgggtgttgagagcgtaggaacggtagcggccagcggcattaccggcgggacagatattgaaccgatccacgagctgcttgaccgtttgctgtttcgtaagcgcaatccgcccgtgggcggcgcggttcacgattacgttatctgggcgcgtgaaatgcctggcgtttcgcgtgcgtggtcgtgggacgcatggcacggcggtagcactgtcggtctggcgtgggtctatgacagccgctccgatatcacgccgacagcagctgaccgcgaacagatgaatgaatatctgttccgtcatcaggacccggccacaggtaactttgtcgggaaaccgggtgggattgaggtttggattatcacgctgacgctcaagcctgttaatccctcgatccgtctcgttcctgacactgctgagacgcgaaaagccactgaagccaacctgattgcgttacagcaaacactgtcaccgaacgcgacattattgctgtcgagcctgcgcacagcgattggtactgcgacgggcgtcaccgattacacgctggacatcagcgccgatatcaccagtgaaaataacgaactcatcactatcggggatatcacatggctcatagcgtaa

SEQ ID NO: 196287 - DNA, 450 bp, Klebsiella oxytoca
atgaccatcagaataaactggcacctgcccgctggcggcgacatcgagattgaacacaatggcctttcgtttgacgagggccttgtttctttggtgtatatctgcctgtttactgatgcacgggccgatatcagtgatgaaatacccgatggtactgatgaccgtcgcggctggcctggtaataccttcagtgattttgagtggggttcaaaactctggctcattgaccgtgaaaaactgaccgaagaaatccgcatgcgggctgagaactacgctcagttagcgatgcagcctttattgcgttatggctttgtcagaaatgcaaaggtaacggcgaccattccgcgaatgaactggctggcattaaatatcgttctgacccgtccggataaaactcaactcaccgtagaaattaaaaagcgctgggaggcgatcgaaaatgccatttaa

SEQ ID NO: 196288 - DNA, 1092 bp, Klebsiella oxytoca
atgactgaagagttaaccctgaacgttaacggccagatctggggcggctggacggacatgaccatcaaccggtctctcgacaatatcgccggagagtttgacctgaccgttaccgcccgctggtcagctgctgcgcctcggtccatcaagcccggccagccctgtacggtttccatcggcatcgaccgcgtcatgaccggctacattgacgacttcattcccagctatgacgcggagaatgtctcccttcgcgtgatgggccgcgacaagaccggcgatctggtggacagctcggtggtcgataagtccggccagtggaaaggccagaagctggagcaactggctgctaccatctgcaaaccctatggcatcgaggtggttaacgagaccgacactggcgacgcttttgacagcatcaccctggaacagggtgaaaccggctttgaactgctcgaccggctggccaaacagcgcggcgttctggtgacctcggacgcttacgggcgactggtcatcacccgcgcatccacccggcgggcaggagtaagactcaccctcggtgacaacattctggctgcgcgtggccgattcagctggcgcgagcgtgccagccagtacatcgtcaagggttccgccagtgcgggcggttcgacatgggatgaccagccggtgaagatggttggtgggcgtcagacgatagtcagcgacccggaaatcacccgctatcgtccgaagattctggttaacgaggacagcctgacggtcggtggggccagtgctcgtggtgaatggcataaggcggcgatgatgggcgaagccaacaccaccgaaatcaccgtcgcgggctggcgggagaacggagctacggggccgctctggcagcctaaccagttggtgccggtgaccgatgaaatccagcaactcgatgtcacctggctgattaagtccgtttcctttatggagggcgatcagggacgtctgaccgtgctgtcactggtaccgcctgagtcgctggatatgcccgaacagaaagctaaaagtaagggtaaaaaggcgaagtcaaagacttccgtgggggtgacatgggactga

SEQ ID NO: 196289 - DNA, 1287 bp, Klebsiella oxytoca
atgttctccctgaacctccagcgatcagccatttcgtatgacgcaatttgtcagaataagcctgtcattgagttcagtccggagggggtgataaataaagccagcccgctttttctctccactatggggtacagggctgatgaaataatcggtcaccaccatcgtatattctgcccgccctcgctggtaagttcaccggaatacagccagttctggcagcgccttgccaggggagaaagctttagtggcaagtacctgcggctggcaaagggaaatcgttccgtatggcttgaagccagttatatccccgtttctgacaggcgcggccgtgttatcagagtcattaaaattgctgccgatatttctgagcgcgtgcattctgctcttgagcaggaagcagttgtaaatgccataaaccgttctatggccatcatcaccttcaatcctgaagggatcgtgcttgaagcaaatgaaaatttcgtcaatgccactggctataagcgggatgaaatcataggtaagcatcatcgtctgttctgtgccgagacgctttacaaaagtgatgaataccgacatttctgggagagtctgaatcaaggtgagtttttttctggtctgtttccacgccttaaccgtcagggagaccctctgtggttccgtgcaacttataaccctgtctttaacagtgatgggcagctttataaaattgtgaaattcgctacagatgttacggctgatgtcctgcgaaaccagagagagcaagaggctgctgtgcatgcatgggatatggccgtgcagacccgagaaagtgcgcagaacggtgccaatgttattgaaaatagcatccttatgattgacagaattgcgcaggggatgggggctgtctccaccgatatctcacggctcaacaatcagtctgaaagtattgacgatatggtggaaaccatccggaagtttgccatgcagacaagacttattgcactgaatgccgcgattgaagcagcaagggctggcgcatccggaagaagttttgcggttgttgccgcagaagtgcgtaatcttgcggcgagcgtcagtagcgcgactgaagaaattgagcaagtcgtggccagcaatagtcaactggccaaggatgttctctgtggcattgaaaacagcctgatgaacactcgggaaggggttacactcatgcgcgaagcgggtgaagttatgaccagcattcagaggaatgctgcaggggttgagactgcggttaaggatgtcgccatttcagttaaagccggatag

SEQ ID NO: 196290 - DNA, 765 bp, Klebsiella oxytoca
atggctgcattaactgaagttaaagtgcatttaacgaaaacgttttctcgatacatcaagggtgcggatatcatttatccctttgatatcaagtcaataaaagatgtaatacctgattgtattattcaatggtgggttgaacctgagaacccggcatcattatccagaaatatggctggaccgctcatgcgtgtcgtcggcgcgccttcgattgacgggtggagcgttgcactaaatgagaccaattatatcgactccaatatcaatatttctgagttcaatggaagcgatttaaccatcattgggattacctcgtcacccggcggtaagtttaatatctgtggtcggttgcaggtaaatgctccgcagcgatcccgcgcattactctatgatgatgtcagtaatgtggccgtacgatggttgaacgccagtggtgcagccctgcgggctggacaggccattgcaacctctggtgctgatatgcatgctgcgcgttttgttacgaataatggtgctggaatgatttcagctaagctgactcgcccggctaccaaggcgacgacagagacgactggaggggcctcagcgtatgctatgccttcgagtaatatgctcattggtgcgagtgctgatggcgcaacggcggtaacagggaaggtttacgcggtttttgcgtttaagcgagcgctgactgattctgaactctctttgatctacaccatatgcaaaaatttttacattttgaatggtggggcttctttgtaa

SEQ ID NO: 196291 - DNA, 2199 bp, Klebsiella oxytoca
atgtttcatcttgataacaaaagtgctgtcacggagatgccgcctgttcagagtgtatttagcgctgacatgctgtatttctcagaagagaaagaccaggcatcctggccaggcgcggactggtttaacattgtcacactggagttactgaacatcctgaagctggctggggtatccccggaaaagcaaaggttcaatcagatagctacagctctttccgaattaatggccgcgcagtcgagaatttttgataacgagcctgagggattgcttaataccagtaatggccagtatttcggggttcctcaggggcttgatgcctacagctcttttatttattttaagaatgaaaatggtgtggcagtcccggtatcagacatggtcggatctgccgcaatcaagcaactcaatgagcttttcagcgcgcaaattgaagctattaataaaattattcctgaaattcagtcctatgctggcataaccagtaaacagtcggatacatcaggtcacactcctgtacagcttttggacgatggcacgttgaatctggccgcacttctgctgggaaatgagctggagtttatcggtgatgaagtttcattcactgttcagagccgggccagcggtgctttcatcgcaagatttttcagtgatatgtcttatcagatcggtgatgtttacacctattattccagcgcctatccaggaaagaacaagatagtagccggtagcgatggtaagtcaatttacgtgcagtacgatgatggccgcgttgaagatgttcgtgacgaggctgacaatggtcaaataaacccgcctgatggtgccttcgcgttctctaacgagggtaatatttttctcattgaggaaggcaataataccaggcaactgacgaatgatgagtttcttaatcttaatcctcaggttataaaaactgctgatggagtcagctatatcaggttcgccagccagcaaggcggtggtgatttcgtcactgctttgatgagcaccgatgctttaaaccgcatcaatcagggtgataacacactctttcatctgtttgttgtcgggcaatcacttgtcgctggcggggggacaacaaaccagccagctattacagtgattccgcagatgccttatggtgcggtttgtttcaacggggggcctaaatacgatgcaaaatatgaatctaaatcagttgctctgtctgatttagaaaaactcgtgccccttgcggaaaatttcggtaagtgccagatgcaggaatccgcgtgctcaggtatggctgaggttgttcatgagaaaacaggtaaaacagtgcttgtctctgcttctgcttcaagcgggacatcactggctggtatctctgagggaactgatgcatatgcagcgacttgtcttatgattgagagggcctatgagatcgcccgttctatggggttaaggtattaccctgtaatgatcttcattcatggtaacgctgatgctgctggcggaacttcggtttcaagttataaggctcaaatgctttccttgcatgcggcttatgaagagtttgtgcgcggtttaatcgctgataacagctttactctgactgtttttgtacagcagtttgctaatgccaacgcctcctccggcagctccggggctgtcgttcccgtgaccattgctcaggctcagtatgaagtctgtagggacaatgacgcatttatcttgtccggcacgcagtacgcacttgaataccaggatggtgatcaccccttaaacaccagttacaggaatgatggcgaggttatcgggcatgtcatatcagcctggttgcacacgggtaatgtcatttctctacaaccggatacaaacaatatcactcaaaccagtactgaaatcattgtcccactctctggcggtgtttctgtacctgttattgatacggagcgagtcactgatccaggcaatctggggtggaatcttgaaggggatgccgtcattacggaggttaatctgtctggtaattcggttcgaataaaaaaaacgggaacggcaagcgccgtcagctatgcctatcgggggctaaaaggtgttaaaccggggcgtttgacgggttccagaggctgcatacatgacagtcagacggatatatctactgtaactaaccaacacatttacaatgacttagtggttttccgctacgtattttag

SEQ ID NO: 196292 - DNA, 885 bp, Klebsiella oxytoca
atgagtaatttctcattctcagatactgaccaggctttatggttatatcactttgacagcgccggtgtttatatcggtagcgggctggcgcttatccctgccgggacagggttacccgctaaaacaacgatagctccctgtcagccatcagatggatttacaggcgtctgggatggcaatgcatggaattatgttgaagataaacgtgggatgcgttactggaatcaatatgggaaaggctctgtaattgtctcaataaacgaggctccacctgaaggcgctatttttattgaaccgccacagaaagaagaaggatacgttcttctttttgaagacgatgtttggttaaaaattaaagacctgacaggtcaaaaatattacaccgggcttggggatgaaaatgtcatcccttcaccttattttgtccttcctgaaggtgctacgttggtttcccctcctgaatgtaaagcgggtttcgccactgtctggggtgaagaacgctggagttatgttgaagattttcggggtaaaaccgcctacagaaaagacagcggaactcctgtcattgtcattgatgttgggccgttatcagacgatctaacttttttagctcccgtaaccaaattcgacgaatgggatggtgagcaatgggtgacgaatacggcaaatttaaaacaatcgttgattgccagtgcagaacaatacaggcgaaatttgcgcaatgaggctgatgaggaaatagcagtactttccagcgcggttaaatatggccttgccactgataccgaaaaagaaacactgcaaaagtgggaaatctatcgcattgaactgatgcgagttgatacgtctttggctccggatatcacctggcctgctaaaccctga

SEQ ID NO: 196293 - DNA, 1587 bp, Klebsiella oxytoca
atggccggaccattgtcatcgcaggaacagttacgtaatcagtccgccagcgccattctggcgggcgagttcgacgcggatcaggtgctgctgccgtatcagcgccggtggattgcggacacgtcccagctcaagattgccgagaaatcccgtcgtaccggcctgacgtgggcggaagccgccgaggcggcgctcagcgggtcaatgtcaccggaagccgggggaaccgacaccttctatgtcggcaccaccaaagacatggcgcgtgagtttatcgacgcctgcgccatgtgggcgaaggcgtacaatcttgcggcctcagcgattggcgaggaagcgctggaggatgacaacaaggacatactggtttacgtcatcaactttgccagcggcttcaaaatcaaggcgctgtcgtccaacccctcaaacctgcgcggtatgcagggtaacgtcatcatcgatgaagcagcattccagaaagacctcgctgccgtactgaaagcggcgctggcgctgaccatgtggggctctaaggtccgcttgatctccacccataacggcattgaaaacctgttcaataccatcatcaccgacagccgtgcgggcaaaaaacggtactccgttcaccgtattgatattgagctggccatcagcgaggggttgtatcgtcgtatctgccaggtgacgaaaaagccgtggtcaccagatgccgaagcggagtggctggcgaatctgctgagcgataccgccactgaagaagacgcccgcgaggaatactattgcgagccgaagaacggcggcggcacctatctggcccgctccatccgcgagcgtgccgcgcggggcttcggtcccgttctgcgtttcaccggcacggcagaattcaatgccatgccggaaatcatccgcgcactggatatgcaggagtggctggataaggtggtgctgcctgtgctgaacacgctcccgcagaacctccgccactgtctcggcgaggacttcgcgcggtcgggtcacctgacggtctttgcgccgatgaccgtcaacgacgacaccacgcgtaccgtaccgttccttgtcgagttggccaacgttccctacaagcagcaggagcaggcgctgttctttatctgcgacaggctaccgcgccgcgacggtatcaagttggatggacgggggaacggtaactatcttgccgaacaggcggcggagaagtacggcgcagaggtggaggtggtcatgccttccgtcgcccactaccgcgagaacatgccgcgcttcaaggctgcgttcgaagacgatgagctggtcctgccgaagcatgaagatgtcatcagcgacctcgggcagattgtcgttcagcgcggggtgcctggaattgatgaccgggagaataccggcagcgatggccacaagcgtcacggcgacagcgcgtatgcgatcttccttgcctttctcgccagcaaagaagactgccagcgctatgagctgcatcggcttaacaaatcccaacagcagcgcaatagcgacagtcgccgccagttgcgcatcacacgtggccttaaaaatcagcgaggactgctttga

SEQ ID NO: 196294 - DNA, 642 bp, Klebsiella oxytoca
ttgacgggcatcccagcgggcaatatccatgcgcacccggtcatgcacgtcggcctgagatcgcgagctgccgtcgtcggtggtcatggtctgccccagtacggccttactggtctgggcgtcgcaccattccgccatttccttgaacaatgcgccgccaccgttgcggctggcagtttcctgcatctccagctgcatactttgcgggatggcgcagcctgcatccgatgcaatagaggcgatcgcatcgatgagggtcctaatctgctcatcggaggcattattcccgtacttaccgacgacgatgggtatgccaaacttctcggcaaacgcccaccagtcacggacggtaaaggacttgagcatatacatcaccgcgaccagacgggccagaccattacgcagcggcaaaccagacttcaggcggggataatgcatcacatattttcccggcgtcagggggataccgtctactggctgctcgtccgtcagcagacggaactcacgaagtgtgtcgctatcgggtttcaggaaccgcgggtcaacccactcataatcacgcggcatccagccatcacgggtactccacagaatttcgcagaccccaacacctttaccgaggccatcaagcagatcaaataa

SEQ ID NO: 196295 - DNA, 1083 bp, Klebsiella oxytoca
gtgaaaccagtaacgctatacgatgtcgcagagtatgccggtgtctcttatcagaccgtttcccgcgtggtgaaccaggccagccacgtctctgcgaaaacgcgggaaaaggtggaagcggcgatggcgcagctgaactacattcccaaccgcgtggcacaacaactggcgggcaaacagtcgttgctgattggcgttgctacctccagtctggccctgcacgcgccgtcgcaaattgtcgcggcgattaaatctcgcgccgatcaactgggtgccagcgtggtggtgtcgatggtagaacgaagcagcgtcgaagcctgtaaagcggcggtacataaccttctcgcgcaacgcgtcagtggtctgatcattaactatccgctggatgacgaggatgccattgctgtggaagctgcctgcgctaatgttccggccctatttcttgatgtctctgaccagactcccatcaacagtattattttttcccatgaagacggtacgcgactgggcgtggagcatctgatcgcattgggtcaccagcaaatcgcgttgttagccggtccattaagttctgtctcggcgcgtctgcgtctggcggactggcataaatatctcacacgcaatcaaattcatccgatagcggaacgggaaggcgactggagtgccatgtccggttttcaacaaactatgcaaatgctgaatgagggcatcgttcccactgcgatgctggttgccaacgatcagatggcgctgggcgcaatgcgcgctattaccgagtccgggctgcgcgttggtgcggatatctcggtagtgggatacgacgataccgaagacagctcgtgttatatcccgccgttaaccaccatcaaacaggattttcgcctgctggggaaaactagcgtggaccgcttgctgaaactctctcagggccaggcggtgaagagcaatcagctgttgcccgtctcactggtgaaaagaaaaaccaccctaccgcccaatacgcaaaccacctctccccgcacgttggcagattccttaatgcagctggcacgacaagtttcccgacttgaaagcgggcagtga

SEQ ID NO: 196296 - DNA, 468 bp, Klebsiella oxytoca; identical to SEQ ID NO: 190410

SEQ ID NO: 196297 - DNA, 477 bp, Klebsiella oxytoca
atgacaattcttgagcgactatatgccagcagcggatcggaggttattcacgatacgttgcagatatcggcaggcgatgataactactggctaaccagtggctgggatgacgtttccgtgatgctggaaaatggtcagccggcgacgtttgaagccagcgcgatagatatcgctttaccagccaggaacgctgacgggacacaggatttaaagtttgctatcagcaatattgacggaagggtttctgaggcgatcgataaaatcctggatgaaatgaaatcagctacgctgacatttcggcggtacatttcatccgatctgtcttccccggcatcatcaccgtatacgctcgatatcaaatccggctcatggaccccgacagcagtacaggtcacggcgggctatatgaatatcctcaaaacagcctggccccgtaaacgttacaacctcgcagagcatcctggcttacgttactaa

SEQ ID NO: 196298 - DNA, 381 bp, Klebsiella oxytoca
atgtttaatcctgataaataccgttctgttaaatggcagaagggcggtagagcctacccgctactcgactgcttcggcattgtaaatgagatacgtcgcgaccttgggctacctgaatggccggattttgcaggtgtgaccaaagacggcgggggcctcgaccgggaagcgagaaagctgatgctttcgctgaaacgttgtgccccgtgtgaaggcgccggagttgcttgctattcgggttcaacggtttcccatgttgggattgttgtgatgctcgataaccagctgcaggtcgcggaatgtaatccaggctcgggggttacgtttctgccactggcgcgattcatccgtcgctttaaccgcgtggagttctggcaatga

SEQ ID NO: 196299 - DNA, 618 bp, Klebsiella oxytoca
atgaatactgcaaataccatcccggacggttaccggattaacgctcagggtcatttagttcctgagtcacagattaaaccgctggataagctgcgtgatgagctggttatcagcgttgttgaagctggccgtctgcagcgtcagtcgctggtcgagttcaagcttggatctatggcaaaagtcgatgattttgttgacctgtcagcagcagagtttggcgtcgaatatggcggcgctaagggtaacgtcacgttacccagttttgatggccgctataagttggttcgtgccgtgggcgagcatcgtatctttgatgaacgcatccaggcggcaaaaaagctgattgatgactgcattcatgaatggtctgccggggctgacgaaaagattatggcgatggtcgatcatgcctttcgcgtcaacaaacagggtcggattgatatcaatcaggtgctcagcctgcgttcactgaatattgacgatgccaaatggaatgaagcaatggacgctgtggccgatgctattcaggtcacaggaaccagtcagtacctgcgtttatatgagcgtcaggataatggcacttataagcagatatcgctggatttagccaaactctga

SEQ ID NO: 196300 - DNA, 498 bp, Klebsiella oxytoca
atgaatccgaaaacaaaaggtatttttgaggctgcattcgccaaatggggatttgaatctcaggtgctggttctttccgaagaagccagcgaattatcagctgcctgctcgcgttttcttaaccacaaaaccgacagcagcaaagtggctgaagaagcggcggatgtcgagatcatgattgagcaactgcgtcataacgggatgggcccgatgattgaccatgaaaagaaccgcaagatggcgcgtctggctcaggtcgttggtgttgagtcacaacctgtcagcccctttggtccgtccgttatggggctgctggaggaggccagcgagcagctgggtcttgccgaaacgctctaccgcgacaccaaaaccagcaatcgctatgccgccgcccgcgcccgtatggccgtcagtctgctgatgcaggctgctcagaagatgatgcgcgagcagcagtatgccgaacgtatgcgggcggaggttaaagctcatgattaa

SEQ ID NO: 196301 - DNA, 474 bp, Klebsiella oxytoca
atggcagatattttctacccggatgaatacctgcccatgccgcttatggacgggtacgggtttaagcccatatcacctttactgcgaacggagatgacgtccggtcgcgctcaacaacgaaggcgatatacctcaacacccacccaggcatcggttaaatggatttttaaaactgatgctctggcgcaggtgtttgaggcgtttttcagggatgcgcttaaagatggccagtcctggttctatctgaaacttcagactcccatcggggtaaagccctataaagccaggttcgtggatatttacgaagggccgacgctggtcgcgccaaaatactggcagtacagcgcaacgctggaattatgggaacgcccgttaccgccttcaggctggggaaattacccggaatggctggcgggccagtcgttactggatatcgcgctaaacagagagtggccgaagcatgacaattcttga

SEQ ID NO: 196302 - DNA, 1638 bp, Klebsiella oxytoca
atgatgactggtaagtattccgaagttaaccgtttacttggattggggaatcagcttttaatggaaaggcaagggctggttaacgtgccaatgcgaatgcctcaggctgatttaacatcacagcaagccaatgctctggaaaaaagccgtcaggaccttgaactatcaaagcttaaaggagaagcaagggagagagcccggttaggttatgccgctgacgaattagggctcaaggatgaacctcagtttaaaactaaccgcgatctgtatattaatcaggggttggcgaaatggcaaaacgatgaatccaataaacccacccggaaagcgccaaaaagcgaagaggttaaagcagctgaaaagacagaagacgtttacaagcgccttattaaacagcagcaggaacaaattgccctgggaagccagaataccgaactggctaaaatgaaatatcaggtgacgcagggggagctagcctctcttgagcaagccaaaaaagaaataatcctgcaaaatgctgcactaatcgatcagaaaaacattgctgaacagttgcaaacgttccgtgatgggctggctgacagtaatgccgctgcgcgtgaccgggggaatatagattttcttggcgccgggatgggagataaagcccgcgaccgcatgaaggaaatggcggatattcgcactgacttccgtaagcagcaggatgagcttcagcgtgactttaacaagaagcaaatttctgaagaccagtacaaacagcaaacggaagcgctgcaggcggcgcttgctgaacggttagcgattcaggaggactactacaaaaagaccgatgaacagcagtcagactggcgcacggggatcagcgattccctgatgaattatgccaatcaggcttctgatctgagctcaatggctgccactgcaaccagcgagattctggatgccaccactaactctatctccaacaacctgacaaacgtcctgacaggcgctgcttcgtttaaagatgggatgtcgaatattttttcttccctgggcgaaacggtgattaagacgctgatccagatggcaacacaggcgttgatcactaaagcgattatggcgtcatttggcggcggagcgggtgggttgttcggtagtctttttggcggtgccagcggtgcggcaagtagtggtaccgctattcaaagcgcgggagctaatttttcatttaacgctctcggaggcgtttacgattctccgtcactttctgcctacagcaatggtgtttacagcactccccaatattttgcgtttgcgaaaggtgcgggtgtattcggcgaggccgggccggaagccatcatgccgcttacccgtggtgctgatggttcgctgggggttcgtgctgtaggtcgtgagtcccctgcggtacagaacgcagcaagtcagattcaggcgcagccacggatagctgttagcgtggacgcacgaagcacgttcaccggcaaaccggatgacataacgatgcaggccgttgagcgaagaaataatgctcttgaacagcggattattaactctctaaccgccgagatagataacccacagaagaaattcggtcgggctatttattcaaatctccaatccaaaaaaccaagatag

SEQ ID NO: 196303 - DNA, 255 bp, Klebsiella oxytoca
gtgcatttactgagttccattgatctgcaatctgaaccagttttcctgttgcaaatgctgcagctgcagctgtggcagcccgacccgctgaagcaaatccatccgttaaatcggaaagagctttttggctttctttcgcagcggcagcagcctggcgcccaccattctgcatggttttataatagtcttgccccatgcgtgaagctcgggcgatctcagtctggaatgattgagagtttgctgaaacctttatga

SEQ ID NO: 196304 - DNA, 522 bp, Klebsiella oxytoca
atgaaaaaaatattgggcgttttatctttagtagtttttgctatagcatttattattgcgttaaggcaaccaatatcaattgtgtttctttttgctgttttggttattcctttaaaatatatagataagattggcggggaaattgcttctcttttgataattctcggttctgtttttgtcttgttttttgttaactcaatggtccctttgtggggggagaggtatgagaaccatgaggagctaatgagaattagcgagaacgataggcagaaaagatacaacaacatgaatgttatatcagcaagcaaccctagtgttaaggctgaattaaaagaccccgaatctgcaaccttcaaaaaccagatcattggtcgtgacggatatgtatgcggacaagtaaatgctaaaaacagctttggtgcatatgctgggtttaaaaggtatgtaagtaaaagtggaataaccattattgatgatggtggaactgaattttctaaactatggggcgagatttgtagttga

SEQ ID NO: 196305 - DNA, 276 bp, Klebsiella oxytoca
gtggcttctgtttctatcagctgtccctcctgttcagctactgacggggtggtgcgtaacggcaaaagcactgccggacatcagcgctatctctgctctcactgccgtaaaacatggcagctacagttcacttacaccgcttctcaacccggtacgcaccagaaaatcattgatatggccatgaatggcgttggatgtcgcgccagtgcacgcattatgggcgttggcctcaacacgattttacgtcacttaaaaaactcagaccgcagtcggtaa

SEQ ID NO: 196306 - DNA, 276 bp, Klebsiella oxytoca; identical to SEQ ID NO: 101078

SEQ ID NO: 196307 - DNA, 1023 bp, Klebsiella oxytoca; identical to SEQ ID NO: 78996

SEQ ID NO: 196308 - DNA, 1005 bp, Klebsiella oxytoca; identical to SEQ ID NO: 53712

SEQ ID NO: 196309 - DNA, 1008 bp, Klebsiella oxytoca
atgaacaccagccaaacgatcctgaccggcgaccgtcctaccggccagctgcacctcggccactacgtcggttccctgcgccagcgcgtgctgctccagcacgaccaccagcagtttatcctcgtcgcggacctgcagggcctgaccgacaacggcagcaacccgcaaaaaatcagcagcaatatccttgaggtgatggccgattatctcgccgtcggcatcgatccgcagaagaccaccatttgcctgcaatccgccctgccggcgctggccgaactcagcgcgctgtatatgaatatcgtcaccgtcgcccgggttgaacgcaatccgacggtgaaaaatgaaatcgcccagaagggattttcccgctcgctgccggtgggatttttagcctatcccattagccaggccgccgatatcaccgcctttaaggccgaactggtgccggtcggcgacgatcagctaccgatgattgaacagaccaatgagatcgtgcacaaaatgaatagcctgaccacgacgccgatcttacagcactgcaaagcgctgctcagcgacgtcagccgcctgccgggcatcgatggcaatgccaaaatgtcgaaatcgctggggaacaccctcaccctttcggccagtgaagaggagatccatcgtgcggtcagcgccatgtataccgacccaaatcacctgcgggtcgccgacccgggtcagacagaaggcaacgtggtcttcacttatctcgacgcctttcatgctgataagaccttcgttgccgagatgaaagcccattatcggcgcggagggctgggagacaggcagtgcaaaaacgcgctggagacctgcttacaggagctgctggcgccgatacgcgaacgccgggcgacctatattcaggataaaggcatgctgctggcgctgctgcgccggggaagcgagcgggcgcacgaactgacgcaacggacgctgcatgaagtaaaacgcggcctggggctaccggtgctgttttga

SEQ ID NO: 196310 - DNA, 273 bp, Klebsiella oxytoca
atgataattataatccccctgatttttatcaaaaatatttactgcctctattatatcagcaacggattgctcctggaaaaatattcctgttggtttttcaactccaagcgaacgaacagtttccagtgccccgcctttaccatatgcaataacaggagtcccgcaagcttgagcttctaccggaataattccaaaatcctcttctgcggcaaaaacaaaggctttagcattctgcatatattcctgcataacactatcaggttgatatcctaa

SEQ ID NO: 196311 - DNA, 576 bp, Klebsiella oxytoca
atgattaatttagagcagattaaagctgatattgcggcccgtaaggcgatgccagcatggggggcccatacttccattgagcgcatcaggactattaatgccacgcttcccagcttttcgctgaaaacggtcgaggcgctggtagatatgctggagaaaacccagcgagttaatgcagctcaggacgatcatataaaccagcaacagaacagaatcgaccaactggaaagtaaaagtgccgagttggggcggagactgtaccagtattcgatggtgccggattactttgcatcattggtagctaaggccagagtcagagcggataaggctatgtgtaagttccctcaacctaactacgtgctgaacaaggttgcggaggaaagcggcgaggtcataaaggccgtaatccactacaccgaaggccgcgagcaatggtcgaacgttgaatcagaaattattgacaacctggcgatgctactccgtctggtgaaagagggagatcaggtgatgggttttaccccgcctgactcctgcaacgtcgtcgcgctcccagcctctcaacaggagggcctatga

SEQ ID NO: 196312 - DNA, 219 bp, Klebsiella oxytoca
atgggtaaaggctgggattcatcgttacgtgcggggcggcgcgatcgcctccgtcaggaagtgcttcaccgggttgccggtggccctccacccgttccacgcgattacaaaggctgcgacggcactcatgccagttattaccgcaggggctgggactccgtcgatacacgagacatcgtctggcagtgccagcgatataaggaaaagcataatgtttaa

SEQ ID NO: 196313 - DNA, 339 bp, Klebsiella oxytoca
gtgggctacagcgaggcggaagcacatcacgacgggatcgagaccgacagtcgcctgctaacactggataacgtgccgcgtgcgcttgccaacttcgacacacgcggcttcatcaagctggtcatcgaggaaggtagcggacggctcatcggcgtgcaagcggtggccccggaagcgggtgaactgatccagacggcggtgctcgccattcgcaaccgtatgaccgtgcaggaactggccgaccaattgttcccctacctgaccatggtcgaagggctgaagctcgcggcgcagaccttcagcaaggacgtgaagcagctttcgtgctgcgccggatga

SEQ ID NO: 196314 - DNA, 456 bp, Klebsiella oxytoca; identical to SEQ ID NO: 25798

SEQ ID NO: 196315 - DNA, 288 bp, Klebsiella oxytoca
atgcgtgacattctcgaccaggaccagcgactggttattctgcgatcccttgtcgaatgcggcgacagtgccaacgagtcgattttgcagacctgcctgcagacgtatggccatcgcgtttcccgcgatacggtgcgcacgcatctggcgtggctgcgtgagcagggtctggtcagtctgacggatgtttccggctgttatgtggctgaaatcaccggtcgcggtgatgacgtcgccagcggtctcgccacagttccgggggtgaaaagaccccgttcgagggggtaa

SEQ ID NO: 196316 - DNA, 252 bp, Klebsiella oxytoca
atgtctgccgtgaacgtcattcagctcctgctggccaaaacctacgtcaaacgtgaggagctggagctgatgcgtacccgactgcagagcattgagaacactatcgcggggctacccagtcagaaagacctgcaccagctgcagctggaaatgagtaatttgcggggtgacctccgcgaactgggcccggcgattcgccaggtgaaacatgtcagcgatctgcttctggaaaatgagctgaaggaaaaataa

SEQ ID NO: 196317 - DNA, 210 bp, Klebsiella oxytoca
atggccagcgaggcgctgaaagactgggagctgaccggcgatgcgttcaccagtccggtgctgcagctggcgaaagacgcaggtagttttgaagaatttctggcacgtctgccggacctgcagaagacgctggagccagccgcgttcgtcgagcagctggcgatgttgagctttaaggcgcggacgctgggagatgcgaacgatggctaa

SEQ ID NO: 196318 - DNA, 231 bp, Klebsiella oxytoca
atgaccaaagcgtttgatcgcgccagcgaccttgaaatggaagaacgggaacaggccttaaaccggcatttaaaccgcgttaaagagctgccggatgagcacggaatctgtaacgactgcggcgcggcgattccggcagctcggcttcgggcgctgccgcatgtggcgacctgtatcagctgtcagtccatcagagaacacagggggaagcatgccgtgggaaataattaa

SEQ ID NO: 196319 - DNA, 1275 bp, Klebsiella oxytoca
atgaaattattgcttgttggtaatcatacatgtggaaatcgtggggatggtgctattttacgcggtttggttgataatcttcgtaagattgaacctaatatagaacttgatattataagtagatatgctataagctcttcttttcttttggatgaacagatatatcctgatacactgcatgttgcaaaaacgaaattaaataaaaccaacctcttgggaaagattaaaaacaaaattaatacatttttgcttcccagagttcttttagcacatgctaaacagaagggttttttttataagttttctttgccgatttatatttgcgattttatttcagatttaaaacagtatgatgctgtaattcaggtaggcggttctttttttgttgatctctatggtactgcacaatttgagcatgtgttatgttcattgatagctaaaaaagatatatacttaataggccatagcgtaggccctttcgagaatgaattttttaaacatgtggctacttatgcgttttccaatgtcaacaaactggtattgcgtgaagaggtaagcctcgatttaatgaaatcggctggtttaccaataaataaagtcatgatgggtgttgatactgcatttttagttgatgataagaaaatacaaaataagaattatgtattagaacactggctaaatattataaaccgtaaacctactatagccattactgttcgtcgcctcgcgcctttcgataaacgtcttggagtatctcaggaagcatatgaaactgcaatagcttctgtagttgatcagtatataagtaaggggtatcagatcgtagcattttcaacatgtactggtattgaaagctacaataatgacgatcgtatgattgcttattcagtgagtaagagattgaaagctcctgcttctgattttcacattgtcatggatgaaattaatgatcttcaacttggttacttattaagagaatgtaagttgactataggaacaagattgcattctgcaattatttctatcaattttggaactcctgctattgccataaactatgagcataaatctttaggcgtaatgagaggacttgatatggatcaattatcagcgagtttaactgaattgctgaatggaaaaattatgaataaagttgattacatcctcgataatcactccgaactaaatcattctcttaaagataaggttgatgctacacgtagtatcggttttgagatttcaaaaaatattttaggtgaaataggcagaaaatga

SEQ ID NO: 196320 - DNA, 1224 bp, Klebsiella oxytoca
atgaagatttcttttttttgtatcaaattccctatagcgtctgaaacttttgttcttaaccaagttatttcattcatgaagatgggatttgatgtaaatattatttccctataccctggggatatggataaaattcatgaagatttcaaagaatttcaagtgcataaaaaagtgacttatatattcgaaagcgataatagtggtggtaaaatttgtactttattacagagatctttcttatcattaaaatgcttggccaaggggaatttcgctgctttttattttcctagatttaagtcatttagtaaaaacctcttattaccttcattagctgggaagattaaaaagagatttgaggcagatgtttttattgctcactttgggccaagtggtgtattagcaaattatttaagaaatattgggtgtttaaaaggtaagcttgttacagtatttcatggtaatgatctttctgcaaaagagcttttgataaaatataagcatgggtatcaggatttgttttccgaaggagattatttcttacccataagtaacttatggagaaataagttaattgaattaggttgctcttccgaaaaaatctcagtaattcgtatgggtataaaggttgacgatttcccctttgaaatgagaacagttaataactcaatgttgaagatagtatctgtctgtagaatgacagaaaagaaaggtttagcctactcaatcaacgcttgtaaattattaaaagctcaaggggtaaaattcgactataaaattgtgggctatggggaactaacacaagaactccaaaggcttatcattcagtctgggcttgaaaaacatgtccaaatagttggatttcaaccgcaggtcgaagtaaaaaaaattttacgccacagtaatgtttttcttttgccttctgttactgcagcaaatggagatatggaaggtattcctgttgctttgatggaggctatggcgtctggattgcctgttgtttctacttttcatagtggtatccctgagctaataacagatggtaagtctggctggctttgttctgaaagagactcggaaggtatagcattagccctatgtaaaataattaatgaaaaaaataacgtctctaatattgtggttgctgcacgtaaacagattgaagataactttaatcaaaaagctgaatatggaaaaatggcctccttgttggagagtctaaaatga

SEQ ID NO: 196321 - DNA, 1326 bp, Klebsiella oxytoca
atgagtgggattaaagggcaagccagctggttgttattttctaatggcttcgcagcaattttacaaattattcaaattagtattttagcgcataagcttgcacttgatgagttaggcctgttagcaattgttaatacggttttaatgatagctatgatcctgcaagatatgggtatgagtagttatattgtccataaacaaaatcttaccagacgccagcaaagtactatttattggattaatctttcattaagtttaattgctggtttaattgtttttgcatcttcctggccgctagctaagttttatcatatgaataagcttgaacctttgattatgctagcaagtatcaactttttgttcttaggttcattatcgcaatatcaggcgcattatataaaagccaaacaaatgatcttgctttccaagattgaaatggctgctaagtttttttcttttctatgcgtcattggtatgctttactttactgatttacgcacctcagcggtaattttgggcttgattataaatgcttttttgcgtttgctaatgatgtcgttgttgggggagcggtcatggaatcccactctggcttttgaaaaaaacatatttagtgatgtatttagatatggcatatatcagcttggttcacaaattataaatcagcttcgtactcagttagatatcattattattggtaaagtccttggtggagaatcattagggttatactcgcttgcaaaagacctgattatgcagcctttaaagcttgtgactccagtgattaatcgacttgcgttaccaagattttctgaggtacaaaataatagtgctaatctaggtgcagtattccttaaggggacgtggattattgcattgtttagctcttttatgtttatatgtatctatattttttcaccagttattgtaacaatactttacggtagtaatcgtttatccataattgaaatacttcctttcatgattctttttgggatgttaaggccgatggggggacttactggggctattgcacaggcaaacggaaagacgcatatagagttttattggaatattattgctggaattgcagtgctttgtatatctgcgactatatttatgaactcttcattatggtatgtctctttagttctttctatgtctcaaatattgattactctacttgtgttccctttctttattaaaccaatagtcaacgtcagttttttttcttactcaaggcaatgggtgccaataacatttttatttatcgtttgtatatttttaatacataattttagtatttttgctaagccattttggtaa

SEQ ID NO: 196322 - DNA, 1965 bp, Klebsiella oxytoca
atgagtgtcaacaacgcggttaggtatcgtagtgatattgatggcttgagagcggtggcaatattgcttgttgttttgtttcattctggtataaaattctttagtggggggttcataggtgtagatgttttttttgttatatctggatttttgattggtggcataataaataaagaagtgactgggaaatattttagttactctaatttttatacaagaaggattaaaagaattgcaccggcattagtcgtaatgttgtttctttgctctatgttctcctattatttcttatcaccaggggaattaaaagacttttcaaagtatgccatcgcaacattgctgtctgtcccaaacattgctttgtggcaaggagtcgattatttttcttcaagctctgagttaaaccctcttttaatgacttggtcgcttggtgttgaagagcagttttatatttttctacctatattatttacgttttgttttgcaaaacaacttgacctattcaaagcaactttatttatgacaatattgtcatttatattatgtgtcgttataacttatatcaaacccctcccttctttttatcttttaccgacaagagcttgggaaatgggggttggtgttttgctatcattgaaataccacaggattgcattttcacgcttggtccgacagcataatggtttattatttgcaattggagccgcttgcattatattaccggcagtgctatttgatgactctactgttttccctggttacaaagctgcatttccagtctttggagcttcattaataatattgtctgaagggagagtcagtaacgtttttttaagcaacagggtcatggtttttattggtttaatttcatactcttggtatctgtggcattggccacttctgagtttttcaaggattgcatataatgaaccgttacctgcacctaaaggcattttaatctcacttgtatcattagctatcgcttatttttcatataaattcgtagagctaccattccgaaaaagagatttctttacgaataaaaaagttataacaggttatttgttgactgttgtgataatgtcagcacctttgcttgcatccttcgcaactggcgggttgccatccagagtgaatgaggctgtacttgcagctgaacataacagagcccatagtatttcggatcgttgtctggtcgctgatactgataaacttcccaatttccctgaatgcattcctactggaaataatgatgctgtagtgcttttaggtgacagtcacgctgcagcgttgagaggtggggtagagcattatgctaatcttaacggtttatcagtatatcagttaacaaaatcttcatgccctaatattattggcacgccaagatatttaggaagaaatccggaacatgctactctatgtaataattttaataaaaacgcaattgattatataaaaagtaaagataacataaaaatagtaataatgtcagctttttgggatgctggaatcgacactaaagaaccacaatttggttatcatctgatttctggtgaaagaactgatgataatttgactgcattaaagttgggcctcgttgacacaataaaaactttgaaagaaaacggtaaaaagataattttggtaaaggatgtgccaagatttaaatttgatgtagttaaggaggttgttaataataatatggcatttagacgtatcttgggtaatatattaatcgctaaccatgatttaaatggttactccagtagatatgagacacaaatagggaaggtggatattttactcgataatatgttgtctgagggcataaaaattgtagatcctcaaagtagtttgtgtaaaggatttgaatgtgaatatatgaagaatgaaaatgcgctctattatgataggcagcatctaaatgaatttggagctgtcgaggcattaagaaatatttattaa

SEQ ID NO: 196323 - DNA, 1530 bp, Klebsiella oxytoca
atggagcgcagagattttgctaaacggctcgcgctgatcatcggtgccggagcagcaggtgccgcatcagcaagagcatcagcaactgaagaaaggagccaattgcagcaactttatacgccacaacaactacatgatactgtcaatatcctaaaatttggtacgcaagaaaatgccagtgaggctttttataacgccttcctctatctgaacaaacgaggtggtggtaacttacttgtcccaaatggaaactattcttttgataagccagtaaaaatgaggataggttgcaagatatctgtatatacttcatcgaactcaattatgacaatgaaggccgatggggatatgttcaacataactggctcagaaaatgcggcgctaaggttttttggtaatggtgaatttatttatgatgggcctgagacaaatagcgctgcttgcatcagattcgtctctctgacaaatggaaaaaaatacgcgactagttcctttgaatgtaacggtaggattaggatcagaaaaagtagtaatgagtgggcatatggaattcatcttaccgatgttcgcgatgctgtgttggtcaatatccagttcgacggccttaatcaaaagggcaggcccagttcgcaaatcggagtgtttgcccaagctagaagtgctgcatccgtatcatgggttatcagcgacttgcagtttaatgatttgaaaaccggctttcacgttgagtcagattccgttcctggtgttgagggactcaagttttttaactgtgatatggctggggtaggtaatggaatagtttttaataataactctagttatcaccctccacaaatcgagcttatcggatgtcatataaatggacacgacacactggtgtcgatcaagaaggctatcagcatccatattattggagggctttattaccggaacggggcagaaggagccttctttaatttcgacggggtgcaagatgtatctatagtcgggccaagtttttctgtcactgggaagcaaacagatattcctgcgatcattatagatggtagagatgaagagtctgggctcttcagaatttcagattgccacttctgggcccatgggaggaacagcccgttcattgaacttaaagggatggtttcgagtataactctttcaaactcaaccaaagactcctcgggaaaatggattgaaaccagagaaatgaaaacgccaaaatcatctatcacagtttgtagcaacacaataaaactgtctcagccagacaaaggtgatacttgggggattgacctaaaaaacaacaagggagttattgacctatctccagttcctccaggtattatattcattgatgatggcgaaattaaaaaagtaactggcggacgggttggctgtgagtatattcttgtctgcaattcaacgataagccttgtgcaaggtgtaaatgttaaaaatggctcagcggttcaacgccaagccaaagtaattagtctcattaatatgggtgacttctatatagctaagtaa

SEQ ID NO: 196324 - DNA, 1227 bp, Klebsiella oxytoca
atgaaaaaaatatcaattgatagcacccatgattttgtccttaaagcatttatatctatctgcgttatattaccaacaggcagtgtatttggcataaatataaaattcatttttctgtttcttgttctagctttatcgatagttgcaagaaagggaagaggtattgtcaagctaatgttaggcatgctacctgccatttttgttatggctgtgtttttacttataacgatgctcaatgttaggtatataccagaaactgtcgatcagtctaaggatattttggtgtttttcctaatggcggcgatttcttattctttagtagataaagatagacgctatgaagttataacaaaaacaatcataaattgccttgttgctatagggattattaagtttctcatatttgcttttgccgccgtaactggtggcagtgttgcaagcgttgtatcaatgatatccaaactattcaatacatcattgatgacgatggaatcagaagatgtatcaattagtcggataaatttcatgtctgactatatacttccaatggctatcttcatcaaaacaaaacaatatttaaggaaggattcacctcgctttagctcggttataatacttattttaatgtactcaattataattagcctatctcgattcctttgggctgcaggtttattaagccttgctatgggcatcgcatcagacattaagaaaaagaaaagcctgttaataatttctttcgcagcaataatgattactattattatttccctaccatccgtgcaggaggttattgaatttagaatggcgtcgaaaggggttgagcgttctgatgatttgcgcacgctgcaattcaatgcaatataccgcgaattcgaaaaggctccattactaggaaatggtgttggttattatgtaccaacactactaaggagtactatttcgcggtattcttatgaattgcaaatacaggctttgtatatgcaaatgggaatatttggtgcaacaacaatattattattgattataggaacgttgctaacacaggtgcgcggctttggagccaagaatacaatattctacttcgttcttatatcgctatggatggcaggtggcttcttcaaccctgtaatactttcatctactggtggggttgcatttatgttgcttttttgcacgcctgatgcaattaagagaatggataataaggggagagttctcccctag

SEQ ID NO: 196325 - DNA, 1188 bp, Klebsiella oxytoca
atggctggtgataatgaaaaattgaatgatagttgtcctgcatgcggtagtaagattgattctgatgagttatgtacctgtggatatgatcctagcttggaactgcaagagggaacttatgtgcctcagtttgcattaactgcaacgttggacaaagtaccaggagatacgggacctatttttaaagagtcattgggggaagtttggactcttgacactgacgatgttcaacttttcattaaacaaattgagaaaaaattcaaacttaaaagaaaacttcatggtgttgtaaatgaaaatggcatgccattaagtactcctaattcattaaaaaaatatttaaaccaagatattgaatttaaatattttgttcagttaataatggataggatgagaagtgaggcaaataacgataaatcaagactttctggaggcgcgatagtcttcattcattataatgtagataatgataaagaaagctgtggtcgtctttttatcataatggtggatagaaaaggtgtgtttaatttcgataaagatctcataccagaaaaactgccatcaatagatatagattcactaagacaagctgttcttgtcgatttgaccttgtttaaggctagctatccagaaaataatggtgatccatatttgcattttatatctggtcgttctagtagtgaattttttaagcgtgcattaggttgtaatcctaaaattgataataatagaagtattgttgaaacaaatagggctgttgatgattttattaaatcaatgaatttaaaacatatcgatagagttaaagtaaagcaggcagtagaaactttaatgaaatcaaaagcaaaagaccctaacgatcgaaagataacagttgaaaatataggaagatgtatagaaaagacccttcctgagaatgaaggaataaaagcgaagtttgtacaattcgttgatgtaaatgaatacagtattgatgatttttttgaacctagtcgattctctggtaatagctttggcgaaataaaaatctctgatgcggaacaggaatacgaatgtaaaatatctattgatgctattagtgaagacaattcatcaaatgctaaagttatatatgatagggttaatggtcatttgataattcgtttatcacgtaatggtgtaaccgaaatagaaaaaatagtcggttaa

SEQ ID NO: 196326 - DNA, 1161 bp, Klebsiella oxytoca
atgagcgatatgagtaatttcgatatattgacaaatgctattttatcagcaaaagtagacgtcgataacggttatatatcgcttaattttggaggtaatacagacatatgtgttatctccaacttgttaaaagtctacggtttagtcgtagagcctggaatcgaaaataatgaaattgtttttccgctatcatccagttcattcagagatgattcaaaaatatatagttcattggatacttttctgaggaaatgtatatcattaggacgtgttccacaggactatattatattaggtgaaaaaatatcttctttatcttttgatgataaaattggtagtatcgatatttacttgaaatggatttcagtgttatcaagtgttgcaaatcatcatgtctctaaaaaatatattctttacattccgggtaatgaggggggtaaagaattagttattaattcgtacgaacggctagactatattatcaaaaacccttattctaaagtggctaatgatgccgctgaaaaaataatcaaagttctggatgtagacgacgcacaatcaccagaaagaaaatccataattagaacagctatatacgatctaattaatacgacggaaaataaagatatatcagctcttatattaatgagcgaaagaatctttaatagatacaacgatcttttggaactatatactaatagattttctgttaataaattattatctgagttagaacaaaagaatcttgagtatacaactaaaataaatgattttgtttcatctagtcagacaaaagctttcgcaatacctggatcattaattgctattggtgggctagcaaaagcaagtggattttgggattcattattaatttttataggtctttaccttgtatattatattacttttatgtccaaccaagttctggatgaatcatacacatcattaacacgtagtcttcgtgattcattttctagatattctaaatttgatgaagggttggaggttaaagatgcagcacagaaaatatcatcagatctttatttaaaaataaataacgctaaggaccgattgagaaaagtcaatagtattgcgagaggaatgctttggataggagggctttatttgttattgaaaataatttttattgatagtaaataa

SEQ ID NO: 196327 - DNA, 855 bp, Klebsiella oxytoca
atgagaaaaataacggctatgatgtctaatgatattaaggatgctcatggggatataatgcacattggaatattaagaagcatgaaagaacaaacaaataataaaatcattccttcctataaggagcatgattttcggaatccaccaattgcacgagttgttaactcttttatcttatccaagaatgaaaataattacctttatggtgaaattgagttttttgagatagatgatataaataagttaaatcctggtaagaatatcaaaaataagaatatacctttacacacatcaaatggaaaggaaatacttgttagttatgataaatcctatattgatgatggcttagttgatgatgttgaagcactccaatcaacaataagtgaattttcagatgttggatgtgaattaaaaaaatcagttgaaccagtaagtgcattaatgattatagcaatgtgcgtagggagtaattttttatcaggtttccttagtaaacccggctctgacttctgggacttacttgtttctcttataaaaaagaacacgaaatcaaaaggagataaactttatcacttttgttttaacattgataataaattggaagttatgattatattctccaatccaacaccagaagatatatttaacgccctaaataaagagaaagggttcttggaagattttgttttagaatataaaaaagataatccaaaagctgtaagaataacctttgaatattgtgatggtgcatttgtacatcaatattctgtatataaggatggaactccatttgatattcatgatataaataaatatataaaaataattgagaacgtagctcatagaacaaattaa

SEQ ID NO: 196328 - DNA, 219 bp, Klebsiella oxytoca
gtgcatgagagcgcccggatgaaagatccggggctggcggcggcgctggaactggcgcgactgatgggcttacgctcacaggaagcggcacaaagagctcagtcgctgaaaacatggaaacaggccgttgagcgcggtgatgcacgtttaactgtggttttcggcaccagaggcggacggccccgcgaaacggtgattctggatgctggtgcagtctaa

SEQ ID NO: 196329 - DNA, 225 bp, Klebsiella oxytoca
atgaacatccaaattcagcgggtagcgcagattaaggttcgccacattgaagactacatacatgaaaggttggtgctggggatcggcaagcggacgctgcaaaacgaaatggccgcgttgcgctccgtgctgcaacaggtcgggcgtaagcaggtggcagagcatgagcggctgactaataaatcgctggggctggcgggcgcatcacgtagcggtacacggtag

SEQ ID NO: 196330 - DNA, 852 bp, Klebsiella oxytoca
atggcattaaccgataccgctatccgcaagatcaaacccaccgataaatccttcaagattacagacagttcaggactctacctgctgatcaaacccaacggctcaaagctctggtatatgaagtaccgcattgacgggaaagagaaaaagttggcctttggcccttacccggatgtgtccctgtttaaggcgcgtcagttacgcgatgccgcccgcgccagagtgcgtgaaggggcagatcctgctgcggataaaaagatcgcccaacagaaaaagaaaaatgggcataccttccgccacatcgccatgaactggcacggtgagcacaaacgctggtctgcgcattatgcaaacaccatccagcgcaggctggaaatgtacgttttcccggatatcggggacagatacatcgatcaaatcgtcacggaagatttgctgtttaccttacgcaaggtcgagagtaaaggctttctggagatcaccgcacggctgaaaaactacgtcacagagatcatgcgctatgcggtgaaaaagcagttaatcaaatcaaacccggcgctggatctggacggtgagtttacgccaccggagacacaacattacccggccctgccccttgagaaactgcctgaactgttatcccggacgaatagctacatcgccgggttacggaagaaaggaacgtctctggctgcggtatcgcgtaaggccgggctggcctcttccacactgaccaatgcccttaaccgccactggcctaaaggtgaaaggctgatcgccgaagcgttaggcgttgcgcctgaactgatctggccgtcccggtatcgtaagccggaataccgccagagctaa

SEQ ID NO: 196331 - DNA, 1455 bp, Klebsiella oxytoca
atgaatcagaaagccgccaggctgaccccagaacaggcgcttacgcagctcgaagcgctctatgaaaaatcggtcaatgcgctgcgtaaagccctcggcgattatattcaccataatatcctccccgagaatagcgcccgtgcggaaggactgttcgtttacccgcagctgtcggtatcgtgggacggcgcggaacataaagcgttaaaaacccgggcctggggtcgcttcacccatagcggttgctataccaccaccatcaccaaccctaaactgtttcgcgcctacctgctggagcagctcaccatgctgtatcaggattacgatgccgcgattaccgtcgggctgtcgcagcatgagatcccctatccgtacgttattgatggctctgaactcacgctcgatcgctcaatgagcgccggcctgacgcgttttttccccaccaccgagctgtcgcaaattggcgatgaaaccgccgatggcctgtttcattcgacggaatactatccactttcccacttcgacgcccgccgcgtcgatttctcgctggcgcgcctgcgccactataccggcacgccggttgaccatttccagccgtatatgctgtttaccaactacacccgctacgtcgatgagttcgtgcgctggggctgtagccaaattctcgatcccgagagtccctatatcgccctctcctgcgcgggcgggatctggataacggcggacacggaggcgccggaggaagcgatttccgatctggcgtggaaaaagcatcagatgcccgcctggcacctgataaccaaagacggacaggggatcacgctgattaatattggcgtcggcccggcaaatgccaaaaatatctgcgaccatctggcggtgctgcgtccggacgtctggctgatgattggccactgcggcggcctgcgtgaaagccagaatatcggcgactacgtgctggcccatgcctatctgcgcgacgaccacgtgctggatgcggtgctgccgccggatatccctattccgagcatcgccgaagttcagcgcgcgctctacgacgccacgaagcaggtcagcggcatgccgggcgaagaggtaaaacagcggctgcgtaccggaacggtggtcaccaccgacgatcgcaactgggagctgcgctactcggcctcagcgctgcgctttaacctcagccgcgcggtggctatcgatatggaaagcgcaaccattgccgcccagggctatcgcttccgcgtcccctacggcaccctgctgtgcgtctccgacaaaccgctgcacggcgagattaagctgccgggccaggctaaccgattctatgaaggggccatttccgaacatttgcagattggtattcgggcgatagacctgctgcgcgccgaaggcgaccacatgcattcgcgcaagctgagaaccttcaacgaaccgccgttccgctaa

SEQ ID NO: 196332 - DNA, 966 bp, Klebsiella oxytoca
atgaacagtaccggattaaatattattaaaacgctgggatgcatgacggcggtgaccttcttcaccatttacaacacctgggatagctatgattatgactatcactggatcctcgggtttttgacgtttatttccactatcgccacgccgctgttttttgtggtggcgggctatctggattcacagtctcgccacgattcacaatggcagttgggcaaaatcaaaagcgtggtgatcgtctttctgttctggatgacggtgtactatctctgggagccctaccagcgcggctatcttatccagccgtggtttgtatttgcgtttatcgtcatttacacctttcacccggttatcgagtggctcagccaaagacgcacagcgttctttgccgcggtgttcacgctgctgctgctctcgtatggttacgatcttttgtccgcgctgtacccggatgttcatgcgctgagcctggcgccgcagtaccgcctgtggacctggctgctgttttatctgaccggtcagctgttcagcgacccgctggtcgccgactggctcaggcgcgaaaaagtggtcaaaggcgcgatgatcgccattccgtttatttatctttttacctggttttacgagcggcatttcttcttcgccctgtttaaggccgacagaaatgcgttcattctgaccggttcacaaatctatattctggtggttgcgctggttattgccgccaacggcgtgcggtttcgcaaaaacagcgagtttaaagagacccttctcgccaccattagcaaaacgatgaccggcgtctatattctccactactccgtttttcacctgctcaccgcgtttatcccgattaactcgctggggacaaaattaatgctgattgtccttacgtttatcacttcggtactgatttcgatgctcgcgctgtccaattcggtggtcaaaaaagtgattacgatttga

SEQ ID NO: 196333 - DNA, 129 bp, Klebsiella oxytoca
atgaccattattgtcacagataaacatcagttccgttttctatttactggcatcactattgaacggtgttttttatttgcacaaaacattcataacgcaaataacaccacgctgatttcatatgattaa

SEQ ID NO: 196334 - DNA, 177 bp, Klebsiella oxytoca
atgagattatttattagagcatttatatttataattttagttagtatgcttaatgtctatgttcttttctttcacccggagattaaggaaagccttgttgctatagatttattatcctttgctatggccatagcaatactttatggcgatataatgtctagcgatgaaagtgaataa

SEQ ID NO: 196335 - DNA, 1329 bp, Klebsiella oxytoca
atgaaggggatgcagaagataaagcgaggtaagaactttgctggcgtcgtgttttatgcattgaggccagcttctcatcataaaactcccccatcagtaattggtggcaatatggatggaagcaatgccggagagttgattgcagaattcaatgcgactaaagcgcttcgcccggatgttgctaaacccgtctggcacaattcgcttcgcttgccgaaaaatgaagcgctgacagatgctcagtggtcagagattgctgatgattacatgtcccgaatgggcttctctgaaacgcacctcagatgctatgtccttcatgatgatgcggccggccagcacatccatatcatcgccagtcgcatcgaactcagttcggggaagctctaccttggaaaaaatgaaaatctcatcagcacccgcatcatccagcagcttgaactcggctattcactgacaagaaccaaagggccggaagctaaggcacctccggcatcgcccttccctgaaccaaaacgcaaaaaatcacgtaatgaagcgatgatggaggaaaggattggtgagttatgcccgaaaaccatcatccagaacgctcttgaagtattccttgccaataaaccatcaaccactgagtttgtgcatcagcttgtggcacaaaacatcagagcaatcccgaacatcgcttctactggccgcatgaacggcttctcattcgaataccaagggattgtgttcaaagcatctcaattaggaaaagggtattcttgggctgaattacaaaacaagatcgattaccaagctgaacgcgataatgcttttctgttcgaactgaaagcatctgttaatgaaaattctgaaatagtcatccctacagaaaccataacagaagacgtgaataaagccatcgaagtgattatccccgttaacagtactggtctgggcgaagagtgtttacacgaagctgacgaaagccctcaaggtttactgagagtggaaataatatctggttctattgcaacagaagaggctgccgcagcacttctctcagaagcttgtggaggtactaaagaagtgtatgcaaccgaagcggtaaaagaagctcgcaacaatcagtccctgcctatggtgcagactggtttcagatggttggaaaccatcccctatctcgatatctttatgagattattgaaaaagctaaaaatcccatttttgaaacccccagaaaagcacaagactatcacctgcgttaaggtagttgagacgtttccctcaagaccaaaaaactatattgagacgccttcatttcgtcgtaaagcaacacactcaatgtga

SEQ ID NO: 196336 - DNA, 207 bp, Klebsiella oxytoca
atggtcaacagctataccaatatgccctggagtataaaaaagctgagcaaggggttcgcagcacgcctgataaccagcttcaggctggcgtattcatgggatatgtggcgtcaatcattgatgcatacggggctgaaggcgctcaggttttttgtcagcctaatgggcggttacagacatatgccgatgtcgtttataaatacttaa

SEQ ID NO: 196337 - DNA, 1065 bp, Klebsiella oxytoca
atgaaaataattgttactggcggtgctggatttattggttcggccgtagtacgacatataattaacgatactcaagacgaggttgttgttgttgatagtctaacctatgcaggtaatctggagtcgttgacagaagttgctagcagtccacgttttaaatttgaactggtgagtatttgtgacagggtacaacttgatcgaatttttaatgagcagcaaccagatgctgtaatgcatttggctgctgaaagccatgttgatcgttcaatcgatggtccagctgaatttattgaaaccaatattatcggaacctatacgatgctcgaggctgctcgttcctactggaatcagttagatgataaaggaaaacaaaatttccgttttcatcatatctcgactgatgaagtttatggtgatctgcatggaactgatgatctgttcactgagacgactccttacgctcctagcagcccttattctgcctctaaagcatcaagtgatcatttagtccgagcctggcttagaacatatggtcttccaacaattgtgactaattgttctaataactatggaccataccatttcccggaaaaattgatacctttgatcatcctgaatgcattagacggtaaacctctgccagtatatggcgatggtggtcagatccgtgattggctatatgttgaagatcatgctcgtgcattgtataaagttgttacagaaggtgatgttggggagacttacaatattggcgggcataacgaacgtaaaaatattgatgttgtgaagactatatgtcatctacttgaagaacttgttccggctaagcctgctggagttgcacaatataccgatctgattacatatgtcactgatcgtcctggtcatgatatgcgctatgcaattgatgccgataaaatctataaagagttaggatggaaaccacaggaaaccttcgagagtggaattcgtaaaactgttgaatggtacttggctaacgaagtttggtggagtcgggtaaaagatggttcctacgctggtgagcgcttaggtttgtctcgttaa

SEQ ID NO: 196338 - DNA, 768 bp, Klebsiella oxytoca
  misc_feature (723)..(732): n is a, c, g, or t
atgaaatactatattgcgataccaacttataatggtggggaaatatggaaattagctgtcgctaatatacaaaaatatgcacctgctgatttgtttgtacatgttattgattctacgagtaaagatgatactgtttccaccgctgaaaaagctggttttgatgtgcttaccatagcggggaaagatttcaatcatggcggtactaggaatcaagcagttgaaaagtttattgaaaactatgacgtagtaatttttctaactcaagatgcaatccccagacagaattttattgaagagataatatcagtatttgctgatgagagtattgcatgtgcctatggtaggcagttaccacataaagatgctaatccacttgcacgacatgctagaggatttagttatccgggaaagggttatgtctgtgggaaagaagatattccagaaatgggattgaaaactgtatttatgtcaaattctttctctgcttacaggctatcagttttcaataaattgggggggttcccgtcaaatactattctgtgtgaagacatgtttttcacagcaaaagctgttctatccggttataaggtagcttacgctgcgaaagccgaagtacaacattctcataactacacgccattagaagaattcagacgttattttgatataggtgttttccataaagatgaaccatggattcgtcaaagcatcggaggcgctggnnnnnnnnnnagagatatttgttatcggaaattaaattcttgctaa

SEQ ID NO: 196339 - DNA, 207 bp, Klebsiella oxytoca; identical to SEQ ID NO: 111995

SEQ ID NO: 196340 - DNA, 1041 bp, Klebsiella oxytoca
atggctattaaatcatttgattacgttaactacagtaaagttttccgcgatcaggttccacagagcaatttactgctgactcaccttaatgtatttgcagaccgtcagatcgcagattcccacaaagttagtatggatcgtatccaagaggcatctattggtgtggacgctccgttgatgcgtttcagttcggagtgggggactatcgagaagccgacagcaggatcatatctctacgagttgccttgggcgggtgtgactgaccgtgtgacttcggcagatctcaaaggttaccgtcgtcccggttccacaatggagcagtctcttgatgagattgaggccaacaagtttcttcagatgcgtgctaaattcgaacgctctcgcgaatatgcttactggcaggcgctgatcttcaataaagttaatgcttggggaactcagcaaaatgagattgattggtctgtagagttttccctgaaccagcgaaccgctgatttgcaccaaggtgtgaatgatgacccgatgcgcgacattgacgatcaggttagcgccactaaagcgctgatgggtggactaactcaatatctgcgtggttgggttctactgtgcggatctgatgcctaccgtgctgtgagatattctcctcaaattcgtgaattgctagtttattcaaacgggctggttggttctgatgtgctgttcccgtctgatgttctgccaggctttagttcgtttatgctgggttctgtgcgtctgatcgaagtcaatgattcagcattcagcggtatcaagtcaaacgaggctttccttgttccggtctttggcaatgctccggttgagcagagcttaccaatggggcgcttcgttggtccatgtgctcgccatctggaaatctccgcttctggtgatgttgaagactggtacgcatacagggctttcgacgagttacgaaatcgtaatttatatagtgaatacagcctgttagcctacaattttaggcccgacttggttacccgaatgaccttggttccggtcgagtaa

SEQ ID NO: 196341 - DNA, 351 bp, Klebsiella oxytoca
atgaaactggatgactatccaaaaacgtataacaacgtggtcaagaattcggcaactgccaactttgaccgtaagtgccatgtattcgcgacactagcacaggctgtggaaccaggttccgtagtgacctctgccggggcgctgtacacctccgggactgatgcaatcctgtgcctttcttacgcagatgcaggttctgacgtccctgtaatcgtggctgatcgcctagtttacgtatacccagaagcaatccgcgccgtaatgggtacagcgacaaatgccgcactagcagcattgaccgctaacggaaacattcgcctgacctctgatgatgttgtcatcgcagaataa

SEQ ID NO: 196342 - DNA, 540 bp, Klebsiella oxytoca
ttgtgtacgcaagcaactggtgatagccagactaccaacagcctgaaagctgacctagaagaacaactccccgatctaacccgcttctataaaaatcgcgcacgagatagcgacgtaataaaaaaatgcaaaaccatgctcatcgccgggtatagcccccagaaaacagcacttttgctgcgcctgccgatagaaaaagttattgatttatataataattcatacaatccgaaatgcaggcgatttgccaaccgcaattcctaccaggatgcaaaactagccctaacgatgtttcatcaaggtgaatcactcgctgatatctgtgatgcgctaggaggactacacctgtacacggtggtgatgtctctccggcaaaatggccttgctgaatccgctattgagcagcgattaccccctgagggcgaccccttgctaatcgaataccaacgcgtctgcaaaagaaagtctaccagcagatataaggctatccaaatcaatccggtccaacgagtcaacgtggcgcaggcaactactacctga

SEQ ID NO: 196343 - DNA, 360 bp, Klebsiella oxytoca
atggaattcgtccaaggcaaagccagctttaacgagatggcaactggaatcctagtgaaactgtttgcggactatccgtctcactcagaatttgattattcggattggggctggaatgacgagcgtagtgagctactgcggaacactttactagctctaaaggatatgggttacattgatataatctcatcaaccgacatggactacgccgccaagttaaccccacttggtgtaagtgtacttactcaaaaagccccgacttcaggtgatacctttattaacgtcctcaaaagtgcagcaggtgaaagccgtacagcggtgatcggtgccatcatcggttggattttcggcgggaaataa

SEQ ID NO: 196344 - DNA, 555 bp, Klebsiella oxytoca
atggcgagaacgaacgcaccgacaccaaaagaggcacgagagattgaggcagtcctacgccgtcgcaacgaaacctttgctgacgcctgggcgctaaatctcaatctggctcttcgcatcagtgatctgttggcgctcaccttcgacgatgtcgccgggaacgtggttaccataaaggagaagaaaacgagcaagctgaaggtctttccgattaacaaccgggcacgggagattatcagccgtcgccgtgctgcatacccagaagataaattcctgttccagtccaaatctaaccgtgtgaagaatcagccacccagggccatcacgcgagaatcagccagccgtgcattcagtgaagcgggggaaatggtcacagagaagaacatcagcagtcacagcgcccgtaagtgtcggggccgtgcattgtgggaggccggaacaccaattgagacgatcagtaagatgctgaaccatagcagcccagcagtcactatgacgtacctagatattactcaggatgaggttaaccagacctaccacgagctgaacatttaa

SEQ ID NO: 196345 - DNA, 210 bp, Klebsiella oxytoca
atgaagaagcttttaatatgtgcgctggcacttctgccgctggcggctcatgcaggaaaaatcaccatgagcgaccccgacgaacaagtattaaaaggcgggaagcggctttgtacttacgaatcgtcactgtacttgtttacgctggtgactcgttcacagtcttgtcccttttcgaagacgttcgacacctcagacaatgaaaaatag

SEQ ID NO: 196346 - DNA, 996 bp, Klebsiella oxytoca
atggataaacgttaccaggttttcgtaagttcaacttttacggatttagaagaagaacgaaaacacgtcatacaaactctgatggaaatggattgcattccagcaggcatggagttgttcccagcaatcgatgaaggccaatgggagttcataaaaaaagtaattgatgactgtgattattatctgctgatcattggtggtcgttatggctctgttgcggaagatggtttaagttacaccgaaaaggaattcgattacgctgtttcaaaaggtttacgcgtcgttgttttggtacatgagaatccggaaaatctacctttagccaaatctgaaaaagattctgaactcagagagaagctagttgcattcatagagaaggcctcaaccaatcgtctcaggaaaacatgggcaacagcaaaagacttaccagggttagtagcccttagtatgagcaagacaatgaaaacgtatccagcagtcggttggattagggcaaaccaaacttctaaagaatccgatttaagagcacttatagagttacaaaaagaaaatgaacaacttaggtttgatcttgatcaactcaaagcacatagccctaaaattgaagagttgaacctcgctgattttgagagtgttttcgagtttaaatgccaatccacttatttacagaatagccgtgaaaggttatcaatatgggatgcaaggatgtcctggaaagacatttttgctcttatctcgccctatcttacacaacatctcaatgaatcaattgtgtcgcgaactttgggcgatgcagccaaagaaaaagaaaatcaaagcggaagctcacctaaggtcgtatctcaagatttgaaaactatctctatacaattacaagcatacgggctaatcaacgttgaaaatctgaggaccacaacaggaaaatatgacttattttggactttgaccaaaagcggtaaagatttaatgattaaaatccgaacaataaaaaaataa

SEQ ID NO: 196347 - DNA, 3663 bp, Klebsiella oxytoca
atggcctttaatcctcctctggggagcacttctcctgcggtactgctcgataacgccgggcgactggataagctggtgaatggccccgctgctgatgttcccgaccgcgaaggtgagccgctggattcctggcgtcaggcgatagcgagactaaaagcggcgggcggtgcgatggggtttgcatcagcggcggaattactggcctttacgccgtcagaacccaacacgctggcgatggacacggcaaccgggacgctgtacctctggaacgggacggcatgggccaaagccgggtatcagaactcgcaaatcgtcgattacatcaatggccttataggctctaccccgctggccgttctcagtgacctgaccggttcaaactatatcgttaaagctgatggttcgcgggtatcttcggctaactggcggaactcaacgtatattgcggttactgagggccagcagcttaaactgacagcagcgaataacagcgcaagttacgcaaacgttgcgttttacgatcaggacaaaacgtttatttctgccgagaatgtcggggtcgggcctgaggcttacacccggacttttgctgtccccgccgatggttttattattctggcaacacgtatcgcaacgtcacagacattcgcctgtgaggtgatcaaagacgtgctgacggtggataacagcgataaagccggtggctatacttcattcgagacgtttgaaaccgcgataaatacccttgtcggtgaggcagtgaccgccagcggtgcagaggcattcccgaataatggattcgtgagcgtaagcgcgccaacttcttaccctacggtatctgcaaccagttttaatacaggattcattaaggttacggtggggagtattatttcagcccgtctggccctgccgtcttcaggctatgccattgcgtttttctccagcaattcggctgcgtcttttgtcgagggcgtgatcggcaacggtggtgaaagcatcaaagagtatagctattccgttccaaccgacgggtacatcgtactgtctttaagcactgcgattttatccacggcagcgcgggactccagctactctatttcagcaggactaattaaacgccgtgaagtggattctgctcttgatgttgccgtccccagcacacagaatctggttgaaaataaagtcacggatgtttattacgccgacattaacgccagagcaacggcgacaatcattcccaatcagtacatttccatggcgggcgcgctggtttccagcctgtaccagaagctgtatgtcgttgaactggaggccggggaatctgtttttgccagggtaaatttaaactcaaatgccttaaccgctaaatatggcttgcctgtactttctaaatatatttctgagggggtatttgagccgatcagttttgctttcaaagcgggcgctgcctacaccgagcatctgtataccgccactgaggcctgcacgatatatgtcaccgcatatatgaccgacggcagtcttcctgcctttattcgtaagcgcaagtatgctgttggctccagggtcaaacagtacacttaccctgccgattcgtgggaagtaggggttgtgcggtcgaacggtaattcaggccgcgtggattctaacgtaaactacatgagcacggcgcttattcccgtgaaggctggcgattatgtgaaagccaggacagtgcaaaattcgacgaatgcgggcgctacactgtttatgggagccagatataacaaagtcggcaaatatcttggaagcacgctgcagtttacctatgttaataacaattactacggatacgcctgtgcgctgattgaagaagacgggtttatcgccgttaacaactactcagcaaccggactttatgatcctgaagtcgttatcttcagtaccacagaagatgattccttttttattaaaggcccggcgtcgaatccatacggcgatatctaccccggactggcctatgattctgcgggttcgttagtttctgttcctacggcggttacgtacctttttgaccgcgccgcagtccccaaagatgcagaagtcacgctgtcatatgccgcgggtaacacctacatgtatatggccaggctggacagtaaccgcgatgttctctctgttgagacgctgactacgggcattaacacgtcaactttgcttgacctgttcacatcagacgatgtggcttacgtagggatttcgcatgtgtctgacgggcgcagggactccactgcattcaacgtgctggtaaatggtcggggaggtgaaagagcctttctggaactctcggagccggtttataaattgtatgacctggctgggcgaccggataaaaccctcgcttatgattacaccccgttgctgcaaaagctctgcctgaaaatggagcgccagaaacgcggcaaggtttatatggaaagtgggctgtataaaatctccggttgttatatcaagagcttcaaccacatctacggcgacgggatgtacaacacgattatttgcggcgcggacgttccgtttaaaaatgagaagttaagcgatcacgtttacgaaaaaatcactttcgaaaacctgggatttaacctggacattctcagcactcgcgcgggtcgtggaattaatatggagtatgtcaaagattttaccgcccgtaatatctggatttataaatcagcgataaccggattcggcgtggacatgattatgtccggcgtcctggatcatatcgtgacagaggggtgcgggcagaacaaacaggatgggtcctgcgccgggatggggatcggggtaggcgcgtttctcgccggacgggagccgattcaggtgatgaactgcattaaccggaataactatggtcacggcatgttctttgagtggcacaaccatcgcgagagcagcggcgagacgattatcggcgatttcccggtgggtgttaacgttacgaactgctatagcgaaggcaatgcggttggcttcggtaacgctggctgtaatggcctttcctatgctaactgcacggcattccgcaacctgaatggattcgccgcagataatggcagtcaggttggcgaagttcgttatggcataaatgccgttttctctgactgtaaagccatggagaacggaacccgctatatccagaacccatactttacgcctcgtcagatgggcttcggaaacggcaacgggtttgcagtgtataaaacggcagactacgttaacgctgaaatcggagataatgcgcgcggatactacctcgacaactgcatttcagaagacaacgagagccacgggctgcgggttgttgcggcaacgaatgtcacaactccgatccgggaggtctccgttaatggtggctctttctccagaaatggcgggagcggtatccaacttggcaatgcggcggaaaacgtcattattcggggcgccatgcttctgaataatggtcagaacgggatcgggatcagtgcccagttaacagatgctatcctcaaagacagcatcataaaaggcaacgcaaaaggcatgtccgcggcgagcgctgactacatggttagcgccatcaccaaagacaacattgttaaagaaaatgagctggatttagagaacgtcacgaactcttga

SEQ ID NO: 196348 - DNA, 1356 bp, Klebsiella oxytoca
atgaataatgtcaccattggagcattcccggacgagattgaaactaccatgcagtcggcctggtggaaaccgctggcggtgaagttcgggcgggaggtgttcgcgtatattgtgactgagacggcggcaacgggcagcgatgtcgggacgcataaagtcaaagtggctctacgtaacgccgacggctcattcagtctcgggtattgcaagctttctgatggcactgacgccatctatgccaacgacaccggacataaccagccatctgtggcagttgacgggctgggtcacatctgggtattcacatcgatgcatatcgatatgtggcgggtattccgatcggcgcgcccgtttgatgtcagcacgatggcgcagtttaacctgctgccggataccacctgggggaactcttacccggtgctggcccaggataacaacggcgatgtttatgcgatggtccgcgacttcccgatcaccaacgttacacagtcaggacagctgtataaattctcgctgacagagcgtatgtggcgacgggtggcgcagctcggctatgaatttgagcgcaccttctatcctgacgacctgattgcgacccgcgattatgtgcatattctgtgggagtgggggccgctcggcgcgggtaccctgaggcacctgccatcgtatgcccgttacgataaacaatccgggcagctgcacagcatttccggggaaacgctgcccatgccccaggacacaaccgccggatttaactttcacatcagggaactggagccgggagagttttttgtcgaaaacagcgataccgccaacatcaatatcactggcggcgtgcaggccgccaagctttgcttggacggagagaacttcatcggggcactgtaccgtcaccgggcacagggggtggatggcgggacgtttggcgggtttaatgtcgttttttcaacgttcagcgatggtcagtggcagcacgaaaccatcgtggatatacagcaattcagcgatattcagacaggtgcagcactgtcagccgcatacaccagaggtgagacgcgtctgtttttctctgtagagatcggcaataacactgccgacccctaccagaataaagcgtggccggtaatggcacgcaaagttaacggacagtggaaatattcagcactcacggcgacatcttaccgtcgcctgctgcgtctgcgtaatgagaaaatcaacggtggcgacctgctgataatgaccacgccgtatacaacgccacgtagcatgtaccggcttgtcgtgcctgatgtgtacagtagtgatgaagaatttattgcattgtcggatctggtcaccttgctaaaaacaaaatga

SEQ ID NO: 196349 - DNA, 762 bp, Klebsiella oxytoca
atgagcatctatctgaaagacaattccatgatcctgaacacgccggaaactgtggatacggttgtggcaccagtcatgccgtatacctcgctcatcatggcaggtaatcagtcgctggaaacggcctttcgcctccggcgctacggcaacactctgagccaggtcacgctgaacggtccgtggtctgcaaaccagccaggatttaaagcggatggtaccgcgctggcttattttgacgtggatgtgacgcagcaggttccccgcacgctgatggttacagggacaattaacaaaggtggacgatttgcgggtattggctttgataacccggaaaacctcaaagccctgcttattgaaagagggagcggtgtctccgggtcgggattcccttcgaaaaacttcatcccggtatgggcaggagcagccagcggtattgcagggaagcaacttgttcttgaccgcgagcctgacggcgctctgactctctttatcagtggcgataataccggcactcgttggggggtgatttataacggcatcatgaaggccctgccgaaagacacaacttatcagctgtcggctactactggccgaactcgcattggcggatcgtcagcacaacccaccggaggcgcaatagcggcaccaacgatttatgcagctgcgtcgtttcctcgtttgcttacagatgacgagctgatgcagatggctgacttcatgaatggctacgcagcagacatgggagcggtgatgtatgaataa

SEQ ID NO: 196350 - DNA, 1305 bp, Klebsiella oxytoca
atggccgaactaaacccgcctatgggaacaacttcgccgccggtatttctgctgaacgttcagaatctggataaggctatgaacagcagcgacctgacctggaatgaccgcggtgatattgagcgggattcctgggcggggttacagcaaaagtttctcgatgcgcttgccgtactcgcacagagtggcggcattctgggttttgaaactgaagcagatttactggcttatacgccgcaacaggcgcacgccgtagggattgtcgtttccaccggggatgcgtggttgtgggatggttctgcatgggccagcaccggggtgtcatttgctgaaaaagcggtgaataaatacatcgataacatcagcacagcagacagcgatactccggtgctgacgctcgggggtgcacacggtttctcctggcacctgctgcgagaaagcggcctttactggaaatcaatccagctcagccaggaagcgctgaagaacgagattattgatattcgccagaatctgttacgtgccggaggcattgagatgagccagttacccggcggggagttgctgctggtcggccagcatggcttcgctaaaaaaattccgctttccaccatcagtgcggctgaaaacgtcgaatccgaagctcttgaacactggattttcggcaccggagatgctgccctgacaggcaggaacggtaaccacacgctctccccgcagaacgtcacgcatgcctggtctaaaaattacgttgagatccccgcgtggggcggtgcactggtttcagatgtgcctgactcactggaatatacccgctgcgcagtcgtgcggtatgacggcgtgaagggcgtttccgtcttcaataactctgactatgcactcagtatcggcggcgggcgttttgtcataaccagcgaaacaaaaaccggcgatgcgctgaaagttgtttgtgtcgagaagggcctggatacccagggctggtatattcccgccgccatcggggactggatttttattgccctgaccgaaaggctgtctgataccggggccagttgtacgagaagcatatttatcggcggccaggcgccgctggatattcgcgagccggacaataaaatccggcaattatcgacactccccctcgcggtgggtaacgcattctccgataacaccaactacaaaaccaacccactggcggttgctgagagcgtgatttacgacattgctctcagcccggccgaacttcaggcgctctacgaacgccgcaaacaggcgatggccgcacgcggtattcgcgttttctga

SEQ ID NO: 196351 - DNA, 684 bp, Klebsiella oxytoca
atgaaaaacttatcctacattcgccagcaactgatagtggccactgccgatctgagcggagcgacaaaaggtcagctcatggcctggctggagaatgctcagttcgacacgaacacattcccacgcaaaaaacagcgcatatgggatgaggaaacggaaaagtggatgacgctgaacaaccctccgatccctggaaagcaatcacacgccaaaggctcacatatccctttggtgcagccggtggagtacgcaaccgcatcatggcgccgtgcgctactgtcactggatgagcatcaaaaagcctggcttctttggaactacagtgaaaacactaggtgggaatatcaggagacaatcatccggtgggcatgggaacaatttagtcagcaactggccggagtgcgcattgctaagaaaacggtagagcgactgcgtcagcttatctggctggcggcgcaagatgtaaaggagggggtatcaggccgcgaaatgtataagtattgcgaactcgctgaaatgttaggtatagaggataaaaactggtcaaagacgtttggtagacattgggaatccatgctctcggtgtttggacagcttgatcgcgatgcattactttctttaacaaaaacacgttcggaacaaaaatcgacattttcgcagcagtgtattgcaaaagtagattaa

SEQ ID NO: 196352 - DNA, 297 bp, Klebsiella oxytoca
atggcgaatctacgtaaagaggcgcgcggacgcgaatgtacagtcaggatccccggttactgcaacggcaacccggaaaccagcgtgctggcacattaccggctggcgggtacgtgcggcataggatacaagcctgacgatactcaggcggctatcgccttcaactgttgccacgacttgatcgacggacggaagaaaacaaccgattacacctatgacgaactgcgcctgatgcatgcagaaggtgtgctcagaacgctggccatatggaaaaaagaagggctggtaaaagcatga

SEQ ID NO: 196353 - DNA, 846 bp, Klebsiella oxytoca
atgagcactttaatgcaaatactctgcatcaaagacaccgagggatactggactgagggcgaaatgtacccggcccgtgtagtcgctgtcgcccggcaattcggtgccagtgtcggccaccgtgccgacgaaccaagcgcaacaatcaccgcgggcggcggcggtaaatcgcagctggtagtgccgacgcttattcaaatgggatacggagaacggcccggacaggcacctcgcgtgccaggactggataagccgctgggtaccgttgtggctggtggcgggaaacatgcggttgttggggcatttctggcaaaacactacggagggaattatcagggcgccggcgtggggctggatgagccagcgcattcagtaacgactgtcgatcaccacgcattagtcgcttctcatctggttaaactgcgcggtacttgccgtgacggccagcctactgacgagccgatgccgactatcactgccggcggccagcacgtaggggaggttaaaacgactctggcggtcgaggattacgacgaagagcgcgcgcagcaggtgctggcgtttctgcaggaatactgcggggaagatagcaccggactggtggaaattggcggggtgacttaccgaatcgttgatatcggcatgcgcatgctgcagccgcgcgagctctaccgggcgcagggcttccccgaatggtacatcattgaccaggattaccgtggcgtgaagtacgcaaaggacaaacaggtcgcacgctgcggcaacgccgtgccgcctccattcgctgaggcgctggtaaaggctaatttgcctgagttatgtcagaagaaggacgcagccgcctga

SEQ ID NO: 196354 - DNA, 267 bp, Klebsiella oxytoca
atggctaacaaatcacgagaacaaaaacaggcctgcgtccaggcgattatcaaactaacccgcgaaaaagggcgcctgacggtgaaagaagcttgtgccgaactacgcatgtgccgggataccgcaggccgatattttcaggctgcagtcagaaccggaaaggtcatccgctacggacggcttggattgttccgcgaccagcgggcgaccattgattttgacctccagagattcagccatcggaaagattcgggagtatgcaaatga

SEQ ID NO: 196355 - DNA, 1404 bp, Klebsiella oxytoca
atgtcatatattaaaaaagtgtttttttcagagcatgtgatatttaatacatccgaggctattttaaaagccaaaagaaaaactagtgaaagtaattatattactttgattattggcgagaacggtacaggcaaaagtgaattcctgaaggaaatcgttgaatacttcagaataagaaaaaactctgacggcaggtatgaaaataaacacataaaaattgaaacagctactcccaaagatcttggatggccaaaaaaaattatagcatcatcttttagtctcaatgataaatttcccttcctgaacaaagtagctcaaaaaaacaatcaagggttttacaagtaccttggtatccgcactgcaagtaataacgctttcacaggaaagatgcgagatgaattatttcactgcatgatgcgtatttcttcagataaatcgagactaaagttatttataagtattatagaagaatttgaccttccattgaattattcctttgacttttctcaacctcgaggtcttgaagagctttttgattattcacagaataaaacctctacagctggaagtatttttgtggagtcaatcattgatgctttcaggatatcaaatcgctttgcaccaactacattagtaaaaatgcagactgatacaactctaaaaaaatcagtattgtcatcaataaaaagtacttttaaaaatgctgaaaaaaatgtcagtatagattttgatttaaatgctatattgagtaatgggcttccaaggaattcattatccattgataatttgctccgttcgagacttattacactgactgacttttctcccggcggggatataaagtttcaacacttgagttcggggcagtttcatatactaaaaagtattataactttgatggctgaaattgaagataattcactaatactcattgatgagcctgaaatcagcctccatccgagttggcagatgaattatatgtctgtattgagcaggatgctttctcaattcaagaattgccatgttattgttgctacacattctcacttgattgtgacaacactccctattaaaaatgctgaagttgttgttgctaaaaaagataagaataataataaaatattttttgaagttctcgaaggatctccatctggatggtcagctgacatgattctttatagcgtatttggcgttttaaacaggaataatcaatcattcgattttgatgtgaaactaattgcctcgttaatgagtaattggaattatacaaaagataacttgaaggaactaagtgatgcagttcataggttagcacaatatgaactacctaatgctgatccattaagcgtatttattagtgagtcaaaaaaatttcttaagaaggtgaaaagtgagactttataa

SEQ ID NO: 196356 - DNA, 918 bp, Klebsiella oxytoca
atggaaaaaatcatcccgacagtagttcagtttatcaagcttggtgaggctggtgaatgggagcggcagtgcctgtcggatggcacacttcggtttggttatcatcaaaccccgaacagtctctgtgttgaggaacgatgggaagatgttcatgatatttggcttaacatccgtgataggcggcaagccgtcgcgaccagtgacgtaaggcagattaaaactttctacacggcaggagcagagacagtattcatcaccttttggggcgggtttctttactggtgtcgccccacaggccaggtagaggtcctggaggatggaagtcgactccgaaagacggttgaagggtggaaaaacaccagtattggtggtgcgcagctaacgacggatcacctgagcggtgacctcttaaaggttcaggggtaccggggaacgatatgtaacgtaagcgcacatgattatgttgttcgtaaaataaatgacgtagatctatctgccgtttcagcggcgaaaaaggctgaggaggcatatctgaccgcgataaaaaatctgtgccaattgctgacttggcaggattttgaactactgattgaccttattttttcaaccagtgggtggcgacgcaccagcattgtcgggaaaacacaaaaaacgctggatcttgagcttgaattgcctaccaccggtgagaaagcgtttgtacagataaaatcgcatgcgaatgcaggtgccctaagtgagtatgaaaaacgtttcagggaaactactgcttataaaagaatgttttttatctggcacagcgggcctttatccgaaagtatcaaagccgactgcattacgttaatcggccccgataagttagccgggctcattctggacagtggcttaacaagatggcttcgtaaaaaagtttcgtga

SEQ ID NO: 196357 - DNA, 903 bp, Klebsiella oxytoca
atgcagactacaacactctatgttatcggaaatggcttcgatctcaggcattgcatcccctcaagcctgtggcattttaaggaattcctccgggccacggattcggatatctaccgggacgttgaagaatatctacccgtggatggtgactggtgtgatcttgaaactgcattagcaggtcttgatgccgacgtgcttatcaacaatcttggccatttcatgagctcttacggcaatgaggtctggagtgatgctggtcatcatgattttcagtatgaggtggagcaggtaataaaacgcctttctaagggtctgcgttaccaattcggactgtggatccgtcagttgccgataccctcgtgtaaaaatgcacctaaccgcttgactaagctggatccacaggcaattttcctgagctttaattacaccaatacacttagtcgtgtctatggagtcgaaccggagcgtgttcttcacatccacggttctgcggagacgagggacgatgatttgattctggggcatgcctgggagccgggatcccgcccttctctcaacgaaagagccgatattgcagagattgatacccggctcatggaagcgaacagcatcattgatgactatttcttcgcgacttttaagccttcacagaagcttattgctaaacaccagtttatttttgaggagttgagcgaggttaagcaggtggtgattttaggccattctctgtctgaagttgatgcggcttatttccaggctctttttctgcagaaatccgttgcagcggcacaatgggtgatagcgtgtcgcagtgaagaggagtgggatgagaaatcccgtaatcttgaactaatggagatcagaccagcttctgtcagaaaagcgctatgggataagctgtaa

SEQ ID NO: 196358 - DNA, 873 bp, Klebsiella oxytoca
gtgcattatcaagacctccagatggactggcttaaatgctttgtcgcggtagtggatgcgggatcgctttcggctgcggcacctgaagtccatcgctcacaatctgcggtcagcatgcagcttaaaaagctggaatctgcattagggtgtcagcttttacttcgcggtcctcgtcaacatcaactcacgtctgaaggacaaaaattgttgggatatgcccgaaggatgcttgaccttcatgctgaaacgcaggccgcattccacggtaaggaattaacagggcgtattcgtctgggagtccctgatgactatgcagcaaaataccttacccctgcgctgaagagatttgcccctaactttgggtcagtcgagatcgaactgagctgtgagcaatcaacgtctttaattcctcgcgttgaggccggtgatctcgatttggcactggtttcccgggaacatcccagccagggcgcgttactgttttatgaaccgatggtgtgggtgggttctccacagtttgaggtctggcggcgcgatccattacccattgcggtttatgaaagtacaagccttgctaaacgtagtgctatcaacgcattagcactgcaggggcggagatataaggtggtgtataacagctccagtctgtcgggacagattacagcagtagaaagtggcctggctgttgccgttctgactcagtgcagcgtgccacctcatctgcaaattcttggcagtgaacatcttttggggcctcttgaacccatggaagtctcattgttcagaagccgtacttcccagggttctcctgcagtggatagtttgtacgatttgctcctcaggacattacgggtcagaaaagttgaaagttga

SEQ ID NO: 196359 - DNA, 708 bp, Klebsiella oxytoca
atgacgtatcaccagcccgatttgtctcaacttaatcattcgctgatatgggatggctttcggcaacttatcccggtttcattgtttgtcgctatttttggtgccgcctttggcctggccgcatcgcaaaaaggcgtggacccgatgtcggcgataatgatgagtttgctggtttttgccggttatgctcaattcgccaccttagagctttgggccgctcaggttcctgtattaacccttatcgccaccatttttgctattaatgccagacatctgttaatgggggctactttatacccgtggttgcgcgcgttaacacccgctaaacgctacgggatcatgatggtcgtttccgatgctaactgggccatgtccatacaggcattcagcaggggaagcgcggggctgggattactctttggtggcggtcttgcgttatggcttttttggggagcagggactctggcaggactctatttcgggagcgttatccaggatcccaaaagcgttggtcttgatatggtcatggggtgttttctcctttctatgatgttcgaaggagaaagaaacctgaggatgttgattatctgggccgcagcggccagtgcctcgctgatagcgtataaatggttaccagaaaatagtcatgtgatcgctggagccctcgccggaggtattactggaattatcatgagagagaaaaaatga

SEQ ID NO: 196360 - DNA, 309 bp, Klebsiella oxytoca
atgagtattgagacggtaggcacaggacctcttattattatttttattatggcgttggtcacactcgttacccgatggggcggtgtctggattatgtcttttgtgccttttaataaccgaataaaagcctttattcaggggatgtcaggctccgttctcgtggcgattttagcccccgttgccctcacaggcgacaaaggcgcccagatggctttattgaccacggccgtcgtgatgctggtttttaaaagacctttaattgctatcacccttgggattgtcgtttcagccctggtcagatatttttaa

SEQ ID NO: 196361 - DNA, 696 bp, Klebsiella oxytoca
atgagtctaacgccacgaacgttcgttttaattcccgggtatatgctgaatgaaatgctctggcgtaaatttgaaacatacctgccggcaaactgtattgttcatcatgcttccgtaactggaggacgaaccctccatgatatcgcgcagcatatgagtacctgtctgcctgacaaatttacgttgataggtttttcactaggagggtacatagcccggcagtttgctgcagattttccgaatcgtgtggagtccctggtactgattgccagttcgttacgggaagatacgccattagaggcggaatcaaagcggcaaagcgtgcagtcattgtcatccgcaacgttcaaggggctgagcagccatgctattgcccggtcactgcaccccctaaacgcatcagatcgggatatgatttcaactatccagcaaatgggacgttgtctcggatttgaagccttcattacgcaatcgaccttaacccgacaaggtattccttcagcaacgataggttgtcccactttggttattgccagtgaagatgacgccatccgttccatgcaggaggcggaggagctggtcgatgccatacctgatgcatcgttgagaaccatcaaggattgcggtcatatgattccgctcgaacaacctgaggcgttggcgagaaccattactgaatggatttcagtccggtaa

SEQ ID NO: 196362 - DNA, 966 bp, Klebsiella oxytoca
atgagtaactttctgttagaagccggacgccagaccctgatgctggagcttcaggaggcgagccgcctgcctgaacgcctgggcgacgacttcatccgcgcggcggaaaccattatccactgcgagggcaaactggtcgtctccggtatcggtaaatcgggtcatattggtaaaaagctggccgccaccttcgccagcaccggcaccccggcattttttgttcacccggcggaagcgctgcacggcgacctcggcatgctcgacagccgcgacgtgatgctgtttatctcttactccggcagcgctaaagagctggatcttatcgttccgcgcctggaggaaaaatctattccgctgctggcgatgaccggtaaatccacttcaccgctggcgctggcggccaaagcggtgcttgatattgccgtagagcgtgaagcctgtccgatgcacctcgcgcccacctccagcaccgtcaataccctgatgctcggcgacgcgctggccatggcggtcatgcaggcccgcggctttaacgaagaagatttcgcccgttcgcacccggccggcgcgctgggcgcacggctgctgaacaaagttcaccatctgatgcgccgcgacggcgacgtgccgcgcgtcgccaacgacaccagcgtcatggacgcgatgctcgaactcagccgcaccggcctggggctggtggcggtctgcgatgagcgcaatcacgtgcagggcgtctttaccgacggcgacctgcgccgctggctggtgggcggcggcagcttacaggatatcgtcagccaggcgatgacccgcaacggcgtcactctgcaagcggaaagccgcgcgatagaagccaaagagcgcctgatgaagcataaaatcagcgccgctccggtggtggatgaaagcggccagctggtcggcgcgattaacctgcagaatttttatcaggccgggatcctttaa

SEQ ID NO: 196363 - DNA, 258 bp, Klebsiella oxytoca
gtggtggatgagctgggtaaactgagcgaatgggccaacagtcatcaggacgatgccgccgggatcctctccacctcaaccgggctggataaggctatctggctgaagacgctggcgcgtctgccttatggtgccgagcgtatgacgcctgcggtctataacgaacagcaggcgctggcggataccttcacccgtatcggcctgctgccggtgaaagtcgatgttcgcagcgcgacctggtcgctggataagcagtaa

SEQ ID NO: 196364 - DNA, 597 bp, Klebsiella oxytoca
atggataaaaatgagccatcaatatggcctccgtaccaagtcttctatatccaatcgatgttgttcaatacaacatcggctctacaggccgtggatagagcatctaagtacatccaagctatcagtgaagggaagctagggccacaagatcggaaagatgagcttctagactgtctacaaaacttcatcaatcatagtgctgctatagctcggtacttctttccatcaatgattggtggaaaaggtgagaaagttttacataagaaccgtgctgagtttctgaggcaaatttttgatgtgacagaaagcagccctttgcatgataagaaacttagaaatgcaatagagcactttgatgaacgactggatatgtatcttgaaggtggaattgtaggaaatatcttcccaagtctaatcttgaacaagccagaagaaacagatgtgccgcatcacatcttcagagcctactatctaaatgatggaatttatcaagtattgggggaaagacataatgttcaacctattcttgatgaagtcatgagagttcatgaactgttggagatatttgatgaaaatggtggaatgttagggaaataa

SEQ ID NO: 196365 - DNA, 918 bp, Klebsiella oxytoca
ttggaaaagatccaggcgactgcggttaaatatatcaagctgggagagggaggcgaatgggaacatgagtgcctgacatctggcattattaagtttgggtaccacaaaacgccccatcagatgtgccttgagggaaagtgggaggatgtgaataaagtctggttagaagaaaggaaaaataaccagtccactgccaccagtgatgtcagacagataaggacgttttacaccgccacccccgatatactcttcattacgttcagccaggggttattgcattggtgccagccttccggagaggtcaccgaactggatgatggcagtaggacccgccccacggtgagcggatggcacagccatagtctggccgggaaccttctatcccacagcgtcctgagcggtgctttactcgctacacagaattaccgggggaccatctgcgatgtgcgtttggccgattacgccctgcgaaaaatcaatgatgagcaatcgccggaaatcatcagcgctgatattgctaaagctcagtacctgaaggctattaccaggctgtgtagtttgcttacctggcaggactttgagttgctcgtagatctgattttctccgccagcggatggagaagaaccgggagccttggcaggacacagaagactgtcgatattgagcttgaactgcccaccaccggagaacgggcatatgtgcaagtgaagtctgttgctgagcagtctgtattctctgactatctgtcacggttccagaccagtgacagctatgatcggatgttctttgtctggcatcaagggacattgagtgaggatctccgtgctgaaggcgtcactatgattgggcccacgaggcttgcagaactcatactggacaccgggctggcacgatggcttagaaataaggtttcgtaa

SEQ ID NO: 196366 - DNA, 396 bp, Klebsiella oxytoca
atggagcctgcggctcgtcagcgcatgatgtgggagctggcgcaagagctgcggcggaatcagcagcagaacatccggctgcagcgtaatcctgacggtagcggctacgagccgcgaaaggtcaccgcccggactaaaaaggggcgtattaagcggcagatgttctcgaaactgcgcaccgcgaaatacctgaaaactgcagccagcgcggattctgccagtgtgcagtttgacgggaaagtgcagcggatggcgcgggtacatcattacggcttacgtgatcgtgtaagccgtaaggggccagaggtgcgttatgcggagcgacgattgttgggactcacacaaaacgctgtagataagataaaatcctttatgatagattatataaaaacataa

SEQ ID NO: 196367 - DNA, 408 bp, Klebsiella oxytoca
atgaagctgttgatagcctctatgttattgctgtttggccctatcaagggttttaagtgctacgttaagaaatttttccctgacgagtacggcaatgctaattttagtgattcgtctcaagagttacggaaaaaactccattcggctgcagcgaccaattttgtggttttcgctgctgtcatggctggcgtttggtacgaatggaggatagagccgacatttattaactgcgttaaagcagggtctgcatacatcgcactgacagttacattagggcggggtggctggaatatccagacacacaagggaaacactctcacggaaagaattgatcggcacatttacaagttggcccagtacatcaatgtggcgattatgctggtgacgttgtattacccaggcaaatga

SEQ ID NO: 196368 - DNA, 531 bp, Klebsiella oxytoca
atgcgccgcaaggagccgtgcgtcgtcccggctggcttttgcctcggcgcatggatgctggcaatagcgctggagtggttgggtgatgcttttttctggcagaacacctgcgccagccacagtgaacaggtattgcaggcgacatggcagtggtggcgggactttgctggcgcaccggtgtggttagtagaagatctgacacttgtcagcggtaagttgcagcaagggagcgcagcgctaattgcctcgctcaacgggcaaagtggcttgttctggacggaagccgtcgctacggtaatccgctgcgcgatactgtctgcgggtaatgttaccctcacctttctgctgcggctggcgattctgttgcaggcactgccgctatttgcgctgattatcgtcgtcgggcttattgacgggctggtaagacgcgacttacggcgattcggcgcaggccatgagtccgggtttgtttatcaccacgccaggcgtatgatcagttccgcttggcggcaacggggatggtgtggctga

SEQ ID NO: 196369 - DNA, 369 bp, Klebsiella oxytoca
atggtaaaaatctattcaactggaagttgtgatgctgtaacacgtgaaggctcggcggaggttgtgctggaatgtgaagggaaaataaaatatctgaccttctcctacagtgatacgaccgcaaatagatgcatactccacggattaattgatggtgtgaattgtttgaagaagccctgtaacgttgaattaatcagttcatgtgagctcggtgtgaagaaagcgcagaagggaaagggagttaattttgatttgcacatggaattaggtaaaaacttgataaagaaagagtgcgactattctttttctgtcatgcatggtggaggcgacagtttgaatgcttttattcgcaagcatcggacaaaataa

SEQ ID NO: 196370 - DNA, 219 bp, Klebsiella oxytoca
gtggatagagagttgagcgagcacgttatgattgagcgagtcgagatgattgcccgtcttacagttgagggcacttgcagggaaagagatcgtgaaatagcgttaggattaattgctgaaattgcgaaggggtttcccttaaaaaacaatgggtttaccgtgattttttctgcatcgcatgtgaaggataaggtaggtagtagctgtgaatgtgactaa

SEQ ID NO: 196371 - DNA, 204 bp, Klebsiella oxytoca; identical to SEQ ID NO: 98040

SEQ ID NO: 196372 - DNA, 567 bp, Klebsiella oxytoca
gtgtcgatcgaacagtcgggtaacgctgtaaccaatggcaacattattgcaggtgaccagaataatcaggtcattcatcaatacgctgcaaagggaactaatcgtgagatacaggacctttacgagcgtttgagaaggggagactcgagtgattcgaactcggatttttgtgctgaacttgagcattatatgtcccttcaacctgaaatagatgttcgggggctagatgcaaagttgattgaaagcaacagaaaagacttgttgtttttagctaagcagatgaaggaaaaggctgcaaaagcaatcatgcgccgtcaaacctctcgaacagctcagaggatatttgtaataatcttagaccagatccattatgattttataatgaaggtaacaccactaatagaagcagatagtcctagagtgattgtagatgaaaaaattagttcaataattgacgagctctatacctcattaggtgaaaatcttctggagttaactccaaaagatcttcttggactattgttttttcttggtggtaattgtcatattaggtgggataaatgttaa

SEQ ID NO: 196373 - DNA, 501 bp, Klebsiella oxytoca
atgttaatttaccatccagcatatgatgcgtatcattgtctttttagaatgattgcgttaattgatcatataaatgaaattgaagttgataaagccaggatattagatttttatctgatatttccttctttggtatctgaaataagaatgcctcataattacagtggagttaaaaaagaggcaaaaaaatattccaatgtttatcggaatccaattaatatctcatcaacctttagagatatgcatgaaattcaaatggcagctattaggtgtttggcagctactggattaattgaagtaacgcctctcgaaagagatcttatcaagcggaccgataaatctatacctgatgggttgcttatatccatgtgtgattttctgaatgctaaagaagaaatttatactttcatcataagtaaattgtcgcagttccctttgacagggaaggatggacttaaagatagaacgaatttaatggagtttagatatgacttttcttaa

SEQ ID NO: 196374 - DNA, 1938 bp, Klebsiella oxytoca
atgacttttcttaatccatctttttctgtaagtaaattgaaagtgtttcaacatgggcgcgaagcatttagttgtgactttcataaaggtgtaaatgttatcagggggcgtaatagttctggcaaaacgactataatggatttgcttgcgttttctattggggctgagaatattcgatggaaaccccaagctcttctttgcactttgacaatggtagaggttcttttaaacgataaacctgcatgttttaaacgagaaataagcaaagaatccatgcggccgttaagtattttttgggggagaatggaggatgctcttcaatcttcacctagtcagtgggagacttaccctttcaagcgttcagaaaaatcgctgagtttctcacaagtgattttgaatgcattggatatgccattagctcaaggggagggtgcttcaattttaactatgcatcagattctccgcgtattatatgcagaccaaccttcggttcatagcccaatctttagaaatgatagctttgacaaggctttgactagggaaactgtcggcgattatttatgtggtatatttgatgatgttctttatagctcattaatcaggcttaaacaggtagattctgaactttcgactaaaatcacggagctaaaaagcatatttacagttcttggtcgttctggtcagtcagaaaatattcattttattgagcagcgaatttctgatttggaaaaagaaaaaaatgacatttaccacaagctaaatgaattaaaaggtcgtgctgtatctgatggggataataaaaaatcagatagagagaaaacgaataatattcgtaagcgactgaataaggcaaaggaagcagaagttaaaaataccgataacattaattctttggaaatggaagtcgctgattcagagatgtttattaatgagttggaatctaggtatcaggcgcttaatgagtcaggtaaggctagggagtattttagtaatgtgcaatttcaattctgcccaagctgtttaagtgaattgcataattccgatgagggcgggtgtacattgtgcaaaagtcatgctccagaaggaagcgaagctccacagctattaagaatgaaaaatgaaatatctgtgcagttaaaagagtcaagatatttacttgagcataatgttgaaaagctaaaagaacttaagcttcaggctccaattctcaagaaagatgttcagactcttattcgtgagtacgaggctgtttcaacagtgtgggaaaatgctttcgaaatagagtttgaagcgttaactaaagctcttggtcgagttgaagaggagattaatcaagcgtatgagtcgcaaaagctaagtgatgttatttcagaccttcaaaaaaatcgcgattcattgcaatcagaaaaagaacgcttggaatcacttgttgactctttacaaagcaaagaggaaagcagaaagaaagacatttctcaaactgttgaggctatcatgtctagactgctaaaacttgacctgccattgcagactgagtttattgacccaaggcaaattaattttagcttcgtagataatgaggtatacgttaatgggtctaaaaatttctcagagagttcggctgtggtgcttaggcacatcttccatttggcgcttcttactgcaagccttgaaaagtcttatatgagattgcctcgtttcttgatgctagatggcattgacgatggaggtatggagaaagaacgtagccataatctgcaaaaaattattgttcaagaagcagaaacatatgagtatgattttcagttgatttatgcaacttcagaaattaatcctacatacgacaatacagatttgattgttggaagatactttaatcctgaagaccgctctctcaatgtgagttatgtagctacagataatggaagattaatttaa

SEQ ID NO: 196375 - DNA, 1059 bp, Klebsiella oxytoca
atgaataaatcgcatgatgtttatacttgctttgaaaaactctgttctgagattttagctgaaaatggctatgagatatatgattatcatagtttgcatacaactgctcaaaaagagaagtttgaagttgatttttttgctaaaaatacagcaaatgattttgttgttgaagttaagttttacaggagtgaaagggagaatgcagttttgctcaatagagctgcctcaatgttattaaggaaatcattagctttaaataaaaaaggtaagcttctgatggtttcatgcatagtgtctccaatgatacgagtgtcgattgaagaagtttatggggtgactatttatgatagaaatgacattttaaaactatctattgttaatgcagaactagctaaccaactagatgaaattttggagccaggtaaagatgaagtaaagatagaacaggtttcaaatataagcttggattttaatgccataaatttagagaaaatacaaaaggttaatgaagaatattcaagtgagatactaaataaatcgaaaagattgaaaaatgacttagaaaaaaccccactaggggatggcccttcttatgagaaaatttgtaaggagatcttgagatttatttttgagccgcaactttcaggttggcattctcaacttagcacttttgattctttatatcgttacgatttagtttgcagggttaaatcagatacggatatgtggagttttataactaatgaaatgaaaagtagatatgtggtttttgaattcaaaaattattccgatcctatttctcaacagcaaatacttaccacggagaagtatttatcaccgaaatcattcagaagtgttgcatttgtaatatcgaggaggaatatatctaagtctgcggcaatgatgtgtcaaggcgcaatgagagaacatggcaagctgattattaatctatgtgacaatgatcttgttgcaatgatgaataataaggttgaaagtttagagccatctgactatttattttctttggtggataatttcttgctgggcttaactaggtaa

SEQ ID NO: 196376 - DNA, 816 bp, Klebsiella oxytoca
atgcaccagcggcaaagcggcctccggcgccggagcgtcggcaaggatcgaccgaggccaggtatagacaacggtcagcccctccccccgcgccagaggccgcagggtgcgtacgctaccgtcaggaagcatctgcgcgttgtgttctttcgcccctgcgacgccggtataaacatcaagcgatcgcactctggcgtccttagcgtcggcgttgagatttccggcggcgtccggcagttcaagacgaaagctggccttgctgataggccacgcccagtcattgcccgtcacgttccagtaaagctcatcccattcggggaagcggctgaaatggttgctgatttgatagcgaatctcgtagttatagatccctggtttcaggacccgttcgccgctgcctatgcgtaccgtcaggtttttttccgcttcatcaaggctaaacggctcaggcacgccatcgcgcaacaccgactcaatcgcgtaatacacgcgaaagatcttgccgtcctggcggttccaggtcaggggcagcgtacggaaaatcccccgccgaatctgcctgcccagagaaagtactttgatattttcccgcatctccatgctaccgtccgggttaaagcgcgcccgggcatcgaaagagaggatatgttcatacgctggaatagcgccagcgggaagctgggaagcatccttgatgatgatcatgtcgccggcggcaaaagccgcgctgatgttcagaagcagcagcaggacgagggtgcgcagcccccgaaaaagcaaattcaccatttaatcacgccatccgcggtgatttag

SEQ ID NO: 196377 - DNA, 1215 bp, Klebsiella oxytoca
atgagagtgggtatttctggcttccaatctgagagattaactcaaattcgtgaagcaagaggtctttcaaaaatcaaccttggtcgcttggttgatcgatctccttcgactgtaacaaaatgggagaatgggagtcactctcctgatgctgaagtgttagctttgttagggaaggttttaaattgtccagtcagttggtttacaaaacctgcggccaaaaaagaaaataatccagttttctttcgtactctcgcaagtactgccaaagatttatgcacatcttcagaacgttacatggaatggctccaagaggggtgttcttttttgcaggaatctctggacctacctgctgtaaacattccatttttggaaattgatgattatcgtgctatcgatgatgaactcattgaggtcatggctgctaagtgtcgcgaactctgggggttaggtatttccccggtgaaagatttgcttctgacgattgaaaattcaggtgttatttgttctcaatttgaacaaggaagtgttgtaatggatggttattcccaatggaatgaggaagaacgccgaccatacattatattagcgactgataaaggaaattattatagaagtcgttttgatgcagctcatgaacttggacatattgtactacatcgctacgttaaacgacttgatcttattaatttcaaacctatagaggaacaggcaaataaatttgcagctagttttatgttacctgaggaatccttttcggttgaattacaaccctatcctacgttggagaacttcgtttctctgaaaggacgctggggaatgtccgcacaagcaatgatacatagagctaagtctctagagttgatttctccactagaatatcaaagactttataaaagtgtttcggcgcgaggctggagaaaaggcgagccactcgatgatttaagaaagcctgaaactgttaggttgttacctcgttgtgtgaaactgttattagatgagaatgtgttcactaaagttggtttacttgaagagttgagtatgtccagaactgatgtagaagatattttctctctgccaaaaggatacttaagtgaatcgatggtaatggatatgatgaccaaggtcagacttaagcatcagccaaataaaattgatggaactagttctattgataaggtagttaatatttttagccacaagaacaaaattgattga

SEQ ID NO: 196378 - DNA, 873 bp, Klebsiella oxytoca
atgttgctatctacctttctgcaaggtagacatcttctcctctttcacagtagatctaagaattttatgggttatttccaaaaaaatgatgcgacactcaatagccatgccccattatccaataattgtttaaccatgccttgcactcaaaacgaaaaaaaactaagattaaatctgcttaacgcaacagggtatctaaacagtatggaagatgtacaaaagcaaattgacagtgttcttactaacgcttttcgtagagagttttggcttgatcttcaagaggaaacatctgcaatctatctagcggcacaggatgttgttactggtggttctttgaagctcgagcgtccagaaattgtacgtttaaggccacaggtgcgtcactacagtcttaacggtgcctttcgtcgagcggctcgaagtgctggctatgagtgggtggacgctgagactaaaccaaaaggtgaaaactatgtgatcgttagttccaagcgcgttcgtgttagtcgaattggacttaaccatgatgaacaaaaaatcaaatcggctaaacatcgttcactgattgccgaattaaatcaggattatgaaggttatactcctgatttctttaaacataaagaggcaagtaatggcgttgatacgtcaggaagtttaggcgtattggtgcttaatattaatcctcccttatcgtctgatcaggacagaatgttagacttaagggttgtagtcccttttactaatttaaacggatatcactataataaatcaattagtgacatccttgagttatacgctattgaaagggaattagttgttccagatattgcgattccggtacttaagaaacgccttaaggaacaagaaggttaa

SEQ ID NO: 196379 - DNA, 732 bp, Klebsiella oxytoca
gtggaaggtgccatttttttattgctgttggccatctgggaagaatggcaacttaacgaagaataccactggcgccccttcgatatcccctgggtgcatacgctctcagacgatattttttggcaacaaccccccatcccgtcagccgcctcactcacctgggtaccttatacatatcaggatgaaaatacggactgccaggagtatgtggctccctacaaatacaattacagcctgaccagtgaccaactgatgccttttgttgacactcacgtcttcgagcgccttgaaacggccataaccaatggcctcatcaatatggcggctcgtcatcaatttgtgaaagcgtttcggtccgatggcgttgacgagttcctggctcatattgtcgtgattgacgcctgtgttggcgaaaaatcagtgaataagacactggaaaaagagctcaaagatcttggtggtactggtagattaaaacacaggttggcggggttacttaatgatgcatctgtcaaagagaagttgcacgtcctgtataaagcccgtagtaactatgtgcacggcaatatgcttgagaaaattccaggtgaacacattctgcaagcacgtatcctggccagaaaaacactgaacgccattattaccgaagcaggtcaatcgccgggattaaaacgggatgagtttcttgacaatgttctgcgaagaggatggaagctaaatcaaggcgggtag

SEQ ID NO: 196380 - DNA, 633 bp, Klebsiella oxytoca
atgcctgattacgtacatattcttacttttggtctggttgcgttaggaatggtattaactcccggcccaaacatgatctatttaatttctcgctccatttgccagggaaaacgcgctgggcttatttccctgggcggcattgcgcttggctttgtcttctacatgctttgtgccgcattcggcataacagcatttgtgtttgccattccttatgcctatgatttacttcgttttggcggagccgcttaccttctctatctcgcctggcaagctgtaaaacccagtggaaattcccctttttccgttaaagagatgtcggttgatggccctaataaactatttatgatgggcttcattactaatctcgctaatcctaaaattgccatcatgtatttatctttgcttccacaatttattcaaccagaccatggcagcgttctaagtcagtcactggcccttggatgtgtccaaatctttataagcctgatggtaaattccatgattgtccttgttgcaggttcaatagcagggtttctttcaagtcgtccttcatggataaaagtgcaacgttggtttatgggtactgtactggcagggttagccctgaagattgcttgcgaggcaaagcgatag

SEQ ID NO: 196381 - DNA, 210 bp, Klebsiella oxytoca
atggttaccaaaatgcagcgggtatggatgcggtaccgctgctccgagaacgaatacagcatcttccgcgaccgatacctcaagtgtaatcggcgtttcacccgcctcaaaaactaccatttcccccgcattgacagaatcgccactaccggtatcgaacctcccctggcaagtgccagccatccgacggtatatccgcttgggggctga

SEQ ID NO: 196382 - DNA, 600 bp, Klebsiella oxytoca
ttgaagttcggtgataaatccgtagtcgccatgcatgatgaaacccacctccgtagggctgaaattgcaaaacttgagcctgcgttagtcaatccccccgaacaaacccaatatgctccaaaagaaggtgctatcgatagatttgaggcgacacgtattttagttgaaaaagcctgcgaaaaaggggctgtgctacaggccaaaacaatcgtgacgggtttttacatgatgagaagtaaggtgatggggggccttacatctcgaggtagactggatgcatattgtgttgtactggcctgtggtacagggatttcagcccttactgagcgtgtaggtacgcctgttcctgttttgtcatcaccagcaatattactgcgctttgctgtagccgctacattgaagcccgtgacatgcaacagaccgggtcggcatacgttatcgtcggcaaccacgaaggcgtgcaaaatccggtacctgcaccggagggtttcaactacctgctcgttaccctacgtgctggcgaacgctggaggtatcagcccccaagcggatataccgtcggatggctggcacttgccaggggaggttcgataccggtag

SEQ ID NO: 196383 - DNA, 741 bp, Klebsiella oxytoca
gtgaacgaaccgctttatacttatctgataccgatcttcactcttgctggggtcgttaaaggtgtgaccggaatgggactgcccacggtggctatggcgttgcttggaatttttatgccgttgcccgtcgcagcagcgttactggttcttccttcctttgtcaccaacgtgctacaactgatcaacggtccgtcggtcatgcgggttatccgtcggctctggctgatgatgctggtactcgtcattggtacggttgtcggttcctcgctgctggtaagcgtaaacccggcctgggccgcatttggactgggtgctgcgcttgtcgtttatgcagcatacgccctgattgctccagcgtttgtcgtctcgtccgtcacggaaaggtggctttcccccttggttggagggataacggggctgattaccggcgctactggcgtctttgtcatgcctgccgtcccctttcttcagtcacttcgtttcagcaaggatgaacttgtgcagtcgctggggctgtcatttaccgtttctaccgttgcactggcaaccgggctgtacctgcatgatgcttttcatatacagcaattctcaatatccttaatatccattattccggcgctggctggcatgtggtgtggacagaagattcgggcacgcatcagtacccggcggttcagacagtactttctcctgttcctgatgtttcttgggattgagctactttcacggccgtttatttaa

SEQ ID NO: 196384 - DNA, 891 bp, Klebsiella oxytoca
atgaaaatggatattgccgacatgaagcttttcacttgcatcgctgatgcgggaagcatcacgcgtggagccagacaggccaacctggcactggcttcagcaagtgaacggctgaaaaatatggaagaagatgtcggtgtgaagcttgttgtacgtcatgccagaggtgtgagtctgactgaagccggggtggttctcgacagacacgctcgtcagattttgtcccagcatcaacgtctcagcgccgagctaaaaacctttgccacaggtgccagaggtaaaatcacgttgtatgccaacacagctgcgatggccgaatttttaccggcgaggctggctccgtggctttcacaacatcctgaaatttcaatcgaactggaagaaagaaccagtgtggacatagtgaataacattgccactggcatcggtgaagctggattagtttctgacgcagtgaatgccgacgagcttacgctggagcctgttgcggatgacaggctggttctcatcgttccagtaccacatcctcttggcaccaatgatgaaatttcgctgagagaaatagttgaggaaccatttataggattataccccggcaacgccctgcaggatcatattgccgggcatgcagctgttcttgggcataacctgacataccggatcaggatgaccagctttgacggtttatgcgagatggttagtaacgggatcggcgtgggtatattgcctgaatcagttgccgatcgcctccatagtaaatttagctaccgaaagctgcgtttaaccgaccgctgggcgaaaagaaaaatctgtatttgctacaaagaccgagcattgctgagcccagcaatgagaaaattgctcttttttttgaaagacgctgagcgatga

SEQ ID NO: 196385 - DNA, 438 bp, Klebsiella oxytoca
atgaaagagatagatgttggttttacgcacgtcgcttttgtcgtaagagaattagataaaagtattgcgttttatgagcactatgccggtatgtctgttgtccaccggcgcgaacctgatgttccggatgcccgtaaagtggcatggctaagcgatcacacccgcccatttgcgctggttttagttcaagcggacaaagtgactgacaccccgttgggtcatttcggtcatctgggcgttgcctgtgccgaccgcgaagaaattgacaggaaaataggtatggctcgagctgagggcgtgttacggaaagagcctgaagatatcggagaacctgtgggttattacgttttcttagctgaccctgatggtaatactctggagctttcttatggacaacaagttgggctcgaagcaatccgaggccgtacttctgactga

SEQ ID NO: 196386 - DNA, 819 bp, Klebsiella oxytoca
atgacgctggcggcagcagaactgcacgtcacacacggcgcgataagccgtcaaatccggatgctcgaagatcatctggggatccgtctttttctcagactgacgcgtcagattatcctgacggaagaaggagctgaatttcaccatgcgataacccgtattctgggggaattgacaggtgaatctgagcggttacgcggcagaaatcccgccatgagtctgcgaataagtacgggcgtttcatttgccagtaagtggctggcaccccgcctcagtcggcttaaggcccgttatccggaatttgacgttcatctggatgtgactgacatcaatgctgacctgaacagcgggcaagtggatgcagccattcgctatggcaatgggcgctaccggaatgcgtcagctgaacgcatcctcgaagaaacagttaccccggtctgtagtccgggttatctcagcgcacatagcggcctggcagacatcaaggatctttcggactgcatccttctccatgaagacaggatgctggcgaactgggaagcctggtttgcaatgatcggcgaaaaaaatattcgctgccatcagggcccatcgtggagtcacggcagcatggtggcagaggcagcgatccgtggcgaaggtgtggcgctggggcgcagtgttctgattgcagatgatatagccgcaggcaggctggttgtcccgtttccgcagtacaagctgaaagccgagcgagggtacgatttggtttaccgtactggctctcaggatacccctaaagtccgggcattgagggattggctttctgaggaaatgtga

SEQ ID NO: 196387 - DNA, 612 bp, Klebsiella oxytoca
atgctgttcactacctggcttttgttccttttcacctctgctggtatgtcactggtacccgggccaaactgtcttctggtgctgactcatggcgcgatgcacggaacccgtaaggctctggtaacgattaccggtggcctgacaggattcgtgcttctgataggactctgcatgtttggtatcggtgcgcttttgcaggcgtcagaaaaatggctgattgtgctccgcgtggctggcggtctgtatctcgcttttctgggttataagctctggcgttcaccaccaataaccaatgacgctgatccgcatatcgcagtagcaaacctgcggcagatgttccgccagggctttttctctgcggccaccaacccgaaggcgttactatttttcaccgctgttattccacagttcatcgctccggatcggagtctcgcacttcagtttgttgccattgcgctgacctacgcttttaccgagttctgggccgagtacgcctgtgcaattgccgctaacagaatacgcccgtggcttgtacgcgccggacgccgctttaaccgggtctgcggtggtgtgttcatggcggttggcgcggcgatgcagatccgggggtaa

SEQ ID NO: 196388 - DNA, 783 bp, Klebsiella oxytoca
atgacactgctcttctttaaactggttttcacacctgccctgatgctgctttcaacacttgccagcagaaaatggggtgagacggtgggcggcttgcttgtcggtctgccgctgacatcagggccgatttccttattcatggcgcttgagcatgggacagaatttgcagccagcgccaccgctggttcactggcggcaaccattgctcaggcttcttttgcggtcgcatactgtcggcttgctcgacgtggttggttgccagcgctcttcggtgcaacgtccacctttgcattaatttctgctcttcttcaactgagtgggataaagcagacggggttatttctgctggcgcttccgatgatggtggcagcgctgaagctcatgccacggtcactggtaattaaatcctccctggcgcatcctcgctgggatcttcctttcaggatactgttaatcgtcctgctggttatgggggtgacaatggctgcgccctatctgggagcaggggtcagcggtgttatcgcttcttttccgtttatggccgtcattctggccgtatttgctcatgtgatggcaggttttgaggcagctcagagggtaatgcgcggactggtcggggggctgtttagctttgccattttcttctgggtgctgagtcagttactggtctcatttaacctggcggcaacctatgcaaccgctcttttggcagcactggttgtgcagttcatcctgctaaagaggattcggcgacagagcgagatccgtactgccaacacttaa

SEQ ID NO: 196389 - DNA, 147 bp, Klebsiella oxytoca
atgtttcccgcaattttctccttaaccgatatcgttaccgctccgcaacaaaatatcctctacagtattttgacagtcattattcatatggaggcattaaacaggcgtacagcctttctgaggtttgtctggatccttgtggattaa

SEQ ID NO: 196390 - DNA, 663 bp, Klebsiella oxytoca
atggacattaacaacttaatctcagaggcaaagaaattatcaacgccagaattatcggatgctcttgattatttctcgcttccgggtgtggtatatgaattaaaatccgtaacggtaaacaaaagttttgctggaacggcatggacggttcgttatattcctgtagatcacaataatcctggttcagtgggtgattatattgacgaagtcagcagtcaggatgtcgtggtaattgataatgcaggcagaactgactgcactgtatggggaggaatactgagccaggtggcggcgaagaaagggatcgcaggtactgtgatcttcggggtaagcagggataccagtgaagcggtggatgcaaaatatcctatatatgcgttaaatcattttatgcgaacgggtaaagatcgcgtacaggtgaaagaggtttgtggttctgtgaatatcggagggactctggtaaatcatggagacataatcgtcgcagatacagatggtgttgtcgttctggaattaagtattgcagagaaagtaattaatcgtgcacgagaaatgaaagaaattgaggatgaaatagtaaaagacgccctgaatggaatgtctataaaagatgcaaggaaaaagcataactatcatcttctccagagaaacccattaaaataa

SEQ ID NO: 196391 - DNA, 651 bp, Klebsiella oxytoca
atgacttatcctgctctcgattcacagactgtcaacgttttacttaaacttggtgcagcaaccatttatgaagcccagggtgcctgtggtgcagtagactgcgcaattaagcctctggcccgtgagatgaaactcgccggacgggtatttacattacatatgcgtcctggcgataacctgatgattcattatgccctgctgcacattaaaaaaggggacgtgctcgttattaactgtgatggatttgctgaggctggtatctggggagatgtcctgacaacccaggctcaatatgcagggcttgcaggactggttgtaaatggctcggtacgggatagcgaggccattattggctctggtttcccggtattttctcgctcgatttctataagagggacagagaaaaaacagccgggcaacatgaattccgatatgaatatcggagattgcattatcaggcctggtgacatcatcgtgggtgacagcgatggtcttgtggtaattgaaaatgaaaaacttgaagaagtaattcatctcgccacactccgggaagagaaagaaactgattataaaaataaaatccttaatggtgctacaactgcggaacttatgaacttgagaaaagtttttgattccctgaaccttaagtag

SEQ ID NO: 196392 - DNA, 1329 bp, Klebsiella oxytoca
atgaatctgaatttagaacacgcctctgtaactaataaacctacacattaccgttggtgggtagcatcactgttctttttaatttataccgttgccgctgcggatagagctaacctcggtgttgcattgccctttatccgtgctgaatatcatatgactaatgcagaagcaggcgcgctggttagtctttttctcatagcctatgcacttattcagatcccatcagcatggctgattactaaatacggagtaagaaaagtcttcaccggctcgatgatcctgacatccatcgctacggcactgactggcatggtaggctctgttatacagcttaagctctgccggttaatgctggggatcgctgaagggccattaccgatcggtgttaccacaactataaataactggttcccttcaaaagaaaaaggtattgcatcaggtatatttctgtcgtcaattaagctggggccggtactgacacccattataggtgcgatgattattcttcactggggatggcaggagatattcattttcttcgcaattcccggattattattaccgttactgtggtttactcttgtcaaggataaaccctctgaatcccgattcgtcaacaaagaagaatgcgatctgatccttgaaaagaccagcataagagagggaaacgtcaattataaatacaagaaaatcagatatctggataaattaattaaattaaagcaagttaaaccgctgacgacaacaaaagaaataatgagttcctggaatttgctgggctgcgggttaggatactgctgccagcttggtatctccagtttacttcttgcatggatacccacgtatctgatttccgaaaagcatctttcggttgtaggtatgggatttgttgcagcggcgccctgggttggtgccgttatgggaaacatactggggggaattttatcagacaagctcctcagcaagagacgtaaacctggaatgctgatttcagcagcgtctacatctgtgatgatgctgacactgatagtggtgccggcggatcctgtaatgtgtgctgtccttttgttcatgactggcctgttattaagcattggattttctgcttacatggcgtatccgatgtcttttatctctaaggataaattccctgttgccaatgcagtagtaaatatgtttgggcagttaggcggtgccgctacccctttcattgcaggagtgatcctggacagttatggctggaatattgtatttgaatttatgtccctgatttccattatcactttcatcactgttttaaccattgatgaaccttatgaagttaattaa

SEQ ID NO: 196393 - DNA, 141 bp, Klebsiella oxytoca
atgggagtcgggagcattcttaatgcgaagcaggagcgcgataacggcacaatagtagaaccgttctatgacccggatgtctacatctgtttttttgggggcagtgtgggatgttactcccacacgtttatttttaattaa

SEQ ID NO: 196394 - DNA, 897 bp, Klebsiella oxytoca
atgaatatcaaacaactgaagtacttctgtagggttgttgaattaggtggcgttagttctgcagcaaatgaactgtcgcttgctgcccccgctgtcagtatgcagatatcctcgctggaaaaggagctcaatgggatcctgtttgaccgaagtacacggccaatgggtttaaccaagttgggtgagtttatatatcagagagcgcctgaaattatatataatcttgagaaacttgagcgcgatgcacttttctatgttaatgcaaaatctacaacactgagtatctgctttgttcgttcgctaatgtttaatttgcttccggaaactgttaagtatcatcttgatgcccataatcatattgaaatagctttaaaggaggtattgtcagaatatcagactgaccttcttttgtctcaagagttagatataggtttttcaaggttgatggataccagtagcagcttaagtaacgatcttataaacgaactgattatcattgaccctttaatagctgcaataccccgcaatcattatttgtccagaaaaaaatatatcaccttacgtgatttctgtagttcgcctttcattatatatccgagcgatccaaaaagtgattacgctaaagcgattttttctaagtttgatgagcatggtatcaggcctgtaatatctcacagggttgtagaaatacatacagcccttgctcttgtgggggctggtttaggtgtgacgctggtaggtcactcaacaataaaaaataatcgacaggatgtcgttttcctccagattgaagatttcaaatgcttaagttatatttatgcgatgtatcattcaagaaacagtaatcctaatattaagcccttcattgaatctatgaagaccatcacttcttcctag

SEQ ID NO: 196395 - DNA, 255 bp, Klebsiella oxytoca
atggccggcgacatcgaacagatttttcaccgcgtagggaacgcctgccagcgcgggcaggggctttttttcccgccgcagggtatcgatattctctgcctcagcgagcatgcgcttttcgctgacgtgggtccaggcgttgatctgcgggttaacgcgggcgatgttctccagggtgtggcgggcgatctctttggcgctgagctcgccggcggccagcgcgcgctggatttcgtgaatcgtcatttcaggtag

SEQ ID NO: 196396 - DNA, 1569 bp, Klebsiella oxytoca
atgactaacaatgagttaaaagaaattttagttaatatctttagacaacgcagtgcaggccccttcctttttgtaggttctggattttcaaggagatacattgggctgcctgactgggccgcattgctatcagttttttgcactgtaaaaaagccttttgaatattatctttcaagtggtgatggtacttaccctacagcagctcggcttatagccgaagatttcaataatgaatggtggacagacgatctatattcatcaagccgtgataagtttagtaagaaggttaccgataaaacctctgctatgcgatttgagatatgtgatattttgactaaagcaattcaaaagccttttaatgaaagccaatatttacaggaaataaatttactatctaaccttaatgttgatgggttaataacaacaaactgggattgttttttagagcaacttttccctgactataaagtctatacaggtcagaatgaattgcttttttctaaccctcaatctattgccgaaatatataaaatacatggtagcgcacataaacccaaatcattggttttaactgactatgattatgcggattttaatttaaaaaacccttatcttgcagcaaaactgataacgatttttgtcgagcaccctgtagtattccttggatattctctttctgataaaaatattagcgatttgcttagtgcaatttctgtatgtattggcagcgagaacctacatcaacttcgaaataatttgatatttgttcagcgcgaagaaggtatcgacgaaccaactgtctctgatacttatactgcgattgatggtgtgcagattcctattacgttaatccgaactgatgattttttaccaatttatgaagctatagacgaaaataaaaggaaaatacctgcaagaatactaagatattgtaaggaagagctttataatttagttcaatctaatgaacctgagaaaaagatctatgtagtagatattgatgaggttgaaaaacatgaagatgttgaatttgttgttggtgtgggagtggcagccgcaaagaaaaaggaagacgaagtagggatgatcgggtacacgcaaataaaaaatttggatttattcgaagatttgttgagggataataaacactataacgccagtagtatcattgaaaacgttatccctaatgcaggcaaacactcgccaaatatccccatctttaaatatttaaaagaagtaggcattacaaatttagatgaatacaaaaggtcatcattaaaacttgataaatgggttataagatttgacaaaaattatcaatgctctaattattttagatcatatgttagaaagttcaaaggtaaggatgctaaatatataattgaacattgtacccctgaatctgctgcaatctatcttccattcctctgggataaaattgatcacgatgttacctatgagtttcttttaggtaacattgaaaaaataaaccctgataattcaagttatgcaacatattttaaaaaattggcttgcttgtatgatagattaaagtatggctggttatag

SEQ ID NO: 196397 - DNA, 690 bp, Klebsiella oxytoca
atgagtgagcgtaaacgcggcggcgccgcgtccattgatatagatgccctgcttcaggatacctggctgcaggtgatcagcctgcgtcacggtccgatattccaggacggggaagggcgcacgctttgggaacgctgcattgctgatgtcgaacgagtccagcgtgagctgaaagcgagcgaacttgatgaagccagctgtcagcatattctcacggcacagtgtgcgctgctcgatgaggcggtcaaaggtcgcggtgtggaggacgatgcctgcgtgcagtggtataacattcccctgcaggggctcttccttggcactatggacgcgggtgacacgctgtgcgatcggatgcgcgatgtgctgcgtgaaccggctcctgaccacgctgttgtgacctgcttccagcgagtcatgatgctgggtttcctcggcaatttccgctctctgaacgaccctgaacgccagaaactcattaatgcacttgatgaatatgtcacgccgttcagctatccacaaacccatccagtcctggtggaaagccgcgccggacgggaaatgggcggctggctggcatcatggcccgtacgtattggcctgagcgtggtggtggttgccgcactctggtggggactggatcgctggctggatcagatgctgcagaccctgttgccgggagcggtgaaatga

SEQ ID NO: 196398 - DNA, 858 bp, Klebsiella oxytoca
atgaaaattctactaacaggggcaaaaggtcaattaggacgttgttttattgatcgcttgcctgaggattggaatatctttgccactgatgcttcagagttagatatcactaatcaagatatggttttggataccgtcgaaaagtatcttcctgatgtcattgtcaacgcagctgcttacactgcggttgacaaagcagaaagtgatagtaaagctgcaatgaatgtcaatgcaataggtccagctaatctggcgttagcggctaataaatataatgcaaagataattcatgtttcaacagactatgtattcgatgggaatgcaaatgaaccatatgatgagaaaagcgagactaaccctttaagtgtttatggtaaaactaagctcgatggagagcgattagttattcaagcaaattctgaggctatcattatccgtacagcttgggttttcagtgagtacggcaataactttgttaaaacgatgcttaaactaggcagagagaaagattcattaggaattatttcagatcaatttggttgcccaacttatgcaggtgatatcgcaaatgcaattattaccatgattagagaaaaaaataatatcggaatatatcatttttgtggtgatgagattgtatcatggtatgaatttgcacaaagaattttttgccaggcgaaaaaaaataataagctactgaaaattccttcaataaatgccatctcaacggaccaatatcctacagcagccattagacctaaatattcagttctgagttgcaataaaattcgcgcactaggtataatgccatctgactggaataaaagcctggattatgtaattgataatataaactaa

SEQ ID NO: 196399 - DNA, 261 bp, Klebsiella oxytoca
atgcatatcactgtgacatcgcagaacgtacaccaacataagaaaaagatagaacgcgatgacctgaaaggattgacctactttgtgcaaatggcgagtagtgtacgcgttactgcttctcaggatcatcaggcaatagtacaaggcgttttagggaagcctgacagtgataatcatcatcagctaccatcatattggacatggaatgatgtggacgcggtgaaacttgttgatgtgctttacgcggtagctaatgcataa

SEQ ID NO: 196400 - DNA, 258 bp, Klebsiella oxytoca
atgtcgcccctcattaccccatgcagccaccaccacgccagcattagccactatttcagcaatatgccgatcattatcagcaccaattggctcagccgctttcatcatctcgaaacgatttgtatggacgaatgcaaagagattaacgatacgtataccccccatcccccatcccccaaccctgagcaaacgaaatgcaacgtccaagtgtgggatcatcatgttcagcgtcagcataagaaggattcagaccaataa

SEQ ID NO: 196401 - DNA, 528 bp, Klebsiella oxytoca
atgtgccttgaaatattttcaagggatattcatacgtttttcgcaatggcaaactatctaaatatattagatgaagatccttatatttactcaccgttcagaaatatatgtaatgccctgctgggtgatgctgctgtgcgatggtgccaggtttttggtactgatagtgaagaaaatcattggaaaaagacactttctaatcatgatgaaattcgtttgggtttgttggattgtgcagatgttgatatcaatacctacaaaaaatataatgaaaaaatgagagaatttagaaatatggcgattgcacatttcgaaccaaaatatatgaattcggaaaatatcgttccgacatttaacatcgcattgaaaacatcgtcctatcttcatcgttatttgcgtgatttattgcctatggggatgaggaatagtcaccctgatgatttaatgcagtttggggaaataacagcacaatgcgttctaaataaacttgacgataattttatatatcatgctgttcatataatatga

SEQ ID NO: 196402 - DNA, 135 bp, Klebsiella oxytoca
atgtcgaacagcagcattatggggttagcgctcgcgcttcgcaacgtcggggcaggtcaggcggttaagattccggcgatgaccgggtcagagttacgccagttgctggcgtggctggcggttttgaatgtgtag

SEQ ID NO: 196403 - DNA, 222 bp, Klebsiella oxytoca
atgaaaaaacgtacaacaatattaaccttgttggccttgctggcatgtcagccactggcggcacacgcgggccgcatcaccatgcaactaacagcacaggaggagaccgaaagcggtaaaaccttatgccggtatgaaaattccatttacagcttcaactttgtaacgcggagcaagcattgtccgtccgtgaagaccttcgacacggaggactcagactga

SEQ ID NO: 196404 - DNA, 552 bp, Klebsiella oxytoca
atggcaaaaactaatgcgccaacgctggaggaagcagcggcaattgagaaggttttgaggtatcgcaatgagaccttcgcggatgcctgggcgctcaatctcaacctggcattacgtattagcgatttgcttgcgctgacctataaagacgttgccgggatggagatccgcatcactgagggcaagacgaaaaaggcgcgggtaatcccgattaacgaaaaagcacgggagattatcaaccgtcgccgtgaggcatatcccgatgacgtatttctgtttcagtcgcgttctaacagggtgaagaaccaggcggcgaggcccgtctcccgtgagtcagccagcagggcattcagtgaggccggggagatggtgacggataagaatatcggaacacatagcgccaggaaatgccgggggcgagcattgtgggaacgcggtgtacctatcgagacaatatcccggatgctgaaccatagcagcccgtcagtcaccatgacgtacctcgatattacgcaagacgaagtgaatcagacctacgatctgaacatttaa

SEQ ID NO: 196405 - DNA, 312 bp, Klebsiella oxytoca
atgatcaggtctgagcgccccggctggcgcgggttcgtcaaatttctctgcccaggtgcaggctcgccccttcaaggcagtgctaaaccagattcattcacgacgccccatttcgttgaaaaaaaaaattccttcgccaaaaaaccagaaacgatgagaattgcctcgcctttcagcccgatttttaggcacatgggacgcgttctgaaaggcgctttgattgtggtcatcgtgattcaggtcgaaagggaaaacggcgtggcggctctgctggggctgtatatgaccgcctatgcggtctggatgtggtga

SEQ ID NO: 196406 - DNA, 849 bp, Klebsiella oxytoca
atgagcgaagagaatacaggaactaacgacgaatcccaggtaagcggaaaatttgccatgatcccaaacgagatccttgggatgctgggtaaaaatgtgcgtactcctgccgggacggttgagaagatcgacggtgatgatttggcctggtggggattcttcttcacctttcgttaccagaagaaaccttgctatcagaaccgaaacacaatttcagatcgctttgactgcgatgtgaaaacggtgacacggcgtactgcccgactcaaacgtttggggttattgactatcgaacagcgtaaaggcaccagctcagtttataccgctgcatctgttgaggagtttctcgcaatgagaacccgcgagaaagtcacgcccaaaactgaggagaaacagggaaatggcaaatccaaaccgcaggcagaacaggctgcaacggctgcgacaccatcaactgatgcgcccgcaggcacgcccgctgatcagagtcctgacctggcccctgagtcttccgaggttgttgctgaacagcactatagcgtggcatgtaacgatgaccgtagcagcgatgatcacaccgctggtaatcatgcaatgagccaggaagcgcaggacgatgatccaacgtttacacccgagaaaccagcgccagaggaaaccgcaggccgggttatcgcttcgctcgatgatcttcgctgctggtcggaggttggcagcggcgagggtatggacgaatacggcgtaatgtggagtgttgagggcaccgccctttacaacctgatcgacgaacaccgccaaatcagagaagcagaagcagaaaaaaactttaaatcgcagaggacacattga

SEQ ID NO: 196407 - DNA, 543 bp, Klebsiella oxytoca
ttgattgataaatgtacggcgctgaccgccacccagaacgaaccagaagataaaccagaacaactccccgtcctgacccgcttttataaaaaccgcgcaagaaacagcgagatcatgcagaaatgcaaacatatgctaattgctggctactcaccgcaacgcgtatcatgcctgctgcgtctgccgttggaaaaggtgcaggaactgtatgacaacagctataacccacgctgccgcagattcgccaaaacgaacgcgtataccaatgcgaaattagccctgacctcgttcaatgagggcgcggatcttgtagatatcgcggcggcgcttggattgtcgctgtactgggtggtgacctcgctcaggcagaatggtgtcactgatgccgcaatggccccacggatgccaccatacgaagataagctctacgttgaatatcggcgtgttgtggcccgaaaagctgcgagcaaatcgcggcctatctgcataaatccagtgagacgcaccagcaaacacgcagggcagaccgcttcgccacgttga

SEQ ID NO: 196408 - DNA, 432 bp, Klebsiella oxytoca
atgaaaacgacattgcagcaaaaagtcagagacggcattgccgccgccctcaagggcaagaccgtcgaacagatggaagacgacgctcgccaggctgctgtaaaaagcgctgttgatgaatatctgatccgcaacccggattggaaaccgtcaacccagcccggcaaggccgggttaacgtcgaagacgttaacggcagttcatgccgctgcatctgcgaacccctcgccagcagtcgtgccagtgagagacagcaagcagaaagccaagcgcgtaatgaaatcgctgggtgctggcgctggtgtctttacacctcacattgtggatgaagaggcgttacgccgtgcgcgtgaagctgcaagggcctttcaggcggctgagcctgagcgttacggcgatatcatcaccgcgacacctatcaagggcgtataa

SEQ ID NO: 196409 - DNA, 327 bp, Klebsiella oxytoca
atgctgatgtacgaagaagatttatccccgcaggacgtgatcgggtatcgcgatgaccccgttttctcccacaagacccgtactttcgccacactggcggttcctaccgtccccggtacgcttttagccagtgatggcacggcctacgaatcaggtgatgttttaatcgcactggatagccacgcggcgggcgctaacgtcccggtcattgtggtggatcgcggctgcatcctgaaacgtaacggcctccgcgctgctaccccagcggccctggcaaacgccatcgcggctattgaaaccagcggcctgaaccgcgtttctgaataa

SEQ ID NO: 196410 - DNA, 1038 bp, Klebsiella oxytoca
atgaatgagtttttcaccatccgtgatcgactgaaaccaaagccacagggaaattgtgttgatcgcgtcctgaacgaactacgccaggttgaccagtacgtcacccagaatgcggggatcaactttgctaccgctcgtgtttgtccttcccttgtccaactgcgggatgaattcattgtccaacacagtgacagacgcaagctgtctactctgagcaagtacatcaaagcagtggaggtgttcacggcacatttcaggtgcaaggatttccgcctgcacgagatcaacagaacgatggtgactgactggctcgacaacgcaaaacttgaacgggcgacacagacactggcaaattatttgggctgcttgtcccaactggtggcgctggcccagaaccgctaccacgacgcgccaaaggagaacgtcttcacagcccataagctggatgtgcgacatgatcgcgagagttacgaaccattcagcggtgatgaactggctcgggttgtgggactgcttgatcaggaaatgaaggccgtcgcgttggtggggatgtataccgggatgcggcttaatgagatctgttcgctacaggtagacaatatcaagacggtagagggggtttggtgcttcgaagtgacggaaggcaagacgcgtaacgcggcccgcctggttcccatccatagcaagttgcggactctcattaaacagcttatccaggacaatcacagcggcttcctgttctatcatgccagcataactgaacgtgctgacggcaagcgctctacgtggcacacacagcgttttacacgcgctaaacggcaggcattaggagaggttggaacggagcggaaggtgttccatagcctgcgccatgaggtggcccagcagttagaccgaagccaggttccagaggacaggatcgcgttattgatgggtcatgagcgaggcaagacggagactttcaaaacgtattcaaaacacgcggcgtcaccagtggagctatcaaggtacgtcgagttgttgggttacaagttgtaa

SEQ ID NO: 196411 - DNA, 660 bp, Klebsiella oxytoca
atgaataatattattttgttcaaatcaaaaaaacatattcttgtagaagaaaattataatgagttcataaaattttgtcgctatcaactgcccggactaacccaaactcaggattgggagcagtatgcctggaaaggatatgtcacatttagaaaaatagggattggaaataaaatctttgattccattgatgcaatgcacgaagattatatcaattttgcgaaagcatatatcagatatcaacacacattgaaaccattaaaaaattatggggttattatgatggccttgcgatgtctcgaacaggcccttttgcaggttcagaaaactggtctcatttataatgttacagccgttgttttcgatgaggcaatgcagatcgggagtaaatattttgaaggtaacgttttggctaaatgtggaatacagcttgaaaaaatatcaaagtttctgtgtgaacataatcttgtgaagtcaggatatatctcatggaaaaaccatgtaaaacagaaagtcaaaaacaattatcttcctgagattgaggattatcaccgaagcgataagttaccagatgaagaagcattgctcgctattgctgatattttttctcaaaatgatgagttactgagtccaagggatatgttcacacagaaactttga

SEQ ID NO: 196412 - DNA, 345 bp, Klebsiella oxytoca
  misc_feature (330)..(339): n is a, c, g, or t
atgaataatttaattaaaaataaatctgataaaatgtctttgcatgaacataaaatcgtcagttcgattgaaaataacggaatcaatcttacaaacttaatatatgctatgaacgaaaatttggtttgtgggtttgtatatacagtacaatattattttaatagcaacagctatttgtatgtgaaaaatattgttagaaatatggagagtcttatccgtaaactatctcctactcatattgatgataaggttctaattgaatatcaaaataagaaattatcaaaagcctcagcatcatttcgcgttttacgaccatttttgattaaatgnnnnnnnnnngtttga

SEQ ID NO: 196413 - DNA, 1203 bp, Klebsiella oxytoca
atgtgcagtatttgtgtggattcttttatgttcgaaaatggtgagagatattgtcatgttgtaaataaagatactggtgagccattgtattatccaaacttgtatataacaacacaagtcaggaatcggtcagagtctatatcaacaatgaaggttatcgctgggagcatttcattgttatatcgattctttatgagaaaaaatatcaatattgatgaaagaattcagaaaaggatatttctggctcctcatgaaattgaagatttgatcgaattcacttcattcaattttcgagatggcgagaatgataattttagaagttcaaatgtcaaaaaaccaactaagtactttcggataacaaccatagctaactatctggaatggctgtgcaaaatacatctttctcatacaggacagaaggatactctcaaatatattttagatttcataaacaacataaaacgaaagaaaccgagaaataatgataaatataatatggatatagaaaaaagtttaaataatgaacaattggattctttgtttagcattcttgcaccgggtagcaaattaaatcctttttcagaaaaagtgcaaaaaagaaacaatctaatattcctgctattacactgctttggcctgagagcaggtgaacttttgaatctgcgaattggtgatatagattttgcagaatcgacaattgcaataagaagaagagcaaatgataaaacagatccgcgagtgtatcagcctttagttaaaacttgtgagaggaaattaattgctgataaaaagctcatgtttgaaatttcagattatattctgaatgatcgaagaaacataaaaaattctaacaaacatgatttcctgtttattacttataaggaaggaaaaactcaagggcaacctatttcattttcttcatatcacaaagtggtgagtgttgttcgtcaatcctcctcacttctagggggattgacaggtcacaaactcagacatacatggaattatgagttttcgaaagcaatagacaagaatcaggacatatccgatgaaaaagagcaacaaatccgttcttatctcatgggatggcgaccgggttcagaaacttcaatgatttataatcgcaggcatatttatgagctatcgaaaaaaactgcacttgaacaacaagagcaactattcaaaggagaatttgatgaataa

SEQ ID NO: 196414 - DNA, 1173 bp, Klebsiella oxytoca
atgattaagatctcaactcgattctctgaggcttttttggcgagatattatgattttatagctgaggacataatacttaccaaactccccatgcttgtggcgacttatccacaatccgaaggctttgttaattatatctgccagaactttagaaaactcattacttctgagtttgacatccttattgatttacaacatgagatcaatagaatcttccctttgatttctgaaagttataatcctagcgtatattattctgaatgcaatcttcagccatatatatgtattgaacaaatcagcaacattcatctaaatagtcgcaatgcatcacggcaaatattagatcttaagcctgaagcctcatctgaattagaatcattctcagaaacatacaacagccattatacaagactgctacgggatgatatgttagcaactcaaaatgcccgtgagataaaaaaaatatgcatagatttcaaaagaaacattcaagataaaaaaaccgcttacgacaatatgccagagtggattggaaagctgagtgatatattctcgtatgataacatccctccttatatcttaacagagttagcgaccgacattgccttggattactgccctatgtgcaatgaaagcaaagttggaaatattattgatgaagatagaacatatagacctgctttagaccacttcctaccaaaatctaaatacccacatttttcattaagcatttataatttaatacccacttgtcatacatgcaactccactttcaagagagataaagaaacatttatacccatgcatgccaatccatatattataggtgccgataatcatgacctcttcgatttcaacgacctcattgaatatgtattatataattactcgagtggattgagagtgaaattaaagaccaccaccccagaaattgacaataacatgaagttattcaaaatccgtggtgtttataataaaaaatccaccaaaagcgacattttgttattagctcaacaatttaaaaattataactctcattggaagaactcaatgacttacgaagtttttcttgaattaatcataggttacaatccagaaaaaagcctttttgagatttgtcatggaaagctaaaaaaagacataattaaattctttgaagatttcagatggtaa

SEQ ID NO: 196415 - DNA, 1794 bp, Klebsiella oxytoca
atggaaattgttgctttatacatcaatgaatttaatggtgttattgacagtttcataaacgtcaatagttcatttacgtgttcgtataatgagaaactgttgagaatcacatccagtgtcaaccgctcaagttattacgataaaatcccatccactcttttaataggccaaaatggctgtgggaaaaccacaatacttacttttattgaggacttttattatgataatgaaaactcaggattcatcgtatggtacgatgatgaaagtataattgttacatgcaaggggatatctccctcccaaataacctcagacatcaaatattcttgcatacatacaaatgctcaagattttagcaacctacatatatatacaataaaatccaataacaccgttgacttcaattcttatttatttggcaaaaggaaaagcactgcaagaaatttcattgatatttcgctaaatagcataggaaaaagaaacgcaaataaaaaaaatgaagttgataaaatccttaaatatataaagcaaaaaaagccacttcctgacacattggcaaatcgtgaactatctatttcagccaaattaacatttggaacaggtgatacttcaaaaaaaatactaaagaacttaaattttaaagaaaaatatgaagaggaattaagtgttttttttacaagccaaattaacaactatagaggaaattatattataagccctgttcatcccgaatttcaaatatcattagattaccctttcgttaacagaagtcatttaaactcttacatcaagtcaaaaaaagaaaaatggggtgtaagcttttatccttttatctttagtaagctccctcataaaaataacagattaaacatacatgaagtgaatttttattcgatcctttccgttctttactcttttacaagaaagctgaaagtagaccgaaacacctcagacctcctctttcttaaactaatagtagtcgcgtatttttcatcacaaactaatttaataagtagaattgaattctttatgaaagattcattcccaagggcgatggatgataacaacttaatcatggaaatgattaacttagacaaaaacattgataaaatctcaaaaattgcttattgctgttttaaatatagtaaaaaaacaacatctgaaggtaatactgttaactattttatagatgagagcaatactgttccagaactcattgaaatgagcaatcaactcccaaaagaattagattcaatttttaacgtagagtgggatggcttaagcagtggtgaagtctcactacttcatattttatcaagtataagctatgcaatcgaaagtgtgaagttaaaaaatggaacgaaatctattcttcttcttctggatgaaatagatctttatctacatcccgaatggcaaagaactatactgtcaaccttattaaatcttataaaaagtataaataataatgtaaaagtacaaataatcatgtcttcacattctccaataattgcttctgattttttatctgtggacatagttacccttttacggagcaccaagaaaaaaatcaataccggaactttagaggaagttgggtatggcgaatccatagataaaatgatgagtcaaggtttcttcttaaaatctacagtcggggatagggttttaactacaattgattttttaattaaaaatcgagataataaaaaaatattagaggaaaatgaatatattacctcattgattaagaataaaatgttgctgcatgtactaggaattaaaaatgattaa

SEQ ID NO: 196416 - DNA, 1170 bp, Klebsiella oxytoca
ttgcttaattctaacattcttttgggttcctcagaggattatttcgttttagtagggcgaaatggtagtgggaaaagcacattattgcatgaacttgcagagagcgttcatgatgatggatatagtactgttgcagtatccaacactttgtttgataaatttaaagttcatccgcaaagtttgaattacaactacttaggcagtaagctaggtaggaattttcctgctcaggcaataaaaaagactctatcaactaaaaatcaaaataaggtgagtaggatcttttcggttctaaatcacattggttatgagaaaaaaattggtgtgaaaataaaatttagaaggaagtttttagaggcaattagatattctactaattcattaggtaatgtttatccaatttattttgatgaaagcaagtataatatccccgaagaattgataatggcaattgataaagcggttcatgtaagaggccgaggttatagtagtcttgaatggttaacagataatgataacgtttttcaagaaggtagctttgactcttatttgcatctgttaaggcatgagcttcttttgaagaaagcaaaaataatctctggtattgaagtctttttaagcaaggatggggattcattcccaatctcttttgcaagttctggtgagctttcttttatcgctttacttgttcatattgctttttgtgtaaatgatagttcctttatattcatcgatgagccagaaaatagtctgcaccccaaatggcaacgagagtatttcgaattattgagaggtgcgattggttataataaatgtactgttgttgtagctacacattcacctctcataatagcttcaatttcacaaaatgacatggctgttatctacaaacgtgatcataatgggttcaataaaataaaacattatgatgacagtgcagaagagttatatattgactactttgatacaataacaccaaaaaatagagctttatcaaataggtgcgttgaaattattgatgattttacggtggggaatatatcatttaaaattgctaaggaacgcttgtcaaaatttaaattaatggctgctgatcctatacaggagaaatttctatctggagttggtttgttgcttgagaaaatttccgttcaaaagaggaatggttaa

SEQ ID NO: 196417 - DNA, 627 bp, Klebsiella oxytoca
atgagtcataacctgtttagcttagaagaacggcgtttgatagctttggctattgagcaaggccatacattttggggcgatagctcacttgaagcccttaaaagaaaaattaagaatcatttacgtcaaaagcagcaggagtgttgttgctattgctcaagaaatatagatgatgagtttaacatggttctcgatattgaacatgttatcccgaagtcagaaattgtttctgaaatgtttgagctttctaatctcgcggtatcctgtaaaagatgtaacatgaggattaaaggcgatgatgtgtcattcattgaaggcagttttgaacaatttaaagctaacgggactttttataattcggtttcttataagttcattcatccaaatcttgataggtgggatggaaatttgaattatattgttgcacaagtgaatagaagaaagattgtttattatcaagttgtaggtgatagttctaagggacagtttacaaaagattattttgaattggataaaattcaagttaatacatttgatgaggcgcaagaagcaacaggcaggaaggagcctatagatcctgctattgctgaggaatatctcaagttagcagcttcgatgttgggttaa

SEQ ID NO: 196418 - DNA, 675 bp, Klebsiella oxytoca
atgctgggcagcctgacggcgatcgttatctccggctgtttgaaccagctgggcaagcgtttcccgcatttgaccggtgaggggcagctgatgccgaaccgccgcaacgagacgcatcgcgaaacgctcgtcgagggcaaaatggacgtgacaacgctggcctccggcgcgctgctggcggtgctgctctatatgctgggtatgctggggcagaagaccatcggcctgcccgcgccggtgggcatgctgttcctcgcggtgctgctgaagctggtgaacggcgtctccccgcgcctgcaggaggggtcgcagatggtgtataagttcttccgcacggcggtcacctatccgatcctgtttgccgtcggcgtggcgatcactccgtggcaggagctggtcaacgcctttaccgtgaccaatttgctggtgattatcagcaccgtaacggcgctggtggcgaccggtttcctggtcggcaaaaagattggcatgtacccgattgacgtggcgattgtctcctgctgccagagcggtcagggcggtaccggcgacgtggcgattctgacctccggcaatcgcatgaacctgatgccgttcgcgcagatcgcaacccggatcggcggcgcgattaatgtttcgctgggtctgctgttcctcagtcactttctggcctga

SEQ ID NO: 196419 - DNA, 2436 bp, Klebsiella oxytoca
atggctggcaagtccctcggtacgttaacaatcgacctgatcgctaaagtaggtggatttgttcagggcatggataaagccgaaagggcatcccaaaaatggcgtgaccaggtaaaaaaagacgccaaggaaataagcacctccattattgctattggagcagctgcggcaactgccgctgtcgggattggcgctgctgggctggcgattgtaaaaaatacagctcagcaagtgaccgaggcagatcgctgggctaagtcattaaaaatgtccacccaggatttgctatcctggcaatacgcagctgaacaggcaggtttaaccggcgataacatagccgatattttcaaagacattaatgataaagtcggcgatgcggtcctgaacaaatcaggtgaggctgcgcaggctttggacacactcgggctttcagctcagaagctggctcagcaatcccctgataaacagttgctggctattagttcggcattacagaaaatacccactcaggctgggaaaaccaatatacttgaaagcttagggaatgacctgtcaaaaatgctgccgttgtttgacaacaacaacgaaaagctaaagcagtttatccagctatcaaaagattttggtgtcgcaccaccgcaagaagatattgacaaccttgttaaggttaatcagttctttcaggatatagagactagcgcccgcggtcttaaaatggaaattgcttcagggctggctaaggttgaccttacgccattgcaggatgggcttgatgacattcgtgacgtcttcaccgatcctgctgttcttcaggggctatcagacctggttggagaagccataagccttgccggggttgtggggcgtattgctggtggcttgggggccattgctacttatacccgctctcgtatcggtgctgtatctggtaattataacgctgctgatgaaagtgatattgcacagcgcattgaattccttaacaaacgatggaatcaaagtaaggaacaaaaagacgaattagactttttaactaaacgccttcaatttcttcgcgcgataaagtcaagcatgactccggagcaggtagatagaggagcgaaagggctcacctctctactttctgatcttggcattgacacttctaaagataatgatttttcgttgggcaaaggggagtctaaccagaaccacccaaacacaaaaccaaaaagcaatccgactgacaatgctttcaaaaatagactgcttgatttacaaaagcaggccgccctaattgaaacaacaggtaaaaaaaccgcagaagtaaccgagctggagaagattaattttgatataaccagcggtaacctgaaaaaattatcagaagggcagaaggaacaacttcgaactgcggctaaaacccttgattccaagaaggaagagttacggcttaatcaggaaaatgcgaaagtagctgaatatgtttcagatctcgaaagacagaataagttagtccgcaaagggtttgataaccaaatagttggccgttattctggtagtcgtgaacgttcacgcatgcaggataataatgatattcagcaagattttgcttctcgacaggaagagcttttaaatcaattccagtctggagatattgataaaagtctatacgataaaaagaaagaagcgcttcaaaactcgctgaatgaaaggctaagaattcaagaggaacattataagaagttagatgagttacaaagcgatggtgttgcaggtttcgtttctggaatatcagatcaagctgctgcatattcaaacctatatgcaaatatgcagcaagtaggtgcacaaacgtttagtagtttaactgatatggtaattaactgggcggaaaccggtaaattaaacgctcaggactttgcggcgacattcattcaatctgttggggctgcattactgcaatatgcggctgctcaggtagcaatggcagcgttgagtgccttcactgcctggattggtgttccctatgtagggcctgtggtggcgtcaacccaagcaatagctgcggcagctgctgctggtgtgttcatgactgctatcggatcggcgcttcatggccaggctcacgacggtatcgactctgtgcccgaaactggaacctggctcctgcagaaaggtgagcgcgttacgactgctaaaaccagcgccaaactggatgccactctggatcgagtagcaaaccagtccacaggcggcggcgtgctttattcgcccacaatcaatatccccatcaatggtaacccttccgatgcaactttggcgctggtcagtaaagctgcagatgagggggcagaaaggggataccggaaggcggttaattcagtcgcaagcggtcagggtgatttgcataaggccttgatggggaaaactacctcggggaggaaaattagctaa

SEQ ID NO: 196420 - DNA, 213 bp, Klebsiella oxytoca
atgaacgagcaactggtaaacgcgctgatagcagcgctgagagaacaaacagcagcacagagagagcagacggaagcgataaaccgcctggctgaatctaacgtcgccctgtccgatgtaattatccagtcgctggctgcagatgacgatattgaaatcacttcactgggtgatgatcgccccgtttacctgagtcaaagaacgagggggtga

SEQ ID NO: 196421 - DNA, 318 bp, Klebsiella oxytoca
atgagcacaacgattgagatgttgcgggcgcagtgtcggatcgatattgacgatgcaaccgaagatgaactgctgacgctgtctttcacagctgctcggcgtcgcgcagagaacttcattaatcggaaactgtatgaagactctgtgcctgataccgatccagacgggttaaaaattgctgacgatatcctcctggcgctgatgcttcttgttgggcattggttcaacagcagggaagaagcttccgatgtaaataaaatgagtattcccttcggcttcacttcgttgcttgaaccctaccgatatatcccactttga

SEQ ID NO: 196422 - DNA, 234 bp, Klebsiella oxytoca
atgcgcctgacagttctcgacgacgatccgggtgaacgcatcgaacccggtcgcgagcgtatcacggtataccttgatggtgttgaggtgaagcacgtcttctcggctgatagcgataaaggcgaagtgattgccgctgtgcttgatagccgaggttaccccactgccgaaaacggcgaggttaagtgcgagaccctgttcggtcatgtgaggatagagcgatgcccgcgctga

SEQ ID NO: 196423 - DNA, 924 bp, Klebsiella oxytoca
atgaacttcttcaaaaatgctcttatttaccggctctctcgcgatattaccatcgtggaagaacacaccatcgcggatctggcagacaagcttgaaccattccgtttctctccttgcgggagtcaggatatggctaaatccggttgggtatctccccttggacagtattctgaccagctatttcattttgttagcggtcagcttctgctcgtgatccgccgggaagagaaaattatcccacgcccaaccattaccgatgagctcaacaagaaaatttctaagcttgaatcagaacaggcgcgacgtctgaaaaagactgaaaaggatgctctacgcgatgaggttttacatagtcttctccccagggctttctcacggaacatcatcacgcgaatctgggtgaataccaccgatcacctggtcatagtcgatgcctccagtgcgcgcagtgctgaagatgccctggcactcctgcgcaagaccctgggatctcttcccgtcgttcctttgacaatggaagagcctgtcgagataacgatgactgaatgggttcgttcaggcagcgcgcctaatggttttaatctgggtgatgaagcagaaattaaagctgttttggaggccggaggtattggacgcttcaagaaacaagacctcgtaagtgacgaaattcatacccacatcgaagctggaaaggttgtcactaaattattcctcgattggcaggatcgtattcgctttaccctttgtgacgacgtatccattaagcgtattaaattcgctgatgagctcgtatctcaaaatgatgatatcgatcgtgaggatgtagcacagcggttcgatgcagatttcattctcatgacaggtgaaatgagtactctgatttctgatttgaccaaagctctcggcggcgaagctaagcgataa

SEQ ID NO: 196424 - DNA, 300 bp, Klebsiella oxytoca
atggctaagacagcaaaacaactgattaaacaggcgtacgaaatagccaaaactatgccaccagaacaggcagcaatcatcagggaactggctaccgtcctcgatgtgtcgaatgtagctctgcgccagacgcgcaccgaacgtgacgcccttctcgcagaggtcaaatcctgggcgaaggagtgtgatcgtattactgagcgatataccaagaagcgcataaatctgcatgtcctcgaagcaatgcgcgatttgaaagcaatttcccccaccagtttccgtaacgtggaggctctctga

SEQ ID NO: 196425 - DNA, 786 bp, Klebsiella oxytoca
atggctaaagactcaaagctggtatatggcgcaagtggcaaaacgaacgttttgacgttcgaacctgaaaacctgtacctggttaccgacaaaactcacccgctttacgatgagcgtatccacctgcctatcaacgaggcaatggtgctgaacatcatggaccagggcgttcttgagccgattatcgtctggaaagacccggagacagggctgtcttgtgtagtcgatggtcgccagcgtgtgcgccatacactggaagccaacaagcgactgttgaaagagggtaaagaaccgttactggttccagcagtcgctaaacgtggctccgccgttcgcatggcgcaggcgatggtaagtgctaacgaaatccgccaggcagatacaccactgggccgagcaaagaaaatggctgatgcgctggaccgcgggcacgacgaggacgatttagcgctgatgtttggcgtgagtgtccagaccgtacgcgcaactctgtcactgctggatgccacccaggctgttcgcgatgcagtggagtccggaacggtcaccgttacccaggcgcgtcagctggtatcgcttaaaccagaagagcagcgggagaaggtctctgaaatcgaagcggcaactgctggcacaaccggccatgaaaaagcccggcgtcagcgtcagatcctcggcgaggcaaagccgcgcctgaaaacccgcaaagaaatcatcaaagccctggaatcagccgagggtgagtatgcgagcgcactccgttgggtgcttggggaggcggtatga

SEQ ID NO: 196426 - DNA, 135 bp, Klebsiella oxytoca
atgaatattgatcctgagaattacagcaaatacaccctacgtcggttcgccgccttgttcgatgtgatctgctgggtgcttattgccgtagtaaccgttggtatctgcatgtttattgaatggtggacagcatga

SEQ ID NO: 196427 - DNA, 762 bp, Klebsiella oxytoca
atgattgatatcaccaaacttacagcggaaaaacttgaagaaatccgccagcgttaccgcccgaccttagcccctaagtgccacatttgcggtgttgaaatgacaattcagcgtatgtcggcaagtcgtatcacttatggctgtgctggcgctatctatgacgaaactggttgtcattatgctgaaggccgaagccttgctgatgaccactacgctgaatcacgcataacggtagtcgatgtaagtgatcctgatgttttggctatggtagaggcgctggaaaaggcacagcagaggattgatgaactggagaacgatgaagtttgtcagcgcttggctaacgcagagcaccaactctacatggctgaactggctaagcataacctcaaagcaagccgcaaagcccagttccgcaagcgtaaagcgtccgagaagcgcatcgccgaacttgaagcgcaaaacgaatatatccgtaagcgctatcagcaattggatctgctgatcgggaaaaatatcctggttatgcaagccgcaatcatcgaatggcaggccactggcgatgctaaaaacgggctggcgtggatttataacacgctcttcgggcctggcgaattgcctgatgaagcggagaaagacgcacaggcatatttcgaccgcaaatatgctccgctcgatgaagagcttatggcgcttcacaagtggttttgggaacagagcgaggctgaacgtgccgccgctggcatcaaggtggaggctgagtga

SEQ ID NO: 196428 - DNA, 1140 bp, Klebsiella oxytoca
atgacgacagccatgacgacgagcactgctaaagcgacacttgcggtttttgcccccggcacccataccgcgatggatggccggaccatcaccttcacgccggaaaactgcatcgatctggccaacagctatgacccttccgtatcggaagccccttttgtcatcgggcatcctagcctgaccgcaccagcatatggctgggccgaacgcctcgaattccgtgacggcatcgtctatgccgcgccgcgtcaggtaaatccggcctttgcggaagccttcaacgcgggcagctacaaaaaacgctccctttccatttatcagcctgacagccctggcaacccgaaacccggtcattactatgcccgccacgttggtttcctgggggccgttccgcccggtgtgaaaggtcttcctgatgcgcagttcgcagaagccagtggcgataacggcccgctggaatttgccctgccgtgggaggccgacaatctggccagcctgtttcagtcgattcgtgactgggttatccaggaaaaggacatcgagcaggctgattccatcattcctcagtggcgtatccagtcaattctggactccgccactgatgaccgtaagtcatctatctcaccactggcatatgccgaggagaataatgtggacccgaaccaaacgaccaccgttacggcggaggagctcgccaagcgtcaggccgcgctggatgagcgtgaaaacaaactacgcgtggctgaagaagccgcgattaagcaaaaggcactggagcgacgcaccgccattgtgggttttgcagatggtctggtgaaagcaggaaatgtccttccccgccataagagctccattgttgaggtgctggtcaatctgtcccaagagccgctgtcgttttctgaaggcgataccaccgtcagcaaaacgccggaggagctgctgcgcgaaattctcagcaccaaaccgcgtgccattgatttcagcgagaaaaccggcacggctgatggccctgtcgattttgccgatgcttccgcgctggccactgccgcacagaactatcaggcagagcaggctaaacaggggcgcaccatctccatgacggacgccgttaaccacgtgaagaaaggagccccgcaatga

SEQ ID NO: 196429 - DNA, 435 bp, Klebsiella oxytoca
atgacgctgaataaatggttcctcctgggaggtctaatcggtctggcaggcgtgatctggttcatccggaatgatgcctacaacgatggtctggctgcaggtcggctggagtgctccagaggacagactcaacaggccgctgatgcgcttaatcagtttatcgccggaacaaagcaactgacttcacaggctaatcaggccagcacattgctggcgaaacaaatcgacggccgccagctggcggatgagaaaaccacggaggccattcgtgaagcgcttaaaaagaacgctgccagccgtactggttgcaggtttgatgctgacgtcatgcaggaactcgcccgagctcgtgagcaggccgcaataaccgctacctctggttttacccgcccggctgaccgtcccgtgtcctcgaccggtgtatccggccagtaa

SEQ ID NO: 196430 - DNA, 1200 bp, Klebsiella oxytoca
gtgacgatttcgtttgagacactgacagatctataccgtcgcatggaattccgggaggaatgccgtgtcggttcgctgtcgctctctgaccagcccgattgtgatcttcttagcagattgcttgatgacccaggtgagtacgggctttctgttgagtcaggaacgatctccccaggaagctcgattacccttcgcatcgcacctccaaggaaagggctcggggttgtttttgccacatacaatagtcttttatgtgatccaaagaatcagtgccaggaacctgcgaaatttttcattctcgaggcgaagtttcgctatgatgatgctcaggttccggccttcatcaataactaccgggcaattctgaagtttgttgacctgcttaaacaaaccgctgcgtattttgacagttccacctgccagctggtttttttgagaaaagaagtttttaagctgtcgccgctcttttctgcagaaaccgtgcaaaatctgaagcgtgaccatctcgacaatctcatcgcttgcttcaacgacgatacccacaaagaccagaagcttgatattctgatagaaagcattcaggccgtctgtgaagacattgatccccagggaatgtttgcgtttttgctggacaatattcagcgcctgcatgaaaagttcctgaaaggatatcgtatttacacttctggtttctcttatgacaaggtaatggaccaactccgtactgcgaaagttgaggagatggggaaaatccacaaagcgttttcggatatccagaatcatattcttggcattcccgtggcatcagtcattgtagccacccaattcaaagaagctgcagaatggcctggtccgggcatcacgaatacgataattctgctgggatgcatgtttgcagcgacattaatttggctggcactgtcgaatcagatgcagtctatgaaggcgctgaatgaggaaatcgaatacaaaaaaaggcaggtaaataaggagtattctttcatcaaagatgatgtaaacggcgtgtttagtagtattaaaacccgactggaaacacagaaacgtaccttctggattatccggggggtcttgatcataggcatcatcacagcggttgtagtttattgttggtacacaaagcctgttctttactggttacagtttctggtggcgaagattttcccttcaggttgtagctga

SEQ ID NO: 196431 - DNA, 1008 bp, Klebsiella oxytoca
atgactgagcaggccattgaagtcaagcacgtcgtagttcacgttttggtcaaacagcagaatggagatgcttccgagcaattgagccctgaagaacgtcaggttactgaagcctcccggcgcctgatcaacgatatttgtgccaaatatgcaggtcgcacaggtaaaggttacggttactttgaaggtgatgtagataactacccgatggaacgtatggctggcgattatctggacggtgctgatgatttttaccaaagttcctgcaggatgatgcatcacctgaccgaacgttcacagcgagaaaatatggctaccggtgggttcgttctgttctcacacatcatgatagaacacaacgagcatcttctcatcgcaatcgttaatgctactataggttcaaccgtcgatgccgatttcaccattaaagacagtacctatctggatatagcaaagttgcgcatggccggtcgtattgacttaaccgcatggaaaagtgatgcggagcgttatatcagctttctcaaaggccaggggaacgtttcaaactattttaaacagttccttggctgcaatgatgttctaatcgccaagcgtgaatcagaaaaactacgagatactttgactgcgtttgcagcagagcaaaatcttgaaggtgcagaaaaagacgcatttcttaagacagctttcgagcatttgaatgctttaagcaaagctggtgagccactcaaccttgaaacttttgttaatgctgtctggccccaggcacctgaggagttgtctggtaaacttgcttctgaggaattggaattatcggatggctttgtacctgatggccgtgttattcgtgcgttggtgtcttttaaaggcaagtcaaagcactgggaactcaaatttgatcgtgaaggaacaaccacgggtgatattgactataaccctgagacaaatattatcactctgcgtaatgtccctgatgatttcagggaaatgtggctgaatgaggtttaa

SEQ ID NO: 196432 - DNA, 348 bp, Klebsiella oxytoca
atgcgttatctctgggttagtgcggttactttagttttaattactggctgttcaacaaaaaattatggtcgacaaggtgaactcactcagtatgagaaagaaactatgtcatgccgtgaaatagagttagaggaagccaaggttcatggttttctccagcatgtcgataaagaaagtcagttcgatggtcgttcagtcctctcgtttttaggtgactttggcatcggtaatacgatggaaaaaaatagtgcacttgaaagcgcgaactctcggctatcgcaattacaactacttagtgttaaaaacggttgcactacaggtatttcccaacccccctcaaaatcatag

SEQ ID NO: 196433 - DNA, 153 bp, Klebsiella oxytoca
atgccgacagctatgaaagaatcttcacttactaaacgtcagtcagctctgcttgataactatgagaatactgatgaggcaggaaaaaaaattattgaggctactgccgctgaagtcgcgcaacaaatcggcctattaaaaaagtcgagttaa

SEQ ID NO: 196434 - DNA, 480 bp, Klebsiella oxytoca
atgagtaaaaccaccgctgtttttgactctccagaggcgcttggcgctgctctgtgccgccatgtacccgacatggccaacggtttcaccatcactacccgggacagccagctgcagctgacagtggccgccaaagataccagacccttcatggtagcgatggaacgcttgctgaagggcaaaatccgccagatccagcgcgggcatcaggggcgcgttctggatgacaggtgggcccagattgacgcgaacaaccggaagtttgccgagcaggtcagacgagcagacaagattgaagcgaacaacctgcaggttgtacagcagattaaaagtggtgatggcattttgaacgcgcaggtaatccaacagatcatccgggttagttttccaacgatgacctccgaagaacgggaacgcgtcgaccagattattcgggcggcggcgttacgcaaaaatactgagtccacggccagtatctga

SEQ ID NO: 196435 - DNA, 195 bp, Klebsiella oxytoca
atgctgaccttagccggttttattttactggtatcagcctgcggaacagacgcctgtgatgcgctgcctgtttctgacgatatctatctgaataagaaatcgtgcgagctggttatggaagtggttcaggaaaatacgcctgaatcagtattaatttgcggcgaagtatggcgtgaggaagaatctaatgagtga

SEQ ID NO: 196436 - DNA, 363 bp, Klebsiella oxytoca
atgtcatcacctatggagcgtaaacggcacagactgctttctgagcttgccgactatgtcacggagatgggtatcgatttcaatctttctccagagcaggctgagcaactaggacgggcggtagctgatttccttgctactcactttggcgggcagaatatcacctttccgcgagattattttttcaatctgtcgctacgggatatgcagatttacgagaagtttcacggcaataactggggggatcttagcgcggaattcaatatgacggagcgaggggtaagaaaagtggttgaacgggttcacaaacgggtgatggcccatcgtcagccactgcttttcccattcaatgatgatgagtaa

SEQ ID NO: 196437 - DNA, 465 bp, Klebsiella oxytoca
atgtacgaggaattaagtgatgcttgggcggaagcgcatgacggcaaagaatcgctgtttacagatgaggcgcaggctcacctttatggtcatgtcgctggcgcggcgcgtgcaatcaatatcacgccgcttttctggaaaaaatatcataaaggtcagatgacaatccgccagacattttcagccgtggtgcgtctcattaatgatgagtggtggattgtccagtttaaagcgcagcgtatgcgctggcatgaatcgctgctcatcgcctctggtgaagtgaataaagaccgctcaccgtatgccagcaaaagtgctatccgggacgtgcattctcgccgtttggctaacctcgaatacctgaaatcctgtgagctcgaaaataaagtcaccggtgagcgcatcggtctcattagcaaggttatgggagtatttcgaatcccgagatccgccgtatggagctga

SEQ ID NO: 196438 - DNA, 549 bp, Klebsiella oxytoca
atggagctgatgaataccattgccggtatcgtgcgttatgctgccagtgaggggcatgtcgggatgtttatcacgcttaccgcaccgtcgaaatatcacccgactcgtcaggtagggaaaggaaaaagtaaaacatttcagcttaatcatggttggaatgatgaggcctacaccccgaaagatatgcagcgttatctctgtcatatctggggcctgatgcggacggcgtttaaggataacgatttacaggtttacggaatgcgagtggttgagccacatcatgaaggaacaccacactggcatatgatgctgttttgcaaacctggccagcgcaaagatattaccgaaatcatgcgccgctatgctttgaaagaagacggtgatgagagaggtctgcaaaacaacgctttcaggcgaagcatctcaatcagggtggtgcggcaggttatatcgcaaagtacattgcaaaaaatatcgacggttacgccctcgatggtcagctcgatcatgacaccggcaaaccactgcaagataccgctgccgctgtga

SEQ ID NO: 196439 - DNA, 1872 bp, Klebsiella oxytoca
atggcgtacataactccatcgactctaagccttaaaacatgctttcaaagtaaatattctttaccatattttcaaagagattataaatgggaaagtagacacttccttgaaatgttaaatgatatacaaaatgcctttatgctcgcttatgatcctgttcatggccgacgtgatgtttcatcttatgccccttattttttgggctcaattattaccgcaattgaaaccaatggcaaacgccctttaattgatgggcaacaacgtataacctccatgtttatcatgcttgtctttttcgaaagatatatcaaagataatggaattcaagacactctagccttagaaaattttattggtagtgtttcttatggagaacgtgactttaatatagaattctctgaagtgcgaaaagaaatatttaccaaatacactaacgatcaaaaaagccttcctgaagcattggatgatgttgagagtatttcaaggcttaatgatagtgatcgaagaataattgaagcaatgaaatcaattgaagacgctttagatcctactatcaaagataaaatatccttcttcatcgactatctcatggaaaaagttctacttattgacatttcagtatcaagtgaatccgaggcacatagagtgtttgttactatgaatgaccgaggactgaggcttggtgcaattgaacttctcaagggttatattttatcaagaataactgaccctgaggatagccaagaatgccaccaagaatgggttaaaacaatgtcaaaattgagagataacgaccctgaaggtgattcattatttataagaaatttattgcgagctaaatgggcaaataccatcagaggaaaaaacaaaggcgatgaagctggagatttcgataaaattaacgatgcttaccatcgttggttcgaagataaaactgctgaaattgggttaaacaactcagatgatttttataacttcgcgaaaaaagatataccagaatatgctgaactatgcctaacgatcgctaatgcagagaagaagttaacccaagactatccagacgtgttctataatggcattagaaagttcaacttccaaacgatgataatactgtcctcagttgaactaactgacaccagggatattcgaaaaaagaaaattcaattaatatcgaaatatatcgatctgatattaacaagccgaattgtaacaaagaaggcaaacacttatgataatttgaaagatattgcctttaatttagcaaaagaagttagaggtaaagattaccctactttactaagccacatccgaagcgaatggaataaacattatattttgctggataaaatcccagaaatgacctatgaaaacaaatcaaggtcagatatgctctacatgttagcccgcatagcatcacatattgagaaccaactcaaccttacaaataaagttggctttgatacctatatgcagcgtgacaaaggaatgaaaacattcgatatagaacatattctccgcagtgtcgttgacaacactgtaatgccttcatcttcattaggtttcacttcagataccgaatatagcactaaacgaaacctcatcggcggattaatattactaccgcgctcaagaaataggtctttaagcgataatttatattcagcaaaacagactgtatatagcggagagaatattctttgccaaactttatgccctgggttctatcaaaacaaccctgaattaacaagatttttaactgataatcccacaatagcttttagggaatgccaagagtttaaagctaacacaataaccgaaagaggaatagtgtataaagaaatcgcattaaatatttggtcatgtcctcagtaa

SEQ ID NO: 196440 - DNA, 255 bp, Klebsiella oxytoca
atgccggaatatctcaacgcgctcaatttcgcctggctgaatgaagcggcgacgctgtttcgtcgcaagtattaccagaacggcgcacatgcgggttacttcatgtatgtgacagacgccgtacaaatcggtaccgatgctgaggcgctgcgtgatgcgatgcgcagctcaaaagggctcggcaacttcaaaaacctgtttttctacgcaccgcacgggaaaccggacggcattaaaaattgtgccgctcagtga

SEQ ID NO: 196441 - DNA, 462 bp, Klebsiella oxytoca
atgctaaaaccaaatagtctgcgaaaagccttaactgatgcggtgctggtactgtgtaccaaccccgatatgctgcgcgtctttatcgataacgggaacaacgcggcaacgctggcgcgttgcctgtcgtttgaaaaacggtacacgctcaacgtcgtgctgacagattttaccgacgatgtcgacctgctggttgtgccggttatagcctggcttcgggtcaatcagccggacatcatgacaaccgacgaagggagaacaaagggctttgtctggtatgacgatatcaataactacagtagtctcgatgtcggcatcagcctgttgctgaccgagcgcacgctggtcaaagaggccggtggcgcgctgtacgtggagaacatcccagagtcgccaccgccggagccgcgccctgtcgagatgtggagtaatggcgagctgatgagtaaatgggatgaatga

SEQ ID NO: 196442 - DNA, 537 bp, Klebsiella oxytoca
atgtataagtcttgctcgataataatcttttgttctctttctttatctggttgtgctcgttttgattttaataactacacaccgaatggtaagggtattgcctactacgaacctgagccatatttatttgtttcaacttccttaaaagataatcaatgccaaagtacagcttccttattgattttgccgggtgagaaaaaactaataactccagtttcaggagctattggtagctcaaacttaactctcaagtttaataatgggatgattactgaagtaggtcagagcagtgatacaaaaataccggaaaatgttgaagcattggcaaaacttttacctgctatcggtgcaggggctgcgcttgcatcaacgggtgaaaatgatggaataaggaagccgaagccggaggagtgtaagaccggatcatatctttacgcattcgttggtggaaaaccagatacacttaaacctatatctttcgtgatgtccattagtaacgaagttaatggcggagatagtgggaagattttaaggtaa

SEQ ID NO: 196443 - DNA, 495 bp, Klebsiella oxytoca
atggcagttacggtggccattcgcgcccgcagcgcggattatcggggaacgctgtactcacgccgtgaggagtcctggcatgataagacgctcggcgaaattgtggcggcgataactgcccgtaacaaaatgacatcaagtgccatacccgaactggccggaataaaaattccgcatatcgttcggttacaggaatcggatgccaaatttttgacccgtctcgccgagcgtaacggcggtgaggtttcggtaaaagatggaaagttactttttctgaaagccggtcgtggagtgacagcgagtggaaaaaccattccgcaggtcacgatcacccgcggcgatggcgaccgccatcagttttcgattgctgaccgtggggcgtataccggcgttacggtaaaatgttgcgcttcaaaggcccgaagccacaaaagcaaaaagtcgcacttaaacgcaaacccaggagcagcatttacgcttgctacagcactctaa

SEQ ID NO: 196444 - DNA, 213 bp, Klebsiella oxytoca
atggtcggtgaggatgacaatgtgtcttccctgacgacgattttttcaaccaaagcgcaggccatgccagccgctcaggccaaacgggacaaactgcaatatggggtggctgagttttctatcaggctgacgatggggcgcgctgatttgtttccagaaactccggtagtggttaaaggcttgatacgcgttacagacgagagggatggataa

SEQ ID NO: 196445 - DNA, 624 bp, Klebsiella oxytoca
atgtctggcgatatgaaagcagtatttgatagcaatctgattgcaactcaggcaggtaccgttcaggtatttcattttgatatgacttcccgtgaatttatcggtaccgaggatgtttatattcatttcggtgttggtctgcctgcattttcgtgccttgaagaaccgccggtacaaagtgaatatcaggttgctgttcgttctgaagataattcgtcctggtctgttatcgatgattttcgcggtatcactgtctatgaccttcagacgctggccagtcacgttattaccgagcctggacctatccccgatactgtaacgacctctgcaccagctaccgcatacgataaatgggacggttctgcatgggtaacggatgctgctcaacagcatgctgcagatgtttctgctgctgaaacccaaaagaaaaatatgattaatcaggtatcagcagatatatccattcttcaggatgccgtcactcttaatatggcaacggatgcagaaaaatctaccctgacgtcaatgcaagcatatcgtgtgctacttaaccgggtagatacgtcacttgctcctgatattgtttggccagttatgactacgctggagattgataatgtctaa

SEQ ID NO: 196446 - DNA, 570 bp, Klebsiella oxytoca
atgcgcagtgccgagagcgcatcggccagactgtcggccattacagtggcgcttcgcacgctgtggacgccgacggcatgccctgttgatttgttgccgtatctggcgtgggcgctgtcggtagaccggtgggacaaaagctggccggccgctaaaaaggtggcggcgattcagcagtcatactggctgcatcgccgaaaaggtacacgcgccgccgttcggcgggtgattgaggatatggggttttccgccacatttgcggagtggttcgacgtcggcgacgagccgggaacattcaggcttgaggtggatgtgaatgacgtcgggctgacaccaaaaacgctggatgaattaaaccgcctcatcggcgacgcaaagcccgtcagtcgacacctggcacaaatgactattgcggttagctcaaagggtcacgcatggtcaggggcagcagtggttgacggagaaatcataacggtttatccggcagggtacaggccggatgacgcgatctattttgacggggaaacccattacgacggaaattatcattattcgggtatgaaagaatga

SEQ ID NO: 196447 - DNA, 897 bp, Klebsiella oxytoca
atgaccttatcggattcaatcagtgccatttcttcgccgggatcggcggatggtcgcttgccctgcgtcgcgcaggatggcccgacaatcgccccgcatggacagcatcatgcccctgccagcctttcagccaggcaggcaaaggtcttgggtttgctgacgagcggcacttatggccctccgcacattggcttgtcggccagcgccgccctgtcgtggtctttggcgagcaatctggcagcgctgacgcgaacgactggatcgaccttgtacaagctgacgtggaagccctgggctatgccttcggggcgactgcgtttccgtctgcgagcgtcggcgcgccgcaccagcgagacagagcttattgggtggccgacgccgattgccagcaatgggaggggcgcggggaatttcaaccgacagggggggggtaaaccttcaggcagcggcgttattatcgggttggccgacaccgacggcaacggacgggaagggcggttatcagggcggacggatccgcaacgggaaggtatcgacggacaggctggatgtggccgcgcagcttgcgggctggcccacgccaaccacgagcaacgaccgctctccatgtccgcaagaggctatgcggacgtatcgcgacaatggaacaaagattcagaagcggttgcaggatgtggcggcgctgtgcagcccggcccggttaatggcttctggagagatgctgattggctccacggccgggatggatggtggcggccagttagacccggatcattcccgttggctgatggggttcccgccagagtgggaagagtgcgcacctacggaaacgctatcaacattgaagcggcggcagcgttcataaaatcctacatggcagcggtggattatgtctga

SEQ ID NO: 196448 - DNA, 195 bp, Klebsiella oxytoca
atgaaccgatcacctgaatacgcccagggtgcattggccgccctgcacgaagccaaaatcctcaatctcgcaaacgcgacaccgcttgctgcactggaaagcccggaggccgcgaagaccctcgttaatctgatgaatctggtgcttgacccgcttatccagaaatacaccgtgatggaggcgaaccgtgattaa

SEQ ID NO: 196449 - DNA, 360 bp, Klebsiella oxytoca
atgaacggaaaaacgaaactggtgattgtggggggagtgctggcggtggtcgccggaattttctgggcgggatatctgaagggctggtacgcgcattctgagcacgtaaacaaccaggctgagaagaagagcagaaagcaggggaaggacgtagcagctggtgagcagaaggcggcaacggcgaacgctgaagccaaagtgatttaccgtactgtttatcgtgatgtggtgaaatatgtcaacgacccgaatcatactaagtgccagtttgatcctgctgctgtgcagctgcgtcagcgagcaatcgatgcggccaacaatatccccggatttgatgaaccgaccgtgcaagataagtaa

SEQ ID NO: 196450 - DNA, 381 bp, Klebsiella oxytoca
atgctgggagcggtggaacgccgcttcggcaacgagcttccggcgtctccagtagagtggctgacggataatggttcatgctaccgggcgaatgaaacacggcagtttgcccggatgttggggcttgaaccgaagaacacggcggtgcggagtccggagagtaacggcatagcagagagcttcgtgaaaacgataaagcgtgactacatcagtatcatgcctaaaccagacgggttaacggcagcaaagaaccttgcagaggcgttcgagcattataacgaatggcatccgcatagtgcactgggttatcgctcgccacgggaatatctgcggcagcaggccagtaatgggttaagtgataacaggtgtctggaaatatag

SEQ ID NO: 196451 - DNA, 327 bp, Klebsiella oxytoca
atgacgattaatgctctggatgtggtttcaattgaagaattgcgccagcacattgagtttgactcagatgaccgcgatgcgcttattgcccgttacgctcagggtgcgctggattactgcctgacatattgcgacgaaccacgctggaaacagcccgacgatctcccttcgcaggttgtcagcgccatgcttttatttttctgtgatgcctttgaacatcgcggagcgcagacagagactcagctttatgccaaccaaagggcccatgatctgttatttcaggtaaggaactggagaggcgaaactgatgaagacgagggggcataa

SEQ ID NO: 196452 - DNA, 339 bp, Klebsiella oxytoca
atggagccaggtcgttttgtgcaccgcgtagtaattatgaacttttctaccactcgaacttcttctggccagccgattgaacagtggctggagggaaaaaccatttcagcagaggtgaaaggcatcagtgggcgggaactgctgtctgctggtgcagaacaggccgatggaacaattcgtgtatggacccgctaccatcatgagatcaccgccaggtcaaggttgaaggtgctgacaggtccattcaaagacgccatcctgaacgttactggtcctccggttccggatatcaaaggtacccggctggaaattctctgcaaacaggggaccgaaaaatga

SEQ ID NO: 196453 - DNA, 738 bp, Klebsiella oxytoca
atgaatgcaggaattcttgggaactataatttggcatatagaattatgttgtttcctctacaaagtttaacttttgtagccaacagatccctgtacccggttttgagtagagtacaggatgataataaaaaaatattctctacatattcaaattgtgtcttcattattgtatttattactacgccgctaatgagtgggttggcttattttagtgatcctttcattcgattgatttttggttctcaatgggacttgacggcatctattctaaaatggctcgctcctaccgcaatcctgcaagctgtacttagtacatctggttctgtatttatggcaaaggggcgaactgatatcctgatgcgacttggaatcattggtgctattttacaagtcggttctttctttattggtattaattatactattacaacattttcaatgtgttattttattgcaaaccttataaatttcttccctgttatgtatcttttaatgaaggttattcaagggagcttagtgtctttactgattcgtttgcttcctatttttgtatctactatacttatgttgttttgtctgctttttttaaatcaggtttatcccgtagcaaaaattcttaatgtatacatccttgttgttttctctttacttggttctagcgtgtatattttattcatggtgttgttttcttttgattttagaaggtttttgatttctatgcttagaacaaggcattag

SEQ ID NO: 196454 - DNA, 753 bp, Klebsiella oxytoca; identical to SEQ ID NO: 100192

SEQ ID NO: 196455 - DNA, 1368 bp, Klebsiella oxytoca; identical to SEQ ID NO: 100193

SEQ ID NO: 196456 - DNA, 876 bp, Klebsiella oxytoca; identical to SEQ ID NO: 100194

SEQ ID NO: 196457 - DNA, 1935 bp, Klebsiella oxytoca; identical to SEQ ID NO: 100195

SEQ ID NO: 196458 - DNA, 1812 bp, Klebsiella oxytoca; identical to SEQ ID NO: 100196

SEQ ID NO: 196459 - DNA, 1041 bp, Klebsiella oxytoca; identical to SEQ ID NO: 100197

SEQ ID NO: 196460 - DNA, 141 bp, Klebsiella oxytoca
atgtaccgggtaaaacagctgttcgggggttcactgacgctgcgtgactacgatggtcaggttgcggaggctatggccctggtacgagcgctgaacaaaatgacgagagcaggtatacctgaaagcgtgcgtattgcctga

SEQ ID NO: 196461 - DNA, 216 bp, Klebsiella oxytoca
atggcgattgatgttaccgatgagggcaatcctcagtcgatggtggttgcggcgtttgatatcggtactcagtcgatggggttcaacgtggcgcatatgctgaaaaccggtgattttatggcgctgatggcgaaaggtgttgcgaacagcagttcaccgggttacggcacattcagcgcccagcctgtcatgctcgccacagtcccgatgccttaa

SEQ ID NO: 196462 - DNA, 510 bp, Klebsiella oxytoca
atgaatgggggattttcaatgcgaaatatcgtaaaacttgctggtgcctgtatatgcgccctatacctttctggttgcgcttctacaaaatcagtcgatattgtttcaacagaaaaaattgatgcgccgaaagttgtcgctattagcggagctaaagggctatgggtaaaagaaattgagaaaaggcttcggagtaagggctttacgataaaaagagcggttagccagcaagtagtggttgaacaggaaacacaaattaaaacagctgtctataaagaggctgcgactcggtatgtgcttcagcttgacggatacgcgcccagtgattcctttaaccggtgtattggtggaggaggatataaattcgagtatatcaacgctgagttagttgatttagccaaaaacgaaactgttttctcgtactctaattcaggatactcggagggttgccctatgggtggaaccatatttaccgacatccaaaatcttatggttaatgcctggcgttaa

SEQ ID NO: 196463 - DNA, 468 bp, Klebsiella oxytoca
atgtgtactggcgtagaaattgccgcgattggtgcgtctgttctcgccgccggcggggcggtgtacagcgggcagcagcagaaaaaaatgtcaaattaccaggctgcgcaggcggaagccgacgccgaggcatcgcagaaggcggcccgcgtggaagctgaccgtatccgcaaagccggcgcgcggcaggcggccgcagcgaatgcggcaatggccgcctcgggcgtcgagactggcgaaggtaccgcgctgcggattacgtctggtgtaacggaagacgccgagcaggatgcataccagacgatcctgaacggggttaattcttccagccgactgcaggcgcaggcgcaggcggaccgctttacgggcagcaatgcatccacggcaggctatataaacgctggtagttccctactggctggcgggtcaaaagcatataacggctggaaaacgaggcagggggcttaa

SEQ ID NO: 196464 - DNA, 1989 bp, Klebsiella oxytoca
atgcgcgccaacctgataaaaacgaattttaccgcgggcgaaatttccccgcgcctgatggggcgtgtcgatatcgagcgctacgccaacggcgcaaaaattatcgaaaacggcctgtgcgtggtgcagggtggggttatgcgccgcccgggcacgcgatatgccgctgctgccaaatacggcgaccgcaccgcgcgcctcatcccctacgtgttcaaccgctcgcaggcatacgtccttgagttcggcgacggctatctgcgtttctaccagaacggccagcagctggttaatggcgacaataccccgtatgaaattgccagcccgtacagcgtcggcatgctgccagaagtgaactatgtccagggcgccgatacgatgtttttggtgcaccagggcgtaccaccgcagcgacttcagcgccgcgggcaactcgattgggtgctcgagcctgcgccgttcatcgtagagccgttcgatgaaatccgcgacacaccggaaaagtggtgcaagccttccgttaaagagtttgttggctctgaaattaccctgacgctcagcgatgaagaaccgccggcagacgacgacggcgattttaccggtaccggctgggtcgctgaggatgtgggctcttacgtccgcattaacagtggtctggtgctgattaagagcatcaccagtgcgcaggttgccgtcggtacaatccgaactgacctgagcgccacgcaggcagcatcgccgggggcgtggacacgcgaggatactgtctggaccgccgagtttggttatccgggcgcggtaacgctttaccagcagcggctggtgctggccgggtcggtgaaatatccgcaaacgatctggttcagcgaaacgggcttgtacctgtcctttgagctgggaaccaacgacgacgacgcgatcagctttacgctttcctctgaccagctcaacccgattgtgcacctcgcgcagatgaatacgctgattgcgctgacgtacggcggcgagttcactatcaccgccggcagcgacgcggcgatcaccccgaccaacatatcggtgaaaaaccccagcccgtacggctgcaacagcatccgccccgtgcgcgtcggtaccgaaatcctgttcgtgcagcgcgccggccgaaaactctacgctgtggcttacgaccccgatagctacgtcgcatattctgccaacgatttaaccgtactggccgagcacatcaccaccggcggcgtgctggatatggcctatcagcagcagtccgattccgttatctggatggtgcgggccgatggcgcgctaatcactatggggattgaccgctcgcagaatgttgtcgcctggtcccgccagctcactgacggggcttttgagtccgttgcgagtattccgtccgataccgacgatgtggtgtacgcactggtgcgcagaacggtgaacgggcaaaccgtgcgttatgtcgaggtgttcgacagcgtgctgcataccgatgcggccattaccgggtggagtgaaccaggcgcggccgtgtggtcgggattttcgcatctcgaggggcaaacggtcgatgtactggccgacggctctgtgatgccgcagcaggttgttaccggcggacagataacgctgaagcgtaacgcgcacctgattgaagtcggcctgcactacgacaccacgatcgagacgctcacgcctgaagtttctaccaccgaaggcaccacgcagaacgcgcgaaaacgcaccagtgaagtgaccctgcggtttatggacacgaccggcgcggagtgcaacggccaggtgatccccttccgcacgttcggccccaaaatcctcaaccagccggcgccgcttttcaccggcgatcaccgcatcgggaaactggggtgggaccgcggtgaagacacgctgctcatccagcagcgccagccgctgccgttccatcttctcgcgataattatcacgtttaccagcaacgggggctaa

SEQ ID NO: 196465 - DNA, 564 bp, Klebsiella oxytoca
atggcttccagtgtatccatctgctcaaacgcattgctggcgcttggcgccaacccgataaacagtttcgacgaggccagccaaaacgcgcggctctgctcgaacctgtatcccaccgtccgcgacgacctgctgcgtaaacatccgtggaactgcgcggtaaaacgcgtcgtgctttcccctgaaacgaccgcaccggctttcggcttcagctatcggttcccgctccctggtgatgtgatccgcattttatccgttggtaacgagtacgacgacgtgagctaccgcatcgaaaacggtcgcgtgatggcaaacgaaaacgtcgtttatctccgctacatcttccgcaacgaagacgaatcctcctgggacgctgcgctcgtcaatctggccgaggcgtttatgacggcgaagctggcctacgcggtcaccggctccgccagtctgcgcgatagcctgacacaagaggctgcgtttttgctgcgccaggcgaaagcgatcgacgggcaggaagacccgccggaagagctcggcggttacccgacgtacgaatcgaggttctga

SEQ ID NO: 196466 - DNA, 849 bp, Klebsiella oxytoca
atgtggaagattaaacacttattcatgaacgccgagcagggcgccgaagcgccagcaggcagcacagggggcaacgatggtggcaatggcggtggtgctgaaaatccgggcgctggtgatcctgctggtacttcactgcttagcaccggcagcggtgagccgggcgcggatgactggatacctgagaaataccgcgttgtgggcgaggacggaaagctcaacgttgagggctcagcccgcaaactggcggatgcgtacacgcaccttgaaaagcgcatgggcagcggcgacacgccgccgaaaacggctgatgattatgcacctgaggtgaaagccgagggcttcagctgggacgagttcaaggctgatccccgcatgcagtctttcatgaagtcggcacacgccaaagggatcaccaacgaccagatgggcttcatcatcagcgaatacgcgcagattgcgcctgagctggtcaacggcgccgcggcgctggattcggaagcggccgccacgcagctgcgcgaagtctggaagactgacgccgaatttaaaaagaacgtcggctttgccttccgcgcgtttaactccctggcggacgaaggcgacaaagggcgcatggacgaaatcggcaataacccgatggtgatccgcatgctggcgaaaatcggtgcggagatgcaggaggattcgccggctggcgcggacagcaacccgggcgagcagcagaccattcgcgacctgatgaagtccccggcgtacatggacccgaaacacgccgaccacgagcgcgtttctgcgcaggtcaaggcgtactaccagaagcgttacggcgatcaaaccgtcgcgtga

SEQ ID NO: 196467 - DNA, 234 bp, Klebsiella oxytoca
atgaccacgaaaaaagtatcaccagcggattacaaacgcatttttgaggagatgccaggcggcgccgaggtgctggacgaaatcacccgccgtttcgggcgtgaagcgtacgtgaaaggcggtaccgaaggcgaccgcgaaacctgttaccgggccgggcagcgctccgtgctcgatttcattctgatgcaaatcaaccgtgctgatggagtaaacgacgatgtggaagattaa

SEQ ID NO: 196468 - DNA, 441 bp, Klebsiella oxytoca
atggctcgaccgaaaaaaatcgttgaaacgccggggcaggaaaaagcggcgccggaagaaaatacactcgtcgctgaggggcagttaattacttccgatcagaacggcgcgcagcagcaggttagcaatggcgacgaacagacggtacagcagaacgttgcggcgttgctcgatggtactcagttggccgaacgtaacgccattctgggcacgctcaatgcgcagggtgccgcaattgtcacccgctttgaagaatacgcattcacagactctatcggccacccgctgaccgactgcctcgatttcctcgacctcgtgcgcaaagctaccgacgtatctaccggcggcaccgttccgatggtgacgaacgaggagggcaagaagcaacccacgccgggcaaaccggtattaaccgaacacggctggcacgttccaggctaa

SEQ ID NO: 196469 - DNA, 264 bp, Klebsiella oxytoca
atggccaccgctggcggcgcgatagtcgggtattatgcaatcggtagctgcataattgcgaggccaccggcaatcatcatgatgatcgccagcacccaggcgaagaccggtcgatggataaaaaacttagacatagggattcgtaccttattgcgcgacggacgtcgcggtatcctcttcggccttcacggtgacgccgggacgtactttctgcagaccgctgacgataaccttttcaccggctttcagaccgctcgtgattaa

SEQ ID NO: 196470 - DNA, 840 bp, Klebsiella oxytoca
atggccggaaataatgttaatgaacccgaagtgttaaccgggcacactgatgtgatttgctccaccagcattgaacgtattgttacaggccgtaatgctgcgctgacacggattcaaagccttatcagtgaacttgatgatatctccattctgacccacgatatcggcggtggtacagcacaagagtggggaatgcgggatggccatcgctacgattgctggttcacggaaaaaaccgataaagcaatgaaagcgatgacccgcaatattgatcgccgcatctggcgcgatatgatgaataaatcaggcatgctgaccctgatggatgctcaggcgcgtgacgagtggcacaaaagcctggagaaaaacgatatccccgcgatctctgaaaacaatatccttagtacctttgagcaactgaatcacgacaaacaggccgtttttgagcgtggtgttatcaacgtttttaaagcgttatcgtgggattataaaacgaactcaccctgtaggtttggaaaaaagatcatcatggatggtctggtttcttacaaccgctgggggtttagcttcacacatggctatcgacgcgaccagattgttgatctggaacgtatgctgacactacttgatggtaagctgcttccggacaatcgggctgacattgcctgtcggctgagtgaccatatcggccagcagcggacttctgaagtgtatgacgatgagctattcaggattaattattttcagaaggggagtgcgcacattgcgttcaagcgtcccgagctgattgagcggctcaacgatattattgccagacactatccggggatgctagcttga

SEQ ID NO: 196471 - DNA, 252 bp, Klebsiella oxytoca
atgagttatcattactattcaaaaatttcctggcttcgtaatgagtataacatgatatattattactatttagttcaatgtaattatctttaccaaagaatctatttggcaactctaaatatgcatattgtgaataacctaaatcccatgttttgtcactcgttcgatggtcaggttgaaatggtgttagtacataaaaaagttctttccctttcaatactacatcatatcgattgtgttctgaggtattaa

SEQ ID NO: 196472 - DNA, 216 bp, Klebsiella oxytoca
atggcggttgacgttaccgatgagggcaatcctcagtcgatggttattgcggcgtgtgatatcggtacgcagtcgatggggttcaacgtggcacatatgctgaaaaccggtgattttatggcactgatggcgaaaggtgttgcgaacagcagctcaccgggttacggcacattcagcgcccagcctgtcatgctcgccaccgtcccgatgccgtaa

SEQ ID NO: 196473 - DNA, 630 bp, Klebsiella oxytoca
atgctacagataattggtgcgttaattttactgataatcggttttgttattataaaagcgttgtttaaggcatctctcaatattctaggtgtgatattaggattgagtgcattgattgttgcaggcccacctttattggcgggctatattgtagagcgcgtaacctatgcgcttcactcacgttggctgctgggtgtacctcttgccatagcaggaatggtgattagctttatgtggggacttgatggtaaacatattgcctacgaagcttattcatttgattcaatgaagtttattttaaccgctgcatttgccagtggcctgcttgcagtacctgtacaaaccaaggctattctacaaaacgggcttataccagccgatatcaatgccaaacttaaagagtattattgctgtttttatgcgtcttactttttgatggcctgctctgcggctacaccgtttatagcctggcaatataatatctcatcttcactgatgtggtggacaggattgctatactggatagcagccttactgacacagttctatgcggcaaaccaaattcaggaactcaagaagttaaggaaggtgcgaataagcaggtcatttcttcccaagctgactcgctga

SEQ ID NO: 196474 - DNA, 1188 bp, Klebsiella oxytoca
atgtataaagtcgatacgccgaccaatagcctgcactcgttgcaggaggtgtcttttagtagcctcggttttaccgagcgctatcatcttcaggagtggttggcgaagaaccctcaggcgttgacccgcgataatgatgatgaactgctgatcatccagaaagagttcgccggttttgacgacaccaaagagcgcctcgacctgctggctatcgataaacagcgcaacctggtgatcattgaaaacaagcttgatgactccgggcgcgatgtggtgtggcaggcgctgaaatatgccggttactgcgccaatctgcgcaaagaacagatcctcgacatcttccagctctatctcgacaaatacgagccggaagagacccgtccggcggctgaagtgatggctgagtttctgggatgtgaaagtctcgatgaagtgcaaattaatcagagccgcacccagcgagtgatgatggtggcggccagtttccgcaaagaagtgactaacaccgcgctgtggctgatgcagtttggcctgcgtgtgcaatgctttaaggttaaaccatacaaattcaacgacgatgtgttcgttgatattcgccaggtgatcccgacgccggaagccgaatccttcatgatcggcatggcgcagaaggaagcagaagagcaatctaccagcggcggagttaaagctatcctgatgatccgcaaagccttctggaccaaaacccttgagcgtcttaaaaccagctcctgcacgttgtacaacaatatcagcccttcgaccgaccattggatcagcgcgggttccggtatcagcgccgtttcatggaatctaattttcagtaaaaaagagagtcgcgttgagctgtggattgccaaatcctcggcggagagcaacacctttgcgtttaactggctctatgagcataaagaggcgattgaaaatacctttggtcaggcgctgaaatgggagccgcttccaggcaaaaaatcgtgccgaatctcgtttgccacgcccgccaccagcctcgatgagagcaactggccagcgatgatcgactggctgctggtcaacctgacggcgtttgaaaaagcgctcgatccttttatcgccccactgaatatagcgcttaaagatatttcgaacgcgccggaagaaacggaagaaccagagacagaggaagcctaa

SEQ ID NO: 196475 - DNA, 1401 bp, Klebsiella oxytoca; identical to SEQ ID NO: 158905

SEQ ID NO: 196476 - DNA, 519 bp, Klebsiella oxytoca; identical to SEQ ID NO: 158906

SEQ ID NO: 196477 - DNA, 243 bp, Klebsiella oxytoca
atgatctatctatggacttttcttacaattagtatattgtccgtgagtggctacgtctggcaggtcatgggggttgtcgcatctgtcagctcttttattggaatggtcattctggcaatattaatatattatactaccttatggttgactgatggaaatgaaatgatcacgggttttttccttttcctgtcaccagcctgtggtttgattttccggtttatggtgggatatggtaagcggtaa

SEQ ID NO: 196478 - DNA, 231 bp, Klebsiella oxytoca
atgaaaaaagttatgctggccatttttttagcttcatttactattttcgccataacagcctgctcttctaatcaggctataaagactaccgatgggcgtactatcgtaaccaacggaaaaccaagtattgataacgatacaggactggtttcttacaaggatgcccagacagggaaaaccgagcagataaatcgtgatcagattactaacatgagtgagctggataattaa

SEQ ID NO: 196479 - DNA, 516 bp, Klebsiella oxytoca
atgtgccgctggtgctcaaaaaagcatcctgatatcgacggagataatgggctgggtcgctctcgcggcggtttcggcaccaaaatccatctggcaacagacggaagcggtctcccgttaaatatcgtgttaagccccgggcaggctcatgaaagcctgttcgcgcaacgacttctggacggtattggcgttcagcgtcagaacggcagcatgaaacgccgtggtcatgcagtactggccgacaaagcgtactccggacacgcattacgcaatgagctgaaaaacaacggcataaaggcagttatcctccgaaaatcaaatgagaaaatggcatcggatggacgtgcgaagcttgatcgtgatgcgtaccgaaatcgtaacgtcgttgaacggtgctttggccgcctgaaagaatatcgtcgcatcgctactcgttacgacaaaacggcgagaaattatctggcaatggtgaaactgggctgcatccgactcttttatcaacggttacgtaattaa

SEQ ID NO: 196480 - DNA, 564 bp, Klebsiella oxytoca
atgccaaagataacccaaaaacaaaaggtagagttgaccaggtggtttaaacctggcaactatctggcgctgaaagacctgaccctccgggaactgtactatgagttcgttcttcggcgtgaaatgcacgaacgctatcaggaagcggctgagtccccggatgctgagtggctgctgccagatgtgaacaagagtcaggaaaagctgatttttggtggtaacccgatacttatcaaaaatgttgatttcattgagtcagaggatttgcttgaggattttcatgtaaaaccgcttacagttaagcgggtaaatttgttgatacgcaatatcaaaaaagtggcgggtgtgcaatccgacaagcacaataccctggcaccagaacaaacagacatgcttgaaatgtcgtttacccgatttaacctggaaagtttaaaaaaaggggctgaacaatcagccaacacaggtcgtgagattaatcctgcgcttaaaaacatgtgggaacgccggataaaaaaggccagggaacagatctacctgcaaatcgatttaggctgtgtcccttaa

SEQ ID NO: 196481 - DNA, 249 bp, Klebsiella oxytoca
atggtcaactgtcccgacaaaatattaggggtttacatgacttacaagcgcgacagatatctgcttctcgctcattgcggggtttacatggtgcgaatcgttataccgtcctacatgaagccttacttcaactgtaagcgctacaacatgaaatccatagccacgaaagatatcaggcaagcaaggcttttcagagaaagtatacgcctcgttaacactcgacattgttttgttcgagtgttactttaa

SEQ ID NO: 196482 - DNA, 126 bp, Klebsiella oxytoca
atggcgggcaacaagtggcagatcagcgatgaactctgggagaaaatggcccgactcatcttggaacgcaaaattcaccccccactgtgtacgcatcgcaagcgcgttgataatcgtgcggcatga

SEQ ID NO: 196483 - DNA, 954 bp, Klebsiella oxytoca; identical to SEQ ID NO: 129148

SEQ ID NO: 196484 - DNA, 720 bp, Klebsiella oxytoca; identical to SEQ ID NO: 129139

SEQ ID NO: 196485 - DNA, 669 bp, Klebsiella oxytoca; identical to SEQ ID NO: 129140

SEQ ID NO: 196486 - DNA, 1545 bp, Klebsiella oxytoca; identical to SEQ ID NO: 129141

SEQ ID NO: 196487 - DNA, 690 bp, Klebsiella oxytoca; identical to SEQ ID NO: 129142

SEQ ID NO: 196488 - DNA, 1005 bp, Klebsiella oxytoca
atgtctagcggacttggtggtttaaataaatcccctcatggggtagtcatcggcctggcgcagttggcgctgcctgatccccacagtagggaagccttgtggcagcagacgcaaagcgtcgtagcaatggtaggcaaggcacgccgaagcatgcccacgatggatctcattgtgtttcccgagtattcgttgcagggcctatcaatggatacctcccctgaggtcatgtgtagtctcgatgggcccgaggtggccgcgctgcgcgcagcctgcgtcgaacaccgcatatggggctgcttttcgattatggaggccaatcctcatggcaatccttacaatagcggtattatcgtcgatgatactggagaaatccgtctctactaccgcaagatgcatccttgggtacccgttgagccatgggagccgggcgacggcggtattccggtatgcgacgggccgcgcggctgcaagttggcgctgattatctgccatgatggcatgtttccggaaatggcgcgtgaatgtgcctataaaggcgcggagattatgatccgtaccgccggctataccgcgccgatccgccacgcttggcagatcaccaatcaagccaacgcttttaccaacttgatgcaaaccgccagcgtttgcatgtgcggctcggacggcacctttgactctatgggtgaggcgatgtttgtggactttgacggtacgctcatggccagcggcggtggtcgtgccgatgagatcgtctgctgcgaaatgcgcccggatctggtgcgcgaggcccgacgtcactggggcgtagaaaataacatctaccagttcggtcaccgcggttattcggcggtacggggcggggcgcgcgactgtccctatagctatatgcacgatctgaccgcaggatgctaccgtctgccctgggaggacgaagtggttcataccgacggtacatcttgcggactgccagcgccgcagcgcgactaccttgctaaaaaggaataa

SEQ ID NO: 196489 - DNA, 921 bp, Klebsiella oxytoca; identical to SEQ ID NO: 129144

SEQ ID NO: 196490 - DNA, 1107 bp, Klebsiella oxytoca; identical to SEQ ID NO: 129145

SEQ ID NO: 196491 - DNA, 1107 bp, Klebsiella oxytoca
atgtccatagatcgtcgtgattttattaagctggccggtctgttcggcctaggttgcgccatgcccttcactatggcgcgcgccgcagataagccgctggtagtgggctttatctacgtcggtgcccgcgatgacttcggttataaccagtcacatgcccaagcggcggccattattaaaaagttgccgaatgtgaaggttatcgaagaagaaaacgtgccggaaacagtcgcggtgcagaagacaatggaggcaatgattcgtcaggacggtgcgcagctgattttcccgacctcattcggctatttcgacccccacgtcgtcaaaatggcaaaaaaataccccgatatccgctttgctcactgtggcggcctctggcaggagggtaaagatccgaaaaacgccggcagcttttttggttatatcgacgagggccagtatctcaatgggatagtagccggtcatatgagccaatctaaaaagcttggctttatcgccgctaagccagtaccgcaggtgttacgcaatttgaatgcgttcactctcggtgcgcgccgcgtagatccgacgattactgtgacagtgatttttaccggcgactggtcgctgccggtgaaagaagcggaggccgctaacagcttgatcgatcagggctgtgacgtcctgacctgccatgtggatggtccgaaggttctggtagagattgctgagaagcgcggcgccatgacttgcggttaccacgtcagccaagcagcactggcgcctaagggctatctgaccggcgctgagtggaactgggagacgccctaccgcgttcacgttgcggcggcgcaaaaaggcgaaccgatgatcaacttcatgcgcggcggtttgaaagaaggctttgttaagacctctccctatggcgccaaagtcaatgacgcagccaagcagcaggccgatgacattaagggacagatgatgaacggcacctttaccatctactccggtccgattaaggataaccagggaaagttagtaatcccggagggaaccatcaaggcgcaaactgatgtctcgctggagagcatgaactggctggtggaaggcgtgcgaggtcaaatctga

SEQ ID NO: 196492 - DNA, 1785 bp, Klebsiella oxytoca; identical to SEQ ID NO: 129147

SEQ ID NO: 196493 - DNA, 300 bp, Klebsiella oxytoca; identical to SEQ ID NO: 101412

SEQ ID NO: 196494 - DNA, 1083 bp, Klebsiella oxytoca
atggaacagattaaaatattaactcttttttttatgttctttatttttcctgctctaggtcataatgactatacgccattttatcacttgggtgaggatctatatgactctaacggtaaagtaattaatgcacatggtggtggaattacaaattataataatactttctattggtatggggagtatagagaaaaaaaaggacctgtaaaaaagggatttagtctttactctagctctgacttaattcattgggataacagggggctcgcttttgacattaataaaaaccaatctctttcaaatggagatattcagagtggagctatttttgaaaggccaaaagttatatatgataaaaatacaaaaaaattcttaatgttttttcatttcgaaaggaaaggtgaaggttacaagtctgcgttgattggtttagccacttcgattctaccagaagggccttttgagtatatacgctcttttagattaaacgcaaatacattgcctcatggaataaatgatataaatcaaattgaaaaaggttctaggtttaaacatgattatcatgatggtcaaatgtctcgagatttgaatgttttcgtagacacagattcttcagtgtatttagtttctgcatcggaaaataacagcacgcttataattacaaaattaactaaagacctcatgcatcttgataagttttttgtcagggttgcaccaggtggatacaatgaggctccgattcttttcagaaaggataatttttattatttaatcacttcaggtacttctggttgggttcctaaccaagctcgtttatttatggctaaatcaatagaaggacattggagttatattggatcccctgtactaagttcgagcgagcaagatgtgaaaaccaccttctattctcaaggggcatttataattagttataaaggtactgactattttgttgcagacagatggaatcagggggatctttctgcaagtaaatatatctggataccaattaagtggagttacaatacacctaaactaactattaaaaaactaaaggatgattttaatataggtgagtattaa

SEQ ID NO: 196495 - DNA, 1125 bp, Klebsiella oxytoca
atgactacttctttttattcagattttacagttgttaaatccttaagtgactgtagactcattaacaatgatatgtgtaactttgagagttatagcgaaggatttattttaccctataagaaaaaaagtaactcttggggtattggtggtgtactttcagaaaacagaaaatatatcaataattctggttataatggttggacgtctttcggcggggaatatgaattcgaagactttgatatatctgaacgagaagtcatatggttaggagtcatcattaatcattggggacattttttagttgataatataagtaggttgtggttctcactagaaagcaaaggaaaatatcacatcgcttatgttagtgaagattttgatttacatgagaatatgataagattttttgaacttttaggtattgataaaactcgattaataagagtgactaaaccaacgcaatttaaaaaaataatagttcctgattattcaaagactgattcaacacatagtcttaaatataaaaatatttttgatgagataatatttaattgtaattatgaacatgttagtgatcaagttcgtaacttatctgggaaaatatatctctcaagacgaaattttatatctgcttcatcgcgtgaatacggagaggaaacaattgagtatattttcaaaaagctaaattgcgacgtggtatatcctgaattgctaaacttggatgagcagatctatttgtggaataactcaattgaaatagtgtgtatgaatggtacaattcctttgaatgttgttttttgtcgtaatcaaaaaactaaaataaccatcttgaataaaacgagtcgagtccataaaaatatttatgattttattaagatattctctattaaacatgttgtttttgtcgatgtctttaattcattttgtgatcgttatgtcaaaaatttaggcggtggaccttttgttcttgaagttacaccaaaacttctcaattatttaaaattaaacgagggtgttgatattcctaaatacaaagataataagatagggaagtttatatttttatatcgctttcttatcaaaaggacgctaaaaaatgcagtgaagacactgttgagaatgtaa

SEQ ID NO: 196496 - DNA, 159 bp, Klebsiella oxytoca
atgatagacttctcccaccctagaaaaccaacggaaaatccgtttattaagtcatttaactgcagtctgcgagatgaatgccagaacattcactggttcctttcactggaagatgcgcaggaaaaactcgacaagtggcgcaggaaatataatcattag

SEQ ID NO: 196497 - DNA, 123 bp, Klebsiella oxytoca
atgaaacagacccgctataccgaagaacagatcgcttttgcacttacgcaggccgaaaccggcactcgtgtcgggggagtctgcagaaagatgagcatttctgaggccactttttataactga

SEQ ID NO: 196498 - DNA, 855 bp, Klebsiella oxytoca
gtgaacactataatatttgttattatctataataaaaaggtcgaagactcaaaaacaattttaagtttattggaaatgcaatatgaaaattatgatttaaaaattataaacaatggccctgaattgatagatgttaattatgttgaaaatgaattgtgtaataaaaaaataaatgttaccttagagcaatatgtagaaaataaacctcttagtatactatacaataaattattgaaagagaactatagttacgacagatttattttttttgatgatgatacactaataccagcgcgtttttttggagatataaactcttcattttacaatggactggacttgcaattaccaaaaataatatctgactttgataaaaccatttactatccattggtaaacaatgttgtaatttcaagtaacgcagagaagataaaacttaagaatgatgattctattttttcaattggttcgggattaattatatataaatcattattacaaaaattcaatattaataataaaaagctatttgatgagaggtttgctttttacggtgtagatgttagcctttttaaaagaataaattttttaaaaaaaacaggtacattgtttaatatacaactctgtagtgaaatatatcatgatctgtctcgtgtgaactctaagaataattttttcagagaaagagaaagaatgtacgattctgttctttctaaaatacattacagcaatggtttagttgatagtatcttttttattacaaagaaaggtctgaaatatattttaacattaaggtttcatttgttttttctcttaattaaaatcttattaatccgaaaacatcctcgctgttaa

SEQ ID NO: 196499 - DNA, 861 bp, Klebsiella oxytoca
ttgagtaatgagtcattagtatcaatatatattatcactagaaatcgtttgcctttattaaaaagatgtgttcaatcagtatgcgaacaaacttattccaacattgaaattattattgttgatgacaattcgagtgatggtactgttgagtatcttgtgaatatagcggctattgacccccgaattaaatattttttcaatgatagaaatagaggggcttgctactgtagaaatttggcaatagaaaatgctacaggagaatatattactggagttgacgatgatgattattttatgcctgagagggtatctttattcattgagaacaaacaacttctgagtgagttttgtgcgctattcacagatagtatttggaaagttaaaactggttttaataaggcgagtattaataggttttttcctaataaaataactcataaagatctcttggcttttaattttataggtaaccagatattcacaaccactaaaaaccttaaagaaaataaatttgatgttgaaatgccagcttggcaagatttagattgttggtataatttattaaaaaataccaataagaaagcatataagttagataagcacaactatgttcaagatgtttctcatgatcacgagagaattagtctctctaagaaagaaaaagtaattcatgcataccagcttttttgttcgaagaacaatttatcagagagcgaaaaatgtatattaagcaaccatttttgttcatacaaattcaaaatgggatcactaatgtatagtggatggcaactgttattcaaacacggcattataggcatgttaattttattacgtaacattcgcgagttatataggaattag

SEQ ID NO: 196500 - DNA, 837 bp, Klebsiella oxytoca
atgaaaaaaatcattttactcttatcattaacaacattaatctcagggtgttctgttgatccagcgtatcaggcaaaaagagaaaagcaacagacgatgatatcccaattcgtagaagcggctaaacttggagaacaggtagaatataaaacatatttcgccaatgaaataactccatactttctttgtaacaacctaggccgttttgggtataaaatgaattgttataaagtctataaggaagtaagtcctaaactaaaaacagataatgaaacatacactcttgtaatggacaaactctattatgctatcaatggtagcgaggatgccatgcgttaccgtcaaaacaaggcctatgagtatgctcagaccattccgaaggaacaatatactcagatgatgaatgagttatatgatataatgagtggcattgataaagctgacgaaaagtttcagtccagcacacttgcaaattcattaccattagcaatagaagcatcaaagctttcacgacaaagtgctttagttgcgtatggttatacagatatgaatgaactaggcccccaaataaagaaagctaaagcactagaggcaaaggtaaaacatgctaatgaaaatgccgaaaaacgcatgaagcatgatatagcaaaaagatgtttcagcctcaagaactggatgaaaaaatatgatcaccatggttttgaatatattgatttctatggtaaaacacgcccttcaaacgctagtctcatgaattccatgattggccagaatataagcacgaaaattctcaaagtcaacgctaaatattgcaacaataatcaattgatgaactaa

SEQ ID NO: 196501 - DNA, 351 bp, Klebsiella oxytoca
atgcaagccaatgagctggttagagtattgaaaaacgactggcagggatcaccttgtagtaacttctgtcacgggaaatatacggttggacgatttcatctgacagaaacgttcatcgtaaagtatatgatgctggtacatgaaatcgatataccggactcatgggttagtaatattttcactgacacatcagatatcgatacccgcaaggttatgtatatggagtgtagcgatatcttgtcaatggacattatgaatgagattcgtaatgcagtgaaatcaccgccacacaacgcgaagatataccgaaacagcatgcatgttactaacatcgaaatcatggaagaataa

SEQ ID NO: 196502 - DNA, 873 bp, Klebsiella oxytoca
atgaaactgttaaaatcatacaaaatcattatcttacaatcgttgattctttcaggcacgacacttgcagcaccgggcgacttcaatggtttccgcaatattggttctatagatgagctaatggcacttccacaagaggagctttgttcgaacggtggaccatcgcgaaatgaaatccatcaaatactccttaacgggccactagctctacctatgtatcaaaatgatccaaatgcggcccgcatgcttatcaatgaacaatcccagaatatctgggccaagattaaacaaaaatgttcaaccaaagagaatgtttccactcgaaaacttacgagagcaatgcttcgtaatgaagaggaaatgtgcaaagctggtgtgccaactaaagatgaaatcaagatttttataaaagaatcgcacgaaactgatattgatgagcagctaagaaaaatgccttatgagggacgccttcttatagaggaggttgcaaaatttcacggaactacagtacgtgaaatgttcattgatgatgtagcaaatgatgtggtcaaaaattgggaaaaaacctgttcagaaaaattatatcttaaaaagagtgaaaaaaaatccacgcaagaaagaaaggacaataatccatcttcaaatatcaaaaacgaagataactccgatttcagtcaaaaagcatataacatcagcgatcaaaaattaaacgatacatggaataagttaagtaaagatctacgtaagagattgctacctgcacagcgagaatggataaagtcgaaatccatttgcaatggtaattggggatgtctcactgatatgacggacaaacgtactcttgaactggaggctgaaaatgcaagccaatga

SEQ ID NO: 196503 - DNA, 723 bp, Klebsiella oxytoca
atgaaaaataacgactttgatatcctttttgaagaggttttaaatgagtttgagaaagcggtagtgaaagtgaaaacttccactcactttgagccgtgttctggcgaagagatggtgcgtaagctcgagaaagatgcccatactgccattactgattaccaaaaatgcaggattcagccttacaaacatgcttacagggaacgtactgttgaagagtacataagcagtatgaagtctcaagctatgtggacgggtacacccagcaagcttctggaatgcgcttttgcatcgcataaatggggaatatctcggtacagacagggccgcaaagctgaaggccgtaaatatgttttgatggcactaaatttgataaacatgtggaatggagcctgctgggctctggaaatggtagaatttaaagaagagtctaataagttaaaacgagaagcagcaagcctcggtggtaaaagaaagtcgcagaactacaggccagtcaaggatgaagtcattaggctattaaagaaaaataagcctgaagacgggtggaaaagtaaagctgctgctattaattctttagaggaagagatttctaagtttattgaacttgatttccataaaaatagtaattggacatcatgggataaattatataggaccattagcgactggtctagaaatgacatcgaattgaagaatgctttcgctgatgttgtaaagagataa

SEQ ID NO: 196504 - DNA, 1446 bp, Klebsiella oxytoca
atgagtgttggagttgtaaaagacaaaaaggctacttacccagtagaatacttccctcaaataatgcggaatgcaattgaatctgtagtaagggatgttcaggctcctccggaacttgtgggtaccgctatattgggtattgcatcacttgcgttgcaggggttaaaaaaaattcgttatcctgacgggcgagtcaggcccctctccttatatcttaccgtgattgcagactcaggagagcggaaaactgctgtatataacgtggtaggtcaacctgtctttgcatttgagaaagcctgccgaaagaaacatgaaatgctaatagttgattacaatgcagaacttcaatcatggaaggtacaggaacaatccatattgaagagtatccgcaagaaaacggagaaaggtgtcagcattgaaagtgaaaatgagcggctgaagctccattacagaataaaaccgaaaagtcctgttctgcctaagatgatttacaacgatactacccctgaggctttacagtcgggattatacaacaatataccttctgcgagcctgatgtcagatgaagcaggggtattctttaagggaagagctaagagtaatttaggttttttaaaccagttatgggatggctcttcattcgatgtagaacgcaaaacaggcagtttcactgtagatgattgcatgttcaccatcttactaatgatccagacagatgaattcgaaaaatatgttaaaaaacaaggggattatgcagtgggttccggttttttctctcgattcatgattaccggagtcacctctatgcaagggcgcagggacacgaagacagtacaaaatgcaggaggagatagcctgagattatttcatgaaaaaatcgaagaggcgctatccagttttgaagaaatgtgtaacagtggtactgttacacatgattactatacactctcagaacaagctcagactgctttatccgagtaccagaaaaaggctgaagacgctataattcaacacaaagacaaatcccctctttttgaaggcatgttttctaaattctcagaaaaccttataagagtggctgccttatttgaatatttcgacggtgacaattcaggagttatttcctcaaagaatgttgtaaacgcctcaaagattgtgattttttattattcttacttactaacttcgggtggtttacgtagtgaaacagtggatcagaatgctgatttactctatgcctggctggtctctcgcaaagataactactatagttataccacccatataaacaaaatggaaataagaagaaaaggaccttataaattgagaaataaaatcaaactcaacgccgctttagaattccttgaacaagaaggaaaagtgggtattcagaaattgagaaacaacaatggaactatgggcgaaacaatcgttatcaatcgataa

SEQ ID NO: 196505 - DNA, 948 bp, Klebsiella oxytoca; identical to SEQ ID NO: 102272

SEQ ID NO: 196506 - DNA, 519 bp, Klebsiella oxytoca
gtgcagaagctttatagccgagtgttcctcacccgttttgatcttcgcctccctgagttcacttctgtagaagctggtaacgaatacatacgcaaactgttcaagcgattacgtgcacgtctgagttctaggaacaacggtttatcggaaagaataatcaactttgcttatggctgggtgtgtgaacaggacaaggcaccgcaaccccattatcattgctggattgcgcttccgcatagactggtaaaccggtttggtactccagactgggggatcgctggtattattactgaaatctggatgaaactgacaggtggtaaagcgacactggtaaacttgcctagggctactaaagactatcctgatcactacgttactcaccgtgacgaccctgagacacttgaaggtccggtattctggttatcctatctggcaaaagagcgaagtaagttacagacagggaagggaacacgaaactattcaacatcgaagctgagttgcacaacgcagaattcgtaa

SEQ ID NO: 196507 - DNA, 936 bp, Klebsiella oxytoca
atgaatattggttctccttattatcacttcaatgaagatgttcaactattaggagcaaagagtaaaggaagagtaaataaacttttagaatgtgtagcttttgtgaaaaaaggatgttttgattatataatcattatttcgatgggaagactttcagcacaaatattaccccttttaaaactcgcaaaaattaaaagcaaactaatatgtagcgatcatgtttctatccgttctttcccaaaaatcatacaaaaaataaaattttttgcttataaatgcagtgatgctgttgttgttttaacagataatgatcgcagctatttaagtaattttattaaaggttcgtgtgtcttgactgtgagaaatagttcttcgtttgagcatgacgcttattcaactgataatatccctttaaaggaaaagatagttttaggcgtgggtcgactaacttatcaaaaaaattttatgaggttaattaatatatggaagaatattgatacaaatggatggcgcttgtgcattgttggtgacggcgaggaaagaaaagagatccttacgttttgcgggcagaatggaatagataatgttgaagttcatgaggcaacaaataatattgattcgtggtataaaaaatcatctgccctagcaatgacgtcaagatatgaaggactaccaatggttctgattgaggcaaaaaattttggagtgcctgcgattgcatttgattgtcaaactggaccagttgagatcattgataatgacggctatgttattgattatgatgatgataacgagttcggtaataaactaagtcaaatattacatgatcctcaattacgccaaaaattatctagttatgcgctagagaattcaaaacgatatacaacagctaatatttatcagcaatggatgacagtatttaatagcattcaataa

SEQ ID NO: 196508 - DNA, 429 bp, Klebsiella oxytoca
atggacaaaaacatcatcaatctagagtttactctagaagagcaacttatcattattgtcgataagtatatctcaaaaagataccagccaggcgataaaagtttctcataccagctatacctgctttttgttggctatcatttaaagtatttctacccaagacagctatacattcgctctaatcgtaacatagacaacattatgacgatgttcagttctgtatacaaatgccttacaagtactttgttgcagcgattgaacaataaggaggctgttatcagagagctaaactctctcgtgaactatattgacaacaatcaagaaaaagcagaagaaatctatacaatttttaaagctcagtatgaaatgagagttatagagaaagaaattactcacgaagttgtaaaagttagaaatttgcggctttaa

SEQ ID NO: 196509 - DNA, 702 bp, Klebsiella oxytoca; identical to SEQ ID NO: 120246

SEQ ID NO: 196510 - DNA, 321 bp, Klebsiella oxytoca
atgaaaacattagtaattgccaccaccattttaattggtacttttctaagcggttgctctgtgcaaaatgataaaacacagtttcaaggcctgggtctgacatatcagtccgatgtcaaaaaactggataatgggaactacctcactgaggtagaagctgctcctgctgcaggtcgtatacgaggcgctattggcactgcaacaaaaaaggcttctgatttctgtagggtacaaaataaatctatgaaagaagtcagaactgatattgatacacacttacttgttaatggcgttgctcgcctgacgtttaaatgcgtttaa

SEQ ID NO: 196511 - DNA, 297 bp, Klebsiella oxytoca
atgcgcattagtggacatcaccccacgccacgcggagccgtgcatgttgccggacacggtgatacggccagacggagtaacggctatcgaatagacgttgtggccgtcgagttctgtcggcgcattcagcggattgcccgctattgtgctcaggtcgaatacagcccacggcccgccgtatttattgcgctgcataatgaccggattgcggctggcattaatcacaatcacgtactgatagttaccggaaacgatgatgttgttctgactgtacgggctggagttgtaatcccataa

SEQ ID NO: 196512 - DNA, 438 bp, Klebsiella oxytoca
atgcataagataaattatagcgatgatatagatctatccaaaacttcccgccgtggtagttttaataaaagtaaaattccttcagaagcagtaagaagctattgtgtcagtgtccgattgaatgttgaagaactgcaactccttaatataaagcgaggctcttataaaaaaggcgagtggcttcgcatggcttcccttcaaaagttgcctcctgttataccaacgattaataccaaagcctggaaagctttaactgatatatcgcaaaagctaaatcgaattgcgacccatatagattgtaaaagcaaggacagtcagcttacccatactgaattgttcgctgtgaagcgacaactggaagagcttcgcacgaatcttttaagtgacagtatatggagcctcccgaatgaagggtatgcggaagattcgcaggggtaa

SEQ ID NO: 196513 - DNA, 225 bp, Klebsiella oxytoca
atggctccggaagagaatgaaggtccctggtcgctgtttaatatcctgagtggtaacggcgctgatatgagtgctgaagctgccgggattgcatcctgtctgatggcttacagccaccatgcctgccgcacggagtgtgatgccatgacggagcattattaccgtctgcgggattacgcgctgaaccatcctgaacgcaacgccattatgtacatcatcgactga

SEQ ID NO: 196514 - DNA, 144 bp, Klebsiella oxytoca
atgaagggaggactctcggggcgcaccgcacaagggcgaagcaaccgtacccgtgctgtgaacggtatcgacggcgatgtgaagcttaaccgtgcgctgtgggtgatggcagagaatatgctcgaactgctgggacaggcatga

SEQ ID NO: 196515 - DNA, 867 bp, Klebsiella oxytoca
atgcatagcgaattattaaaatggtttattagcgtacttacatcatctttatttatctctggggtgggttacttatttagggatagtcttgggaaatttctcactaagtcgatagaacataaatttgatacaaagttggaaaaatataaatctgaaatcagagagggtgaaaaagaaatagaacaaataagaagttatatttccaccttaagaactagtagggactctgttctccagtcaaagcggtttgagtcagctgaaaatttaataaaaatacgtaaattccttagtggattaactctcgcggtgcaatatatgcagatgctcaatgttaaagaaataatgaaaatgggggatgatcaaagactcaatgactttatggaagctatcacaagaccgttagatatcaatggaaaattagaagggtataatgtttttgataaggaaaccatgaagttatatctgagtaaaagcactatcaattctttcgaaatatatgaatttataactatatatgctttaatttctcttcagtttttatcaatgccattggccagaaaacacaatatcttaaatgaaggaacgctaagtaagaagataattgattcaatacctgcttctaaagaaggttttgaaaaatttggagagggttatatttatcactggcatgattatttttattcagatactttaaataaacttagaaatgagttgattggcgaaggtaatatgctcaatgatacaaagtctgcagaaaggcttgctttagactttaagaaaacacaagctaatattaagcaagaattaacagcatatggattatctcaaggtttgattcatgaaggtggtattgaacccagggagtga

SEQ ID NO: 196516 - DNA, 354 bp, Klebsiella oxytoca
atgaccaattcaaccataaccagagagcagttaatcgaaaatctaaagcacaggattgcagtcactgaaaaatatccacacctggaagaggcgcagattgactcgcaaattttcaaaatagcgctggccgcaatggacagcgagccggtggcgtacaccgacgaacagattacccaagcgatgatcgaaaagctggaggtaaacaagcagcgctcatggccggagccaaaagacggggaaccaaggctgcacatcaaagaacgacctcgtaaaaaagtagaccgctgtgatgtttgtactgaaggtgctcgcggcgggtgtgggacatgtatttttaacggtaaatttgaatga

SEQ ID NO: 196517 - DNA, 711 bp, Klebsiella oxytoca
atgaaggcgtggaaagcgcgtcacgctttcataagtttcgcgcaccccggacagataaatctggcatctgaatattgccagtccttcgctctcgacaatggcgcatttaccgcctggaaggaggctgggaaaaacaaaatcgactggagcgattacgacgagtttgtggctcgttggatgaatcaccccggattcgatttcgccattatacctgacgttatcgacggaggagagcgggaaaatgacgagttactgcttgcgtggccgcatgggaaattcatcggcgttccggtatggcacatgaacgaaagcgatgagcggtttatcaggttgtgcaacgagtggcctcgggtggcgataggcagttgcggcgattacgacgttaagcgaccaaaccttgcagtcgccagaatgaaagaccttatcaggcatgtgattgatgaatacggccagccgataaccaagcttcacgggttgcgcatgctcaatccgttgattttcacaaagctcccgcttgcgagcgccgatagcacaaatgtcgcccgcaatatcggcatagataaagcctggtctggtgcctacgcgccagcatcgaaagagactcgcgccgccctgatggtggaacgcattgaatcgcataatagccccggttcgcttgcatattgcgaacagcgtgaccggttcgacatgcagctgcaactggcagtgtaa

SEQ ID NO: 196518 - DNA, 183 bp, Klebsiella oxytoca
atgaaagtcaaatgcattagagataccgaaggctactggtctgaaggtgaaatgtattcggccatcattgttactggcggctttattcaagttggaatgatgacgagcctgataacactgaaggatggagcgctgagccaatggaataccgggaagacggctcaatcttttatcaggttatag

SEQ ID NO: 196519 - DNA, 129 bp, Klebsiella oxytoca
atgaactcagaatccttcagcaaccgtcctctaaggaaggcgctaattctgaactgtatagcgctgatcgcaattatcgttctttcagcattgggtatctggctggttaacgaatgggtggctgcatga

SEQ ID NO: 196520 - DNA, 360 bp, Klebsiella oxytoca
atgtccgaaaccaaaaataccacgccgtttagccagcagctggcgtacatcaacaaaggcactctcgatgccgagctgactgaagcgctggccgaagtcatcaaggctgtacgtgaaacgggtaaaaagggagctgtgacccttacccttaactgttcaatgctgaatacccgtgacgaaaacaccatgaaggtcacgccaaaagtaacccgcactatcccggaactggaccgcgccgataccatcatgttctctaccgctgatggcgatctgctgcgtgatgacccggcgcaagttcagatggatttgaaagttatcgaacaagcgccacaagctgcgcctattaagctggcccagtag

SEQ ID NO: 196521 - DNA, 189 bp, Klebsiella oxytoca
atgaatacctacgaactcacatcgaaggcccaaccgacttttgaaatcgtggaaaatggtcctgatgcgacagactatgttgtcgatacggtcaaaggtgagaacgctgcgcgtctgagagcaagctcatatcaggatcgcaacggatatctaggttacggatacaccatccgacctttacaagcttaa

SEQ ID NO: 196522 - DNA, 516 bp, Klebsiella oxytoca
gtgggtaatcaacctgattggaaagtcgagaaacagccagcctggctggtggccgcaatcaaaaagacgatcgcggaattacctggcgggtatgcagaagcagccgaatggcttgatgtgactgagaattcgttgttcaaccgtctgcgtgctgatggcgatcaggttttcccgtttgggtgggcaatggttcttcagcgcgctggtggttcacaccatatcgcgaatgctattgcgaaagcctctggaggcgttttcgtaccgcttaccgatgttgaggatgtagataatggggatatcaaccaaagactgatggagtcggttgaatggataggaaaacactctcaataccttcggaaggcaaccgctgacggcgtaatcgatcgcgatgaacgcgctcaaattgaagcgaacagttaccaggtcatggctaagtggcaggagcatttagcgctgcttttcatggtcttctgctcccctgacgacactccaaatggaccttcaaattcagggtaa

SEQ ID NO: 196523 - DNA, 579 bp, Klebsiella oxytoca
atgtcaaagaaaagcaaaaaaaagaaaaaaacagcagttaaggccgtcaccgcaaggaaatgcggacaatgttcggtatgttgtacttcactccttattgatgagcctgagttggcaaagccagcaggaacatcctgcaaacatcttgctacaacctcgggatgttcgatttatgaagagagaccagaggtctgcaagagttggtattgcggatggcttaaaattgagacgttgccacatcaacttaggccagataagtcaaaagttctaattacgattaacccgcagcctggcgtaacctatcaggtgcagcccataaatgacgagtcagttacatcattgttagatgaccatgtgctgctattcattaggaacgccattttaacggactcaccggtagccatctcaataccgacaaagcccggatactgtcaacgtattcagctgataagtgatcttgtaagggatgagcttgaagacagagtcgccttccgcaataagatgtgcgagttaattagaatcacatccaccctggtcaccgataaaaaaccagagataattcacattgaggcactttaa

SEQ ID NO: 196524 - DNA, 198 bp, Klebsiella oxytoca
atgaacgagcaacaggtaaacgcgctgatagcagcgctgagcgaacagaccgcagcacagcgggagcagacggacgcgataaaccgtctggctgaatcaaacatggctctgtgtgatgtgatcattcagtctctggccggtgaagaggatgtgcaggcagagccgcaaacctatctcagcgggaaacccagggggtga

SEQ ID NO: 196525 - DNA, 3837 bp, Klebsiella oxytoca
atgaccaaatataaaaccaacaatccgttgggttcggcggctgtcaaagatctttatgacaacgctgaaaatttagatattgctataaacagtattacacttgccatctggaaagaccgtctcggaaaagaaagaaaaacatggcacggaattgaatctgactttgccacccagattgcatcacagcgggatcagtttgccacgcaaataactgctcagaaaagccagtttgaaggccagatttcagaacagcatgatcaattcacggcacaaatcacggggcaaagagatgaattcaacgacatgctcgcagcctcaggctattcgtggctgaaagattatgttgacgggccagttacatttacaaaccgcagtcaggtcacagtttataatggcgtggcatatcgccttgctgcaagtgcgcctcttggattcacgactacaggcactgatgcaacgagctgggaaaatgattctcagtatcttgttgctattggtgacaatgatatccgtcagcaaattcagtaccagttaggacaatggcttcctgatgctgtttctctttttaatgtgaccactgattataccgcaataagggtcagagggttttatttcgcctatgacggcggtgcaggcgtatggattaaaacaggcaatatagatatatcgaaggcgggaagtcatgtagttgatgaggcgaagatttataacgcaaatggtttggagtatgcgctggatgttagttatggcgaaattagcgtcctgagtaatggcgctaagtcgtattcatttgcaaaacttctagaccaaacaaccgacaactttgtctgtcttggtcaagtgataaatggaattgaatcacatttaactcttggaatatctactgctaatgaccgtaaaacatatgatggtggggctcgcctcgatattatagtgccaacaaacgactatagaattggtaaaaaatatgccaagctctatactggtgttgattattatttgaataaatccaggatctttattcaggctggagcttcgtataaatactcggttacaggtaaacgccttaacggtttccaacatggcgtggatgagattacagaaaaatgggaggctgtaaacaaaggtatttattggggttcagttagcctacagaacgttaacatttacggtggaaccatttctggagaccatgatattcgctctttacgcgattcatgttctgctggggtagggattctggttttaaacccggaagggttttctacgcatggtaccgtagttcgtgaggattgcttgtgggccgttgttgaaacaacggcagaagttgaggcgaccgagtttaataaaaatggccacgcttttgacaataatgaaatcgattatgaatatattgttcctgcatggggtaatgcgggtatcactacccgttttggcaactttaaccgcaccacccactacaacagtaaatttatgggcggtcgccggggtacgtaccgcaatggttgtgactggtcagctctgtacaactgtgaagtaaccaaccgtctggcatggcggaatgcggccaacgtgtccggtgatatacccgaatatatcgccgtgtgtactggtactgttctcgatgtctctggtggctactggagtccggcagcagcaaaagattataatgcgcgttacgggactgtatattcaactgcgcaaaaccattcatttaaagctgtttatactgaatggacctacaatttcttgactgtaagcgcatggggattcaatggtaaggcgtctcgtctttccggtcttcaccttgaccttatcagccagtataaagataactttactgaatattcttccttgcgttttgagggagggtgttttccgacaactgatgatggtggtaactcgctatacccggacggcttctatcattacgatacgccgaacggtgtatcacagtttgcgtggggaaccccaatccgagatctgggagcgttccgacatggcggattcgacttttactacggtacatataacgtatatgtatttagtggcactgactgggattcaatacgtaaccgcccgtatgcgaaagaaatgtttaacgcaaacggattgcaagtaaacgcaaaaccagtcatgttgccatggcaaaacccctcagttaagtcacatatttgcatctggtataaagaccactcagggaattttaatccgcgtaatatatatgcgtggattactgccgccacccaggatggaccaaatactgatgaggcgctatataagtcttttgccgagcatatgtttgatttcggcaatgggacaaaaatggcgatgatcccgaataaaaggctgacggcatgggatggcctgtacacgtatgcgcgaaattgtggcgttatggtagatgtgcccgctgacggtagcacaccgataacgcttattgcggtagaggcttatcaagggggcgttccaatgtttccagctggctgcggaaactacatcccggaagcgaacggtaattccgtgttaagtccggtctccagccctgttggcctggacagctctctgggcggcggtcttttcttccccggtgatattatcggtccgtggtcgcatgtgcggcgtacgcagagcggttacatcatctccccgacactgaccagcggctacacggtggaccagaaaatggtgacaggcggctgcacgctggaagctgcatttaaagtggcattcagcgcgaccgttgaaacggtcaacagcaacggcaccaccatcatcaccgtgcctgcggcatacctaccgtacgttgctgtgggtataccgctgtatatcaccggcggctcatcaaccagcgtgaccggacaagtgcggatgattaaacgtctgctgaacagtgacggaacgtcatcgccacgttatctggtgcagggaaccgtcggggcagtgggtgacacgctgaccatcgaccaggcgcaaatcccggcgtacacgttctataatgaccgcaacttcggtgctattaccgcaacctcagtgaccgttaacggggtatcggttgccacagcgcaccgctctaccgtatctatgggtattggttacggtggcgcatccggaactaaagcgctggagttctacgtcaatggtgggaactcctacacgcaaaggattgcagcggtaacttcgacggtaatgagagtggaagccgggggtaatcttgcggtagatggtaatttataccctacatcagacggtacatactcgcttgggacattagccggacgttggtcgcaggtgtttgcaactaacagtacgatcaccacgtcaactaagaaaaagaaacgcgggcttcgtcagcaagaggaagctgaaaacaacgctttttatgaaatcggacaactagattctatatggcagtggttggaaaagtatcagacagagggggatgacgctcgtttgcactcgggaccgactgtacaggatgctattgaaatcatggataagtacggtcttgactggacgagatacgcagctttcatttactacaaatgggatgcacaggatgcagtagttgaaagctgggatgacgagtgggaggtggtaccaggaaccccggctgtactggacgaagagggtaacactattgttgaagctgtaccggaaaaccgagttcttttcagatccgctggcagtcaggttatccaggaggcaacggagggtggagaagattatgcattcaggaaggaagaacttcttttttctatttcccgcgcgactatcgcaaagcagcaggatatcgaaaaacgcctggcggcaatagaagccagtatatcctcgtaa

SEQ ID NO: 196526 - DNA, 1044 bp, Klebsiella oxytoca
atggcaaaggaaagaatagtatggatggatatgatgaggggctctcttattcttctcgtcatcattcagcactggatctcaggatttaatttacatgatgatttatctggctcgttaatctattatggggtatatcaagttaaaatattttttgcgccatatagaatggagcttttgtttttcctttcaggttttattgttcacaaatcaataaataaaaaccctaaaaattaccttaaaggcaaaataaaaaacatactttacccttatattttgtggtcccttgtttttctagctctatacaatttttcatcactactatcaggggaatatttacagttctttcactacttacagagaatagctataggtgcaaccaatttaacttggttcctttattttctatttttatatttcattatttctccaataataatcagagcaaaagtaaatatcacttacgtactcattgcggctataatactttgctatctttcatcagctattaacatttacgaccgtattggtgttgactacttagaagagggcgatattttttactattttatttttttctactctgggtgttattgcgggttaaaaaaatatgatattcaaggcctatcaaaaaatccaaccatgctgaccattgctctactatgtgttatcgccactgcaattataaattttcatacggatattcacaaaacaagtttgttatatttgcctcccgtaatgttaagtatccctttgctgatatttttagccacaaagatagaaaaagtaaaaataataaaaagaacactcacacatgttagtttaaactcaatcgtatactacttaatgcaccttgtattattgataatcttttcaaagattttcgaggtattacacttaaatcaaaattacgcaatcccaataaaactcccacttactctattaaccatttatttatttatcaacctgaaaaggaggttgtctttcttagacatcctatttcaaccaccacacaggatattttctactctgaccaatgcaatatag

SEQ ID NO: 196527 - DNA, 915 bp, Klebsiella oxytoca
atgttaatcaagagcattgatgacgccgtcagaaaggcggtcgctgaagcgggggatgtttttcgcggtcaggacatcgagaagataattaaagaggcgtgtgataaaggtgctgagcgtgtcgaccttaaaatgcccgtcaccatcgcgaccaaagatgagccgtggatttatatctcgtcggccgtcaccatcgaccgcaatttcgagatttatgtgatcgtcgatttgtcggatgtgtccgaggactatctcaaagccaaggtgtatcagggtgttttcttgatgaacagaccacgcccagcaatctctgtctatgaaaggtcagtgatgattaaggccgaggattacgagcaatacgtgggcagcaatgcggtaaagaacttcgctaaattcattcgagtgtccagtgcgctgacgtcaccggaacatgcagaggttctgcgatcggtggaaatgtcgctgactagggttgtggccgtcatgccagatatgcctacgttcgtcgctgatgctggtgaaaaggtaagagatttaacgaccgagacaatgagtgtgtttgaggcgcccacttactcgcggtcatttagcctcaattccccgccaggagtcgtcgatatgatactcgccaacaaaggcgttgcagctgagacacgatttaacgaaagcattgaccgacagctgctgtgggaggtggatggcgacatggtggagctggaggcggtaaaggctgtctctaagagctttggcggtcttttcacgaagccaagcagcattatcaagcggcagggttataacaagtctgctgcgattgcggaaggcaaaagctacgcgctcgcccacgtccgtgaagtcatcaaaaatgcagaggtccataccctcatcgcaaaaaaccctctctggggttcgtggtaa

SEQ ID NO: 196528 - DNA, 456 bp, Klebsiella oxytoca
atgaaaactgatttcagcaaattcccatctatcggcggcagcaacagctattcaatgtcatgcgaagaagtgcgtgttaagagcagcgcggcgcgtgtctcttactcagtatgccagcacacggtactggcgtttaaagagaagcgattgccgcccggttcgttcgcagactgcgccgcggccattcgtgctggcaagtgccaggcagtgaaaatgatgcttgaggaagtgaagtcaggcgagaggatttactacatagatggcctcgaagagatccgtaaagtaagagaggaaatagacagacacgcaacggaaagcgccaagcgctaccaacgcaatgcctctttcggaaccagactcgtgccaaaagcagaaacaaagaaacctaccgtcctcgtcgatatttacgccgaagcggtcaatgcagaagtaaacaaaacaaaggaaaacacatga

SEQ ID NO: 196529 - DNA, 465 bp, Klebsiella oxytoca
atgaactatttagaattacacgccgggctgcgctgccagtttattcataatgcgtctgacaaccctcagtgggtaagctgcgccatcaaagccatctcagatgaaggtgttgcgctgggtgttgatgtcatcgaccaaggccaccagacgctatggtacgaccgatatgacgctgaggctaatctcgttttccgtccgattgttgacttcgccgtccactggcagcaccacaccggcaagcgctatgaaatgatctgcgtcgctaatgagcgcagcaccaaagaagggtttgagcgcgtagtggtttatcgcgatcccgaaactggcgaagtgtttgcacgccctgtcgaagagtacatccagaagttctcaccggtggctggccccgcaccattcgagcctgagtctgatgacattcttgactcccagcacgcgccggtagttgttgctgagggtgttcagtaa

SEQ ID NO: 196530 - DNA, 1329 bp, Klebsiella oxytoca
atggagaagctgattgccctgcatggaaaactggacgccatcaaagcgatgggaaccaacgccaaaaaagtagccctggctgagctggacgcgttcgagcaaagcatggtgtcactgatgcttaacccattcatccgattcggggtgaagaaatacaacgtctcagagccagcgcttgagaataaaatccctgatgaagatgctattcagatcctgaactctttagcctctcgccagcttaccggtagcagcgcgatcaacgtcgtagagcaggccgtttccgacatgacagcggaaggccaggacgtgttccgtcgcttcctgcttaaagacccgaaagccggtatcggtatcagcctgtgcaataagattttcgaaaccccgattccggtattcgaagtacagctggcaacatcgtacaaagaaaaaggcgataagtacccgttcaaggaaaacccgaaagccaagttcccgatgattgccagcctcaagctggatggtatgcgcgtcattgcggaggttattgtcgacgaggaagaggttaacttcctgtcccgaaccggcaaccctgtaacgtcactcgaccatctgaagccagcggtgttggatctcgcacgtcgaacgcctcacaagcacatcttcttcgacggagaggcgacagtaggctcgtttaatgcgtcagtgtcagcgctgcgtaagaagaacgtgaaggcagtgggcgcggtgttccatgtgttcgattacttcctgccagaatggaaggcgatcgctaaaacgaaggagtacaagaaggatggccgtaagctgaaagatcgtcatatcgacctgtgcagctggactgactggaagcgccgcccggacaacgagtacaaaaacgacgtgcgtctgcatccgttccaactggtgcatagtcataaagagtttatcgatctcttcatgcaggctctggatgacaacgaagagggtttcatgggtaaagacccgttctctgtctacgagttcaagcgcaccaagagctggtggaagatgaaggacgagaacgaagctgacggtgagatcatcggattcttgccaggcgacccggatgccggcttcgcacatactctcggaaaaatcgttgttcgcctggaggatgggactgaagttcgtgcgtcaggcttgaagcaccgctatctcgatgagatctggctgaatcaggataaatacatggggcgtattgtgaaggtgaacttccacgaatacacgccagatggcagtttacgtcacccgcgccttaaatggccatcctgcctgcgcgacaccgaagaccgcattggtgacaaagagtga

SEQ ID NO: 196531 - DNA, 186 bp, Klebsiella oxytoca
gtgataggagatttggtcggctttggcttgtcggcctttctgctgggcttcatgattgggggcatgatgtttgcctccatcaaaaaggacaacgtgaaagccggtgtcatggagttcagagggcgggtttataaaataacggatgtcactgagcaagcgaaaggcatctctctggataaggattga

SEQ ID NO: 196532 - DNA, 171 bp, Klebsiella oxytoca
atgattccatacctctttttagctctgtttgtcggtatcgctgcaggcgcagcgattacccatgatttgattaagcaggaaattaagaccggcgttgttcgcttcggtcgtcgtgtatatcgagtggttcactcaacggatgtaaaaaacgtaaggaacgtaaaaaaatga

SEQ ID NO: 196533 - DNA, 252 bp, Klebsiella oxytoca
atgaccgatcatattttagctgttttatttttgctgtgtgttttttacacggcttctaaagtggctggctgggctgtcgacatcgttgtggctaagttcgttgccactgataagaagatacagagcgcggtatctgggcttatcagcctaacctcgcttcgctggggtggtatcgaagctgataaagaatacactgtgacaacaaagggttatgttgtcatagtcaaaaaaaatacaaagaaagataaataa

SEQ ID NO: 196534 - DNA, 219 bp, Klebsiella oxytoca
atgaaagagctacaaccgcaccaaaaacgagtcgttgacgagcatggcgagctgaagctgaaggtcgacgcgctcaatgcgttcatcaccagcaaccccacctttaccggactcagtgaagcagagcaaggacttctcaaagcccagattaaggccatgaagatttacctggctgcactggattaccgcattaagctgtttcagcggggtgatcagtga

SEQ ID NO: 196535 - DNA, 246 bp, Klebsiella oxytoca
gtgaaagaccagcacacgaaaatcaaaggctatcgcgacctgtcggccgacgaaatcgcgctgatgaacgagggtaaagagctgtctcagaaagtgggagagtttgtcgccaagctggaagccgcagagttcgctcggtctaacctccaggtgccggacaagcgctggcttgctatcggtaaaactgacctgcaaaaaggctttatggccgtgatccgcagcatcgcaaaaccaaccactttttaa

SEQ ID NO: 196536 - DNA, 246 bp, Klebsiella oxytoca
gtgaaaattactatctacgggaaggataattgttccttctgcaaacgcgctgttgagctttctaagcagctggaatcacaggggcatggtgagtatgagtatatcgacatcgtggcttctggcattgatgcagcagcgctgggcgagctggtaggaaagccggttcgaacggttccgcagatcttcgttgatggcgaacccatcggcggctatacggaactggccgccgtcgcgtccactatctaa

SEQ ID NO: 196537 - DNA, 324 bp, Klebsiella oxytoca
atgagcgtaaaatttacagcaaagctgacgttcaaaaagctggcactggccgagtgggagtctctggcatcgccagtaaaagagaagttcaagaaggtgttagccaagcggctagagtctctcgattctctgacgatgccgaaaaataggctctcacttcagcacaattgctacaagattaagttaaaaaatgatggttatcgactggcctactctgtcagaaatgacgcgtcgggcgaagtgactgtcatcgttaccgttgtggccgtcgatcgccgcgacgagatttacaatgaattgaaaaagagacttgaagatgtttag

SEQ ID NO: 196538 - DNA, 321 bp, Klebsiella oxytoca
atgtttagcagatttacccctgagcaaatgcgcgactttctgtttaaaaacggcttttcgaaagtgcgccagctcgaagatgatacgtgggtaggcgttcttaaactggccttcacgacatcagtctgcatcgacattgacgaatcttcgccgtaccgctatcgctggtgtttccaagacccagctgaggcagactactttttcgaaacggtaaaagactatcgcgagatcccaacacgccgggagtctctccggggtcatcgctacataggcgagccgcttttgcgcgagaaggacgagcacggattcgataagtggtaa

SEQ ID NO: 196539 - DNA, 1035 bp, Klebsiella oxytoca
gtgtataattcttttgacattgatcgtgcatcagaaaattgctcagccgaaaccgttgaatatttaaagcgatgccaggcgatgacgggaaagcaaatgctcgaactcaagagcgattcatcgttcaatgaggcttttatgcttttcacaaggttgtcactgctggtaactcgccgccgcccagagctgggagttcattgcatactgatccacgcgataccggtgattggtgaaatgaaagtcggcgagataaaccgcctcgttattaacaggatgattaatgcgctcgttatggatggaaagctaatccagagtcgccgtgtattttccgttatgaaacagtttcttagttggtgcgagtttcagggcgtcattgagtcgtcgcccctcgccaccatgtcgcttaacaaagtggctggtggactcaagccaaaaccgcgggagcgagtgttgagtgacgacgagctggagaagttctggcacatgtgggatttcgcagacgtggcggaaagcacacgctgggccgctcgtttcgttctctgctcagccagaagacccgatgaagtgctcagagccagacgcgccgagttcgaccttaatagagatgtatggaatcaaggtgatcgtaataagtctggccgagagcattcgctgcccatcagccccataatgagactgtgcatcaataagatgttagacgccgctggggatagtgagtggctggttccctccccgaaaaccatgggtagaccagcgtcaaaggtcatcatagcgcaggcatcaagaaggataatggggaagaagtttctggcagaggaactgccagaaccctttgaaatcagagatttaagacgaacagcaagaagctcgctgtccaggctcaatgttgatcaggatgtggcccgtaagataatgaaccacagccttgaggggatagatcgcgtatacaaccggcacgattatatggacaagatgattgaggcaatgttctcttactctgattttttgatggaaaaatgcaaagttagtcagtga

SEQ ID NO: 196540 - DNA, 306 bp, Klebsiella oxytoca
atgcaagagtcaaagggtcgttaccgtccatttatgaccgcagcaatgctaacctgtggcaagacacaagctcaggtggctaaagagatcgggtttgagaatgccaacaacatctctcttatcaagtccggtcgcgcccatctctcaatcgacaaggttatccctttcgctaaatccgtcggtgcgccgccggacgaatttatgatgatgtatctctctgaacgtcagcctgaagtgtatgatttcattattaagctgaagagagaaaatgaaaacatgaagaagaaattaggcatcactgactaa

SEQ ID NO: 196541 - DNA, 2118 bp, Klebsiella oxytoca
atgctcgttgatcgcgacatccctgtcatcgagcgcggggcaaaagcatacgtccagtacaacaaaaagactggtgagccagttctgatttgcataccttccatacccgacgatgccagtgacaaattcctcatggcgattcgtggatttatcgaccatgaggttgctcacgtcctgtttacagatggcatggcagggcgtgggtatatctggaatgcagtcgaagacacctacatcgagcgcaagatggggcagatgtttaaaggctcaaaagccaacctcatcaacacccagcgccacgtcattgatacggtatttgtcccgaaagaaagtgaagcaattgctgaaaagaaaggggatgccactcgcatgttccttgagttctatctcgttccggttcttcgctcatggagtggtcagctaccgttcgtcgacttcatggccgaccgatgggaccgcgtgaaagagcctgtctccctgctactgaagcacggcgtcgacaagatgatacccaatatcaaatccaccagcgacagtgtggccgtggccgctaaaatcgtgcaactgctggtcgacaagcctatgaagcgcaaagaaaaggatgaaaccccgcctccagagccagaggacgatcacgacgacgagccggaagatggcgcagaaccagaaccagaagtaggcgacgacgagccggaggatggtgcagagccagagccagaagtaggcgacgaatctgattcggaagatgacgcagaaccagaaccaggcgacgaatctgaacatgaagagccggaaacgcctgatccagatagtttaccatggggcgatgaccctgaagatgacgactctgaagatgacgacgactctggttccggtgatggtgatgacaccgaagatggcgatggtgatgacaccgaagatggcgatggtatccctggcgccggtgatggcgactctgaaagcgatgatggcgacggtgaagagtctgaggatggcgaggaagagtttgagggcggctgcggtgatagcggtgcttcaactggttccggtgatattccagccccctctaaagaggatttagatctactggagtcaacggagcttcctgaaggcgctgaagacatgtcaatggagggtgcgatgacaagcatcatagccagcgagtctgagctttcaaccggctatcgaccgtatgaaagaaccttcgactttatgggcaagctggaggatgcctctgagacgatcaggaacattcaactgaagaacccaagcagcttacgcatgtatggcgatccgagtcactatcaggtattcggaaagcatgagtcggtgtttgaaaagaaaataagacctctgattgccggtgatattgtcgcgacactggctaaggatcttgagcgagccattgccagcaagaaccgcacacagttcattccagggcagcgcagaggaaagattcacgggccaagtctccatcgtctgacgctgaatgatgaccgtgttttccgcaagaaggacattcgccgcgcagtaaactcgtgcgtacagattgtggttgatatgtcaggatctatgcgaggctcaaacaagatagagacggcgtgcgctgctgcttacacactggctgacgcgctatcacgtatcaacgtcaaaacgatgattacaggcttcaccacttacacgacaccagtgccgggaacatcagagttcaaccgctctgaagcgcttttccttccgattatcaagacgtgggaagcgccggtgtcaggcaggcaaaccatgctgaatatgggcgctgtagccagcacaatgatcctggccgagaacattgatggtgaaagtattttagccttgctccagcacttctctgaccgccaggaagatcgcaaaatcatgctcgtactcagtgacggaatgccacagtcacaggggcgtgggctggtcgaccatctcaagcaagccacaaagcagattgaggaagagtctgatattcaccttatggggataggtatcatgacgactgcgccgcgcaactactatcgcgacaatatctgtttgtccagtgtgggcgatctgtccgaaacactgattaagcagatgcagcgcctactctcgtag

SEQ ID NO: 196542 - DNA, 1239 bp, Klebsiella oxytoca
atgacggtcaaatcgcaaaacacagagtcggcaactgactcgcaggatgaaaagcccattttgtgcaagtggtgtgccggtgatacccatcatgtaggttctcactttatccgtaagaaatgtaacgctatcccggaagagcatcaggggaaaacaccggaagagctgatccgcgcttatgtggctcagtttccagaggccccaacgatgtcagctgccgcagctaaaaagctgaaagagaaagaggcagagaaaaagagtgtaaaagaaacagcggttgtgggttacgccggtttcgaagactacatggtcgaaaaggtcgcggtgcatgaggtgatgggcctcgaccctgagctactcaagtcagcgtctggcgagcctctgcgcattaccgtaaacatcaacaagccattccctgagttcataccaaaggtcaaagacgactatgttttcggtgacatcgacctgctgaaagacgtcctgatgatgattgaaatgggtatgccgggctatctatggggtcacgctgggaccggtaaaagtacgctaccaactcaggtttgcgcacgcttgaatcgcccgattattcgctctcagcacactgcctcaactgaagagtcacacatctgcggtcagattctggttaaagatggtgcgacttacttcgagccgggtttactggcaagcgcgatgcgtaatggctgggtgtatctggccgatgagtacgacttcgcctatccgcaaatcctcggcgtgtaccagccagtgctggaaggcgagccactgatcatcaaagaagcgacaccggaatggcgctacgttgagcctcataaacgattcgctttcattggaaccggcaacactaacggatcgggtgatgaaactggtctttaccagggaacgaacatccagaacgccgcgaacttctctcgctacggcatcgtgtcccacgttaagtacatgagccaagatctcgaaaggctgatgctggagaagatgggcttgcctaatgcccatgcgacgatgcttgtcgatttcgccactcgcattcgtaacggttacgaagccgggaatatcagtcagcccattggacctcgtgaactgcgtaacgctgcgatcctcggcatggctcataacaacttcaataaaggcgtgaccaagtcattcatcaacaaactgccgtccaccagcgcactcgccgcgacagaaatggctcagcgtgtattcggtgatggataa

SEQ ID NO: 196543 - DNA, 420 bp, Klebsiella oxytoca
atgacagaagtgaccgcgtcacaagaatttatcgacaaggctactattgcgctgagcaagtctgtgttctgggaaatagcagactgccctgtcacgatccgcattgcgatgcgtcaagctgagttagatggtcgaagagtgaataatgcagcgcgtaaagcggctagagcgatactgaagcgcgttcgtgatccgttggcgcgagattacgtttcaaaaatagccgttactggcgatgtcgagagggatctggcagatttcgaagcctacagagacaagctaatcaagaaagtggccggtgagttcgtcgaggtggagaaatcgaccagcgtcaaagattaccgtctcaagcgtgcgcagcgtgtggcgattaccgggcgtccagttggcaaaggcgcgtttattgaaatgcgcgcctaa

SEQ ID NO: 196544 - DNA, 165 bp, Klebsiella oxytoca
atgaatacgacaatcatactcgcggtaatgctctatctcatcgctggcatcggattcacgaaaatgtgggcttcaaaggtgtctggcgtggatggtggctcgaagtttttcgcctgcactctctggccttttggcctcgtcattagtgccttctggagctggtga

SEQ ID NO: 196545 - DNA, 441 bp, Klebsiella oxytoca
atggataagtcaatcatcaaagaagtaatggacgacatcaggcttgatacggacgatctggacactgtctggcgtcgtcaacctgagcttgtcgccatctatggtttcaagcaggcagaggctgagaacgacgccaatgctgcaaagcgcgacctggagtcagtagaagcacggctgtattcgacgacacgagccggtctgagttttgacggtgttcgtctcagtgaatcgaccattgaagccaaggttaagtcgcacacttcgtacctcgcagcacgtcaaaaacacgacgacgcaaagtacaaagcagatttttacaagcatgttgtaaacgccctcggccatcgtcgagacatgattgttcaggcgtcaaaaaaggcaatttcggagtacgaaagaacaggttctgatcggttccacgcccctaaaaatgtaacttga

SEQ ID NO: 196546 - DNA, 1002 bp, Klebsiella oxytoca
atgtccgccttaatgaacctcctgaagaaaagccaagcagttgcccagagcgcgaaaaacaatcgcggcaacgatctggcgaagatgaagcccggtgagaactacatccgtatcattctgaacaaagatgatcctgataacgcaccgttctcccacaaatacggcatccactacggcaagtccaagggtgaagacggcaaggatgtgtatagcgcccatctgtgcgcccagcacacccacgaccgaccgtgtgaaatgtgcgaaatggtgatggaagccaaagcgaagttcaaaggcaacaaagcgatggaaaaagtcatcgacgactctcgcgcctctccgcgtatggccgttgttggtctgctttctcagcgtgaagacttcagcgacactgaaaaaaccaccctgatcgacatgccaatgtccgtattcgacgacctgatggattccatcatgcaggatatgaacgatgaagtcggtgagccactgagtcgtgagaagggttatgcgtatcagattatgcgtactggttccggtctggataccgagtacaaagtaaaaccgatgcgtaaaaacaaaactgcggtggcagctaagttctgggacaaccagccttcactggaaagcttcgttaaccagcacgatgcaacgaaactgatggcgaccgcgaaaatgatcgctcgcgctaccggcgttgctttgccagcttctatgggttcgactgcgggcgctctgccagcagctgcgggtacagcagcgtcgcttccgggcatgggtggttcatcacttaccggtgttgatgacgcaaccccagaggcgtctttgctggataaagaggttgagtacgcgaaagacgcggcattcgagccatctgagaaagtggttaccgaaaaagtggttaccgagactccagcgacagccacggaagcggcggcagctgagccagcagcagatgaagacctggatgacatttacgcacagctttccgcgcttgcgatgtaa

SEQ ID NO: 196547 - DNA, 261 bp, Klebsiella oxytoca
atgattacgtcaatcgttagcggaaagtcgaccacgccgacagcattggcgaaggagctggtattcacctatggcgagtatgccatgtctgattttaaagcctgtatcgtcggccacaagatcgcaatgaccgctcgtgaaatagaaatcgtgaaaggtcacgttatcaacattattgagcgctcagccaagatgatgaattgtgacactgttacttttagccgcgaaatggccgaaaaagaaatcggcttaaccaaataa

SEQ ID NO: 196548 - DNA, 204 bp, Klebsiella oxytoca
atgtcgtcaaaactgtatttcaaaatctgtctgctgggcgctgtagccatggcgatgttcggtctggtcatcccttacttcgtgtcccagaagagcgatgtagctgtcctgattggtttcgctctgttcatcgcaaccccgttcgtctcctacaaagcggcgaaacacattatcaaacaacttatcaaaggaactaccaaatga

SEQ ID NO: 196549 - DNA, 828 bp, Klebsiella oxytoca
atgaaaaagggaattttcgcgctggctatcgtagcggccatgaccatgatgaccggctgcgagtacgttaagccaggtgaagtgggtatcaaggttaacaaattgggcgacgacaagggcgtcggtgaagtcgtgggcgttggccgtcagtggactggctggaacaccactctgtacaccttcccaacctttaagcagatgaagtcgtatgaagacgccttcaacttccagatgagcgatggtacagcaatcagctatcacatcggcgtttcgtacaaggttgacccgaccaagatctccaccatcttccagacctaccgcaagggcgttgacgatattaccgacaccgacctgaagcagaagatctccgatgtgctgattaaccaggcgagtcacatgaccaccgacaaattcattgacggcggcaagactgacctactgaataccgcactgaaaaccattcagggcgaaatggggccggttggcattcaggtgatgagcctctcctggatgggcaagcctgactacccggatacagtgaaggactccatcaacgccaaagtaacggctaatcagcgcacactgcaacgtgagcaggaagtgaagcagaaagaggctgaagcgaacatgacccgtgctgaggcagctggtgaagcagatgctatgcgtacacgcgctcaggcagaagcagacgcgattaaattgcgtggtgacgccctacgggaaaaccccggcgttatgcagctggaagccatcaataaatggaacgggactctgcctcagtacatgaccgcaggggcaagcaccccgttcattaccgtcaagtaa

SEQ ID NO: 196550 - DNA, 258 bp, Klebsiella oxytoca
atgaataaatcgtggatcgaaaaaaacctgattgccgtaccgatgggggaagtctctacgcccaaaaccggccgcgtggctcgtgtcgattactggtggctcgcgaaggatggccaagtcttcaaaacgaagcgcggcaatgcttatcagtgcaataaagaccgtcgcatcgtcgacaagatttatgcagaagtaatccgtgaccacggctttttagcggtcaatatcccggttgcttacgtcgagcagagactttga

SEQ ID NO: 196551 - DNA, 150 bp, Klebsiella oxytoca
atggtctgcaaaaactgcggtgaaaccatggagggtgacggctatcagagagtcatccactgcccgaatgccgactctgagacttacgaccactcagagcctgactcaaaccccgtaatgtgtgaaggagaaaacaatggcgagaattaa

SEQ ID NO: 196552 - DNA, 735 bp, Klebsiella oxytoca
atggcgagaattaaacagaagcccgaagagaaaagcagtgaagcgttcaaaggtcgagatatggtgacgcacccggcgtttgggctggtacgtgttggccgagtcagttcatccggtacacatctcttcgactctgacatcgaccacagtgagttgattgaattaacgttccatcgagcggccatcgagcaagacggttacagctatcggatcaccaagtcagaagaccgcagcgccctcatggtggttcgtctcagcgcagcgcaatgggcggcaatggtatccagtttcggcgttggtgagggcgtcccatgcactctgtcgtcgatccgtgaaggaaatctggttcaccttcccgagatagagaaggcggagacgatgcacgagcggttctctaaagatattactgcgcgggttcggaaagacatcgccggcatcgagaatatcgtcgaccggctcggagcgctgatcgccaccggcaaaaccggcaagcgcgatctccgcgccgtttatgagtcactgtccagcgcggtcattaatctgcctggcaatatggcgttcggcacggaactcacgcaggaagcagtcgacaacatcgtctcagctggcaaagcagaggttgaagcgtatgtagctggcgccgcgatgcgtctgggtcttgagcaaatcacttcagcgccagacatcaaccttaacgagtcgctcaggcttctgcttgagagcaaagagccatga

SEQ ID NO: 196553 - DNA, 165 bp, Klebsiella oxytoca
atgagtcatgtctgttcgtgtggccgcggccatgtgagtcaccacgacaataaatgcggccattgcaggactaaggccgacatccaagccttgcataagtatttccgtggccttgagctggcgaagaaactcttacgtgagaaatattttgggattaaggagtag

SEQ ID NO: 196554 - DNA, 162 bp, Klebsiella oxytoca
atgcgcaataagttccccggacagtgttatcgctgcaaggtttgggtcgagaaaggggctggtcatttcgagaggcatctcggccgcttccgcgtcattcacgctgactgcgtcatcgcgcagcgcaaagaaaaagctgaagccatcgcctcagctgaataa

SEQ ID NO: 196555 - DNA, 255 bp, Klebsiella oxytoca
atggtcactatcgaatgcaccagcacacgcaaaggcgttaactggttcactccgggtaaaacgtactccggccactcagacgctgatgggcaggcggttcacacgaaggacgatctcggtcgcgatacgtttgtttttatcgacgcctctcttcacggcacgttccgcgaagttaaaaacggagtgatccagaagtcgacggcccgcgcacgaaacaccgcgatggcggaggcttttgccagttgcggtatgtga

SEQ ID NO: 196556 - DNA, 273 bp, Klebsiella oxytoca
atgaaagccttattacacgtccacgcttcactggacacgacatattcaccctactccattctggatgttcctgaaggaacctccgaagaagagcttcaggtcatcggaagtaaatttctaccaacactttatggcgacgaagaagtcgttaccgtggacagcgatggtgtctgctggaacaacggggaatgctggtatatcgagggcttgcacttcatcagtgaagaagatgcggcgcatttggttcgcatactcggcatttccacgttctaa

SEQ ID NO: 196557 - DNA, 159 bp, Klebsiella oxytoca
atgccggtccttgatttagccacgtcggttttcttatttttcgacagtatctttatcggtagcttccgcaaagcgttagcccccgtgaacggaagagtcatcgacattatcgtcggcgttttccttacactgactgtagggcggttttttcaatcatga

SEQ ID NO: 196558 - DNA, 270 bp, Klebsiella oxytoca
atgacctgccagatgagtgtaataaccgtcgacaaggggaatatgcttggggagcctcgcgcagctgggcaagtgatcctgacctccagcagcgaccagttctatgcggtggtgggcgaaagagtcatgaagtcaccgcccctggttgagcataatggcaatatggtggcctaccattcaggggctgtctatctcatgcagaagaacagctatagcgttctttacgatgattttggttatgtttttgatgaatgcacaaaggtgtcatga

SEQ ID NO: 196559 - DNA, 213 bp, Klebsiella oxytoca
atgaatttagcgaatagcatggagatggagagaagccggaactactggctctcaaaagggtttgctcgacctaaagatttctcagtgcgtcttgaccgctacgactgccgcatcgtttatcgatataactcgtggcagatgatcgagaacggtgagattaagccaagcaaaaaggccaagaatctgaacacattactcgcctcattcacctaa

SEQ ID NO: 196560 - DNA, 1098 bp, Klebsiella oxytoca
atgtccaccgataaaaaaaaacccatcaaaaacaatgtagaagacggtgaatcggagatcattgaggaagatgttctcgatttgcacacaggtgatctaaccccgaacagcaataataccgtccaacctattgcactcatgcgcctgggtctttttgtcccaacgctgaaaggcacgaagaacagcaagcgaaacaaatccaacgagatagacgcctcgaaagaactcgttcagctggaggttgctcgctcagaaggctactccaacatcaaaataacaggcccacgtcttgatatggatcacgacttcaaaacatgggtcggcgtggttcgctcattggccgaatatggagagtccagcggcagagtggagcttagcatcactaaattcgccaaattctgcggatacccatcatcccagatacgcaagacgctgcgtgaaaggctgaccaatagcctgctgaagatcatgagaacgacgctatccttccagagagtttacgaagagaagaacgttgacggctctaacaaaatatcacttttgatgatgcacctcatcaacagcgtcgactacaacgagaagaaaaacacgatcattttccacgctgaaccgaagctgtccgaactttaccggtttgaccacaaggtgttgctgcagctgaaggtcataaacgaattaccgcgcaaagaaacggcccaggcgctctacaccttcattgaaagcctgccaacaaagccggcaccgatttcactggcaaggctcagggccaggctcaacctaagcaccagcaatgtcagttcgcagaaccagaccattcgcaatggcttaaagtctctgaaagccttgggttatctggattacagtgaaataaagcgcggccgatccgtctacattcaaatacatcatcgcaacccgaaactcaaagccatttctgaggctaagtcaggcgaccctgaaacgcctaaaaatgcgggtgatagtggtgtggttgacgcaaaacagaacctaatcaataagataacagagttatccagagatttaacacctgaaaacattaagctcatcgagatactcagcaacgggctaaagctcctttga

SEQ ID NO: 196561 - DNA, 1917 bp, Klebsiella oxytoca
atgaaattcctgaacctgaaagtagaaaacttcatggtgattgctgacgccagcgtcgatctggatagtcgcggtctggtactggttcagggcataaactccgctgactccagcgctgccagtaatggcgccggtaaatcaacgctgatgaatgcgctgatgtggtgtctgtacggtgagacagcgaccggttacaaaggtgacgatgtcctgaactccaccacgcccaaaaactgccgcgtagctgtgacgatcgaagatgagggccgcacgtatgtggtaatccgccatcgcgctcacaaagagttcaaaaaccgcctcatcgttcgcagtgaagatggtgatctgacgaagggcaaagacacgctgacgcaggttctggttgagcgtctgatcggctcgtcgaaagaggggtttatggcctccatctatgccagtcaggaagcgatgccagacttgcccggaatgacggataagaacctgaaagccatcgttgaggaagcggccggtattgaccgtttaacgaaggcgtatgcgattgctcgtgacagagcgaacgcaatgacagcacgtctggatcgggctaatgcccaggctgataacgctgtctcgctaatcacgtccacggaatcggagatcgagacaagcagtgcagccgtgtcgagctgggagaagaccagatccgagcgtttatcggcggcgcgtgtttatgcgaacgaaatggaggtgaaagtcaccgaggtcagtatggagctgtccgacatccctctcacgataacaatgattgagaaccggatcacggatgaaaagaaaaaactctcaggtcgggctgaacatgataagaaagttcaggcagcgaacacaatggtggctgatgcagcggcggagatccgaacgacagaagctgcccgagacagagccgtcagtgcagccaaaagagccaagctcaacgcagacaacgtaagttccagcgtcgggaagccatgctcaacgtgtggaaagccatataccagcgatgatctgtcacacgttcacgacactcacgccggtgaagtccgtaagcaggttgatgaagccaaatcactgaccactgacttaacggccaagaaagagcgtcacgataaaatcgtcgcactgcgcgaccgacttgtagagtcgacgccggacgtctctgcaatcactgagcgcatctctgagcttacccgcgagctgggtcatgtaaagtcacgccagattgaaataaaagcggcagagagcgccctgcagcgtgcaaatgcgcaagtgctgtctgtttccgaagagagcaacccacataatgcggccgtgcagcgacatcgcgataatctggcatcgcacaaagagaagctgaaagagatccgccgcgaaatcgatggcatgaaggatcaggctgtgttgcttgagaaagcgcgtcaggtctactctccagctggcgtccgttcccacgttctgacggcagtcaccccattcctgaacgacaaaacggccgagtatctcagcacgatgtcggacggcaatattactgctgtctggtctacgatggacaccacgaagaaaggtgagatccgcgacaaattcaacatcgccgttgagaaagccagcttcagcaaagacttccgtggtttgtccggtggcgagaagcgaaaagtccggctggcttgtgcgctggcgcttcaggatatggtcgcgaaccgtgccagcaaaagcattcagttgtttatcggtgacgaaatcgacgacgcgctggatcatgctgggcttgagcgtctgatgggtattctggaagcgaaggcgcgtgagcgtggcacggtgatgattgtctctcacaaagagatgaagtcatggttccgtgaaacggtaacgctggaagtgaaagagggacgcagctatgtcgtctaa

SEQ ID NO: 196562 - DNA, 699 bp, Klebsiella oxytoca
atgtcgtctaagctgactggtaatcagtttggtcagatcgtcacctgtgttgcagctgcgcggcacatggctgtctgttttggcggggatgtggattttggctctttcgacagtcattacggcgactcaattacgcgccagcgtctgattgagagcagcgaagctctgtttgacgctcagcgcgttggtgcctcagatctatgttatctgggcaatgtgtttggccctgatcatatgggcaagggcgtgattttctcatccagtgagggagacgacatagtcttccaccccgatgagtccgagagagcagttggccgcattcagcatatgagtgccagacttgctgtccgtcgcgttcagaatgatatggcccgatatggcaagcgccataagtccagagcgttcaaaaaggtagaaatgcaagtcacgctgatgagcgaaggcgctctgtattttggcatttgcttcgatgatgaagtgaagacaggcttcattgtgacaacggccaatccgaacgacgcaaaagagagcctgcagtacgccgtcgacgtcatgaaaaaactcgctgacgcaatcactaaagtctggccgactgtgattgacggcttcttcgaaaaccagccagctgaaggcgtattagacgagttcagcggcattaatgcacttagaaaatcaaaccctctctggggttcgtggtaa

SEQ ID NO: 196563 - DNA, 405 bp, Klebsiella oxytoca
atgaccatttacgatctgtctgagttcgacatcaataagcgcctcgccaatctgttagggcttgaggttcagattattgaccacactcgctcaaccggcatgacgccgtggtatcaccaccatttccctcatacggtttgggtgacagatcagaaaacgccatggcgtcagttttgtcctactcgcacctgggaagacatcgggccggtcattactcgcctgcagatctcactgacacctgaatcgcatgacggtcgtgagggtactgagtcttcagaactgtggatggcaaacgtttattactcaggtggtgaagagttcaccaccaaatatgttgagcgaccagagctggccgcgtctctcgctgcgctggttgcactaagcggcactgaatttattaaataa

SEQ ID NO: 196564 - DNA, 867 bp, Klebsiella oxytoca
atgttgaagaaattactggaaaataaccgcctgaagtcagatgcaaaaaatggcactgtcattgaacaattctatgaaatccaccctggcgcgatcgacaccacaatgaaaattggtgagatggtgtgtgagtttcataaactgtttcaacaccctattgcagccgaaattacaccggagctgctggaacttcgcgcccgacttattcgtgaagaggctgtagaggaagccgctgaagcgattgggcttctgagcctggataaagtgctggatgccatggccgatggtctgtatgtgggcattggctcgatgatcagcctgcagggcggcgtggtaaatgccatggcttatttcacgaaggagcagagtgaggacgcctacaccagctatgttcacgccaatagcaaaaaaccgcaggatgacatcatccttggcctatcccagtttgcggtggtcgtggatgagtttgaggctattgcggccgagatccgtactggcaaggttgacgagacgaagctggctattgagatgcgcggcgctttgaaccgtatttatgtggcgtcccagatgacctaccacttagctgatctgatgaacgtccctgtcgtcgagctggtggctgaagttcaccgtagcaatatgacgaagctgtggccgtcagacgctgcgctgcgcactgagctggttgcgacctgcaaatatgacaaagacgatctggctttccgcatcgcagaaggggttgatggcatgatcggttatcgtatctctgatggcaaaatcctgaagtcgccaacctatgagtcggccgacttggggcgattcgtggatatggcactcaattcagtaatcgggcgtcattttttctaa

SEQ ID NO: 196565 - DNA, 1092 bp, Klebsiella oxytoca
atgaacgaacccttcgatagtggccttttaactgactcagcttatggctgtgttctggccgaagccgtatcaaccggtatcaaatccgacaaccgaaccggcgtacccacaatcggcacctgctacgttaattcgcagtatccactgtggggagcggccgtacctctcatttcatcaaaagccgtcaacctgaagccgctactggtcgaactggagtggtatttgaaaggaaccggcgacgtcgcattcctgcgtgagcataacgtcaaaatctgggaagcctggacgcgtgaagatgggacgctaggcccggtgtatggcaaacaatggcgtcgctggaacgatactcgcattgtcgaccgctatgactttgtcaaagacggcctgagttatcgcgcgcgcggctacaaagtcgaggggtatctgggtagcgatgaggatcgcgtcgtcatctctcgtgaaattgaccagctacagcgcatcgtcgataagctgcgaagcgaccctaccgatcgccgcatcatgatgagcgcgtggaacgtgggtgaacttgaagacatggcgctgccaccgtgccacttcctctatcacacatggagtcgcgagctgggctttgaagagcgtctgcgccaggctaatgccattggcgaagcccacgcaaaatacctccatgaatcgcgctacacggcgatgctggccgaaatagcacgccagggcgaagccagcgaagagatgctggacgagctgggcattccgcgccgcgctctgtgtgctgccatgatccagcgcagcgtcgacgtgttcgtcggaatgccattcaatatttccggctatggcgtgctgactgcactgatcgcgcaagtcacgaaccacatgccgatgatgctatcccattttggcctggatgttcacgtctacgaaaaccatctggaaggcgttaacgaaatgatggagcgcgagatcccagaggactcgaacccggtcgttcttctgcctgactcatggaaagaggtcgatgacttccgttggcaggatgtccgtatcgaaggttacgcgccgctgccgtggatcaaagtgccggtggccgtctga

SEQ ID NO: 196566 - DNA, 414 bp, Klebsiella oxytoca
atggcaaagggaatgtttgccattgttgagcttgacgatgttgttgcagatagcagacatcgagccgccgcagacattgagaaggatcgcatcaacctgatggctggcgatgagctggtgtatccgacgagcagaatgctgaaaggcttctatcgctccggtatcgaggttgttctggtgacaaccaagcgtctccttaaagatgagagggaggtcacgcgtgcgtggctttccactcatggcatcggctacgactatctggttcaaacagagacggccgagcatctcactcaatggattaaagaaaatcagcgggaaaacatacttgtcatggcgatctgcgccagtaatcaactgatcaccatggcgagcaatcacccgcacaaaccccacatttaccgagttcagcgatga

SEQ ID NO: 196567 - DNA, 477 bp, Klebsiella oxytoca
atgagaatgatagtggccgttggccgtaattttgagatcggcaaaggaaacgatttgccgtggaaatgccctgcagatctgcgtctcttcaaagagctgacgcacggcttcacggtaatcatggggcggaagacagctgaaagcctcggaagggcccttcccggtcgccggaacgtcatgctcacccatggcagcgaagcaccagcaggctttgaagcggcttctattgagcgctgtctgcgcgagttccccaatgcctgggttattggtggcggcgtggtgtatgaggcaatgcttccgtatgtcgatgaaatctgggtcagccatatcgacacgactgtgccggatgcagataccttcttcccatttgaggcgatgtgtctgagagggtttgaagaagtcgacaccatccacgaaaatgccggcgacggagattcaccagcgttcaaacaaattgtttacaggaagtttaaatga

SEQ ID NO: 196568 - DNA, 651 bp, Klebsiella oxytoca
atgaaaattggcctttgcggtgcgcagggaacgggcaaaactacgctggcgaaagcatacagcgaggcgtttggcattccgtatatcgacgctaaagtcggtgacttcctccgggatattggtgtggatctctcacgcaatgacatgccgatcgtcgagcgaatgaaggcgcagctgatggtggccgggcatatcgcgtcgataactgaagctccgggactgagtaagaccgggttcattactgacagaacgccgatcgacgtcatggcatacacgcacgacatggcggcgccgcactataaaaacgacgaggtcatggagctgtacgcccagacgaaaatggtgtgtaccgagacgaccgtcgaaaactttaatttaagcctgatgattcgcccgggcgtcccgctcactgaggacgatcaccagagacagcagcgcggttcactggaccctttctatgtgaatcacatggatatgctgatgtcgtcgttcattctctcattctcaaaattaccgaaccgcgggatgctttcgcgcttcgcctttatgaaggatgaggttatcgacttggatctgcgcatcgagtcgctggttgaggtcgtgaatacgatcgcggctgattctgcccactcctgtgagcctcttcattga

SEQ ID NO: 196569 - DNA, 408 bp, Klebsiella oxytoca
atgtataacgccgacgaagaactggacagaaaggtgtctgagacactcgtagacatcatcacaagacagaccagcggattgatgccgacgcatgaggctaaagcagccattcatgcggtgttttgctctgttatggggctggtaggcactgaagtggctgagcttctcgaagaggcgatgaacacgatagaaaacgagcgcccttccccattcccactttacctaaaaacaaccggtggcgtttacatctcagtggcaccggacaccacgtcaagaaaagttatggttcgcgttatggcgagtgaatacaagccggtccaatatgaatgcgacagcgcggccgcaacgatgaaaaaggcactcagcgtagtgcatttacttattaaacagggtgcagagcgcttatga

SEQ ID NO: 196570 - DNA, 813 bp, Klebsiella oxytoca
atgagcgctattcattcaactggtaaagataatagcaatgcagacctgatcgctatgctgtcagaactcgatgcgctggaagagccaagcaccgaaaaaactgaagtcgtcgaggtgaaaaaaacatccaccttcacaactgatgatctgttcagtgagctgcttccgctggtggcttcacctaagtccgaagtcaataaaagtgagaaagaggtgatcgcaacgttgctgggtgacatcgaggatgaaatcgaggtcgtgatcccgccaccagctgaagaaaaaccgattgttgagactgtggctgaaacgaaagcagaacaagagggagataagcctgcagaagagccagtcattgaggctgcaccggaaccagcgccggcaccagctaaaagagagcctgcagcgcgtcgtaaacgcttctctctggatcagctttccgacgagacgatggccagcctgggttttgagagaaaaacctttatggatgggtataacgcgtgtccagttaaagcgatggataaggtgcagaacgtcatggcatggagccaggggttatcagatctaagtatctatacgataatttccgtgaaccacctcattaaatcaggatcagcagataccgctgggttccgtctggctatgatgagtaacccggaaaagccatacccatcctctaccgcttcagctcaggctgggcagatgatgagcatcctgccggtgctaggcatggcgacgagagacgataaaattttaaagatcgacgaagattcaccgttggttaaaaaatttagaagggaaatactttcgtaa

SEQ ID NO: 196571 - DNA, 1086 bp, Klebsiella oxytoca
atgaaagagcaaatagacctagcaataaaagaagataagattttttttcttggtaaaaaattacaagatgattggtatcaggcttttgctgagtggtctgatatagcccggaaggataataatcctgaagcatatttcaatatggcgtattgctatttaacaagcaatggaaccaaaaaaaatatagagaaggctattgaatattatgaacttgctggctcattaggtttaaatgaagcctacactcacgcttacaaagcaagagcggaatatattttcaaggatgacattaatgattatatttcttatctagaatctttgaaagaaaagggtgtttggagtcatgaccctgacgaaaaagggtgcagaacttatttttcttgtgagcacgaagcattgcaatttcaggatgttatgatacaactctcactgagatcatcgcctggcgatagagcggcaaaagctaaagagctgcggggaaaatataaggcccactacataaatttggttttagatcatttcattgcaatatctgaagtttcagctgaagtggagtacagagaatcaaaaattagccacctagaacataaaggaagaatacataaaggcaattcattgttaagcacaagatattcatataaggttgaatatttggctaagctaaaaaataatggcaagggagatgcacattttgattttacattccgcgctgcgaatatggcagagatgaaggcagcacatgacaaagacccactcaatgggttgaacaagctgtatacaaaaatctccaatataatgttaaagccaggggagcaggtagagaaaatattggtaactgatttgccagtaaaaaacctgagttcaaactgcgtaaacttttcttatgattttaaaagaaattttgagaggtattacgtgtcaagtagttatagaggctatatcacctatgattttgacatcaaacctgggagtatttcagttgtcagaaaggcaagtgaaactgaaaaatataagataaagcaatttatagcttatgcggtagtgatcttgggtatctatctctacataaagcacttattaggttga

SEQ ID NO: 196572 - DNA, 225 bp, Klebsiella oxytoca
atgacttacgaaacaaacatcgtcgccctcgctgaaaacgacttcctcaccaacacgcggcagctgatggagagccgcgacaaggcgtttacgctgtaccagtgggttgtcgacagtctccgcgaaggcaagcattctgaagagatcggtatgctggtcggtgatttaatcaacactaactttgcgctggatgttcagctgaaggggcgagctgattcaaaatag

SEQ ID NO: 196573 - DNA, 564 bp, Klebsiella oxytoca
atggctaaggcaccagcgaaacaggaaggcatcaaatacaatcggaagagccgcgtctctgatgaagacggggccgttaagtttgacccgcgtctgaaagaggttcttttgtatacaaacggcttctgcatgagaagcggcgccggtggcgctgcggccattatccgttttggcgaccataacaaaactgttcaggaaggtttcagatccaccaccagcgaccgcatggaaatgctggctgtgatccgcggcttagatctgcttaaccagaaatgcaacgtgacgatctacgccagtaatcagcagctaattaacggcatgaaaatgtgggtgaaaggctggaaaaagcgcggctggaagatggctaacggcgagcgtgtgaaggatgctgatctctggcaggagctggacgccgcggcgtccggtcaccgcatccgctggagccgggttaaaactatcaggcacgatgtgaataacgagctgtgcgacatgatggcgaaatccatggccgagtctccgacgatggttgatcgcatgtatgaggctatttattcatgcaaatag

SEQ ID NO: 196574 - DNA, 780 bp, Klebsiella oxytoca
atgaaagagttaagcatcaccgccgcatcaatgacaagtgttgagatcgccgccctggttggaagccgtcacgatagtgtgaaaagagccatcgagcgactggttaaatcaggcgtaatcacttctccaccattggtggagaagcccaccgcaggccgtccggtggcggtttacgtgttttctggcgaagaaggaaagcgcgacacctatgtcgttgttgcacagttaagcccagagtttaccggtcgtcttgtcgaccgttggcaggagcttgagaacgccgcgaaagaaccagcactaccgcgcacctataaagaggcgttgcttcatttggttgctcaggttgatgagaacgagcgcttggctggtgagaatgcggctctgggcgaagcgctcagcgtagcgagtccgaaggctgttctcatggacagactggccggcactgccgatcagctgtatggcgttaacgaagctggccgcattctgggtacgtctggtgcagtaatggcgtcgtgcatggaaatggctggaggcgtgtttgttaagcgcaaatacgtcacgaccccacgccagctgctgaaagcgtttattgatcgcggtctgggccgcaacgtaaccagcgttgtcggtgggcatacccaggccaagtttacgttcaaaggtctgtgcttcatcgctctactgctcattaagcgtgggattatcagcgtcgattcgatctctcatgacgtctgtcgagacagcgtaaaagagatgaccgcagcaaaagccatcgcctga

SEQ ID NO: 196575 - DNA, 462 bp, Klebsiella oxytoca
atgtgccagaaatgcgaacgaatcaaagcccagcgccagcaagtcctgtctcacgcaaacgaaattggtgatttggcgattttagcaaccgctgaaatcgagtctgtaactgacgcgctgaagctgaagctgcaactggatcattatggagaggctggtctgcttgaccccgcgaacatgcttctgctgatcgcccactttgcccagagaagcaaagccctggaatctgacaacaagcgcctgcatgaaacgctgggctatctgtcaaccaaccagggcgcaccagtagcaccggcacaaccagcaccggccgcagacgaccagcagaagctgttagctgttgaagtggtacgtttgctcgaagcggtggcgaacactgttgagaatgcccagacgagagccatggaagggattaacgcccaaatccgagagctgaagaatcggcacggtctgaacaaataa

SEQ ID NO: 196576 - DNA, 312 bp, Klebsiella oxytoca
atgaaagtttcatacctgctgctggcgctggcgctggcggggtgtagctcgcgtacagacaacaccatcaagttcccagagcgtgcatatcagtacggcgtttatcgcactgtgcaggttcattacgacgtggatgcggatggccgggtcgagaacgtggtggttgataatgatgatgacggatttttcacgaggcagatcgtggctgacatgaagcattggcggctcgccaccggcgacccgaaaaatgatgtgttactgaccgtttcttttgagcgcggcaaaagcagagttaacttccgtgaagattaa

SEQ ID NO: 196577 - DNA, 651 bp, Klebsiella oxytoca
atgacgattggattcgaggtttacaacgatgccggtgcattgcaaattgactctgacaacagaacaacattgttctcagacgttagaaacataaccggcgtcactgacacagggtattaccacatacctaatccttttggcggcgactacccttttgggtttctcaagccctcagacatgccagcccccggttttcttcactggtttcagctaaacccaggtgccttctgtatgcctggtgctctgtcgtttcagaacaatagcggcaggctcattcggactagcaggaacataggtatcgaaagcggtttccttgacgtccgtgatagtcagggtaatttggtttggagcgcgaagagtgccgatcgcgcaccgagaattaagggcttcatagacctgcctgcaaatgcgaacgtagacaatcaagtcatttcgtttacacctggcttcaacccgtggattctgctcaactcagtgcctgggaatatatctgatgatggcgaagtcaccggctactcagggctagtgataaaatggaccggcagtcagattcaggttaagtacgtctataaataccaaaataacttcgcaaactcctttgggaaaagaggggggttaaaaatcccctatgccattttcagcaatcactaa

SEQ ID NO: 196578 - DNA, 300 bp, Klebsiella oxytoca
atgggatttggccttcaatgctgggacgcaaacggcaacatggtcgtagacaccagcgactacaactgccgctacttaggcactttctcagtaaaaatgccgcccggtgcaacatcagtttctcagagtgttccaggggtcactctgggcaactcattcgcggcgatcacaaaggcatcatatggctccggcttcataatggcctactgcgtcatgggtaataacatatttactctttactcatctgacggttatcacaccgatgaaacatttaccgttgaggtttaccgctatggataa

SEQ ID NO: 196579 - DNA, 276 bp, Klebsiella oxytoca
atggtttacagacagaagcactatctcttcatccgtgagctttacaaacactcccgcttcgagggacgtaacgatgctacatgggggcgtgattactcttaccgtgtagcacagagcggtctggactctctggcgaagtatggctatggcctcatctcgcaacatgaatcgaaaactggcgatgccgtgtattacgatcgcgacctgaacatcttgaccggcgaccagattaaggaagcgctcaagggttctctgtctccaaaggaaaaacaatga

SEQ ID NO: 196580 - DNA, 312 bp, Klebsiella oxytoca
atgaaaaagttacgcgtttggcatgtgccacagctaccgatgccagcattttacgttgaagtgaatagcgtcgctcaaggcgttcagatgatgaatgctctcgcagattatgatgccttccagcttgagcacaacatcaagcctgattactgcaacatgaacgggcttcaggtttttgacgagacgctgtctgctcaggatctggtcgacatggaactcactgaccgctgggtcgactggttccatgaagacggggatgaatattgggataaccctcgtgagtatcttgaggaaaaaggtggtgaagagtga

SEQ ID NO: 196581 - DNA, 636 bp, Klebsiella oxytoca
gtgaatatcatcgataaggctcaagtgttcgcggccggcgcccacgctggtgtaggtcagaagcgcaaatataccggtgaggactacatcaatcacccggttgcagtggctgagattgtccggcggcacggcggcacggatgagatgattgcggcggcgatgctgcatgacaccatcgaagacactcaggtcacgttcggccacatcttcagtctgtttggggatcgcgttgctgaaatggttgacgccctcagtaacaaagcaggcccggaagatggtgatcgtgagacgcgtttctttatcaacattaatgcgctgcgcgagcgcctggacatgcagagccgcgtcattaagctggctgacctgattcacaacactgagtcgatcaccaaacacgaccagaaattcgcggcgcagtatctcgcagaaaaggctttcatgctgcgagcgctattcagcgatgctgacattggctcattagaagagatcgagtccagagccggtaagcaccctattctgattgaggctgagaaagtcgttgcgaccgcattggggcagttgtcagaggagcttttctacaaatccgaccgcatcaatatcgacctgatggagaagtggaaagcgctggaagcctga

SEQ ID NO: 196582 - DNA, 1668 bp, Klebsiella oxytoca
atgtctaccgcagtatcaattatcgactcagcagctggcgctatcgacctgcgaaaagaaatgaacatcattcacgagatcgtggaagagtgtgaaagcgagatcgccttgatgaaccacgttcacgatttcgtttactctgatgaccgtgtgtcgatgattaaccgcctgcagagactaagtcgtcgcccgaacgatgagaaccttcgcaacgtcccgcagctgaacaatgtcgacctggacttcgtgaagcagaacatctgggccgaatactggaagaaggtcactgacatgaccggtgcgcttctcatcatgccagctgaacgccgggaccaatggcgcagccagttcacattaggcgtccagaaaggcacccaaaaagaccgtggcggatttgaacgcactattgaagagttcgtcggtgtaccagcgtttaccgcagacaccgttgtcccgacaatgacaacgctactcaacgaccgccataaatatctggccgagcgcgtgtatggcttgttcaaggctctgagtccaacgcacaagaccaacaaaacatacggcttcagtgagaagctgatcatctcttactgcgtgaccgacttctggaatagcagcgtcagcctgaactaccacaaatcggacgtaatcgacgacctgcgcgtcatgctgcacttcttcgcgcataaggagttcattacccttaatcgctgctcagagatgctctcagcggcgtacagagcgcacgactgcgaaaccggtaagtggatgaatgtcgacggcaacttaatgcgcgtgaagattttcaaaaacggcaatgcccactttgagatccacccggatgtcgcctggaagctgaacgaggtacttgcatacagtatgcctgcagctatcccggcgccatgtcgcaaagcaccaacgacaaaggctccaaaggagttcggctacatccagaagaccgtgtcggagaggacgcgaggcgttatccgcgaccgtaaacatagcacgacaaccgggacgtggtatttctccgactcatcgctccaaaagtctcaaatcgaagaccttgagcgcacgctgagctttatcggcggggtgaaggagcgcggcagctggatgttcccgtatgaaccaacggcgacattcgacagtatcgtagcaatgggcctcatcccagaggtgaagtcgcaccagttttatccgacaccggcatcaatcgcgcaatacgtggcgcagatcctgaaatgcacacacgctgaccgagtgcttgagccgtctgccggccgtggtgatttgctgacattcctcaatgcggcaccagagaacgttacctgcgtagaagtatcaccgctgttctgtgacatcctctctgccaaggggtacagcgcccacaataaagacttcatcgcctggtcaaaagagtcgcctgactgcttcgacaaaatcgccatcaacccaccgtattcagaaggtcgagcaaaggagcacacgctcacagcactgagccatctcagtgagaaagggatcatggccgcagtcctgccagctggttacaaaccggaagaatggataggcagtgagttcgtttgcgctaaatcaggtcgagagttctccggggagtttgaggacaccggcatcacagttgcagtattcgttttcaaaagagcatag

SEQ ID NO: 196583 - DNA, 189 bp, Klebsiella oxytoca
atgattgagataacgctgaaggagtacaacgccattcacgcagactatcggggcgtatgggagacggagcgtaccgactggcccgattgggaaagcgtgcgagagcaatacatgggcaagcgaaccatgatgaagcacggcggtctgttaatcgaaggactccacttcgagattaaagaagcgccttaa

SEQ ID NO: 196584 - DNA, 225 bp, Klebsiella oxytoca
atgaccccttccaatacatatctaacagtcagtctgtcacgcccagagaagatcacttctgagaacctcgcagagctgtaccgcgactggatgaataattacctttcgatcgcaagattcgctgatgactacggtataactgaagcacaggcagagctgacgatcgcaaaaggacgcatggtgcataacgcggccgcagattggctcaaggaatttaataagtaa

SEQ ID NO: 196585 - DNA, 321 bp, Klebsiella oxytoca
atgagcctgaatattactgagtcatacaaagtcgccgttattagcacggcgcacgtcacccacgcggattctgagataatgccaacaatctgcttcgacccaatcactgaccgcggccataactggattcacggcgctgagtatggctggattgtccgtgccggacttcatgctgaagcatggaaagagtctctgcgtgaggcggggatcagctggtcggccatcgagaacatcgagaaagtcctgagtgccggcttccaggtcgtgcatttcgactgcgacgcagatacgattgacggcttgcaggtttgggaatggtag

SEQ ID NO: 196586 - DNA, 210 bp, Klebsiella oxytoca
atgttcaagcatttaacgattaacatcacgctgcaaggcgaggaaaacagtgtgaccgcgctggatgatctggtgcgatctgaagaagtggccgggcgcgtcgctgagttaatcggccatgggtacagagaaggctcgttcgctctgagcaacccggactatccgatgtctgtcgcctggaactgcaccacgacggagacgcctgagtga

SEQ ID NO: 196587 - DNA, 369 bp, Klebsiella oxytoca
gtgagcctgacaattaaacccctgctggagccaacgaaggcgctgatgggtgcctgtaacgatatgcggttcgtctttccgttcaccggcaatctgacggcggataagaaggtagagatggctcataagctctgccgctggtggaatagcgatgccggctgggacgcgttgaagaagaacggccgcttccgcactgaccgggagctgagttacgacgacgtgccgcctttcttcgaccgcttctgtggccggtacaaatccgttgaggcgaagatcatggttatgacgaccggcgaagagatggtgagctacaccggtgataactgcggcggaagcaattaccggcacaacttcgtgataatccagtaa

SEQ ID NO: 196588 - DNA, 339 bp, Klebsiella oxytoca
atgtacgacaagaacagcttcaaagaagtaacgaaagacatcctcgatgacttcgaagcgctcactgatggtaatttcgcacttatcgatcagcgctacattctcgaattaactcagctcgatttcttttatgacgtgctgagcattattgacactgggcattatgagattacggatgccagatcattcatgcacgagcagaaccagaatagagactctgagcgctttttcgttggcgtcggaagtcgtgacgaacagaacgatgcagcgtcagagctttactattcattgattaagaatcgcaacgtcgctgagttccttgagatgttcaccagctaa

SEQ ID NO: 196589 - DNA, 366 bp, Klebsiella oxytoca
atgagaaagcgtttccactacttcaccacgcgcaacgcggaaaagacttccttcactgcgatcatctctgagcctgtggatggccagaacgatttctacgtggccccagacttgtctaacgtgctggcgatggtcaacacgtatggggaaggagattttggcactgtacacgtaaacaatacggagaagctcgccctggtggacttcgacactggttatgaatacttagccaaagacgctgtgagaatgtcgagagagtacgacaatggcgcctctggtgatgagccaatttacaagatgccagatgacgctcgtttcgttgagagtgaagatgtgaccttctacatggatctggaaccagtctga

SEQ ID NO: 196590 - DNA, 330 bp, Klebsiella oxytoca
atgaacaatactgaacgtttattctctgcttatcacactgccaagcgtgcggatttcaaagccaccagcaagactattacgtcgagcttaacgcttctggacatcctggctaacggtactgctattcgcgtctttaaagagtgctcagtcagttttgaaagtggcttatcgcctcgtgtggttgttagcgttcgccgcagtcgtctgaagtctggatggtctgccgtgcagcgtattttcccaatttcgcagcttgagacagccattctgtacgcaaacaaaatggctcagaaagagatttcaagagagtcccttgctgctatcgcataa

SEQ ID NO: 196591 - DNA, 483 bp, Klebsiella oxytoca
atgaaccagttactgaccgttgatactcgctttggcacatccaccgcgctgttcaataccatccataagcgcttaatcactgtgatgtgcggtgataaggatgtgaccaccagcctcttagaatgggaaagaaactcattgcagcaggatctggcgaatggtcacgggtacacgcaaacctttaaagcagctcgcgtcgtctcaactggcttcgggacattcatcttcccattgcgcgggagagactgtgagagccgccgctttgaaatggctgtccagatcgcaagatggatggccgagacacgaccgcatcaggataacgactatcaggtgagcgctgctgtccgtgccgtggggaatagcgaaaggtacaccaacgtcgtctacaaagccggtcacgataaattcactatcatcctgggtgggaatacgctgggatgcacccgccacaagtcagacatcatcgttctggaaggcaaataa

SEQ ID NO: 196592 - DNA, 546 bp, Klebsiella oxytoca
atggacaagacagacttcacatacggcattaatgcagaaaaggaaagggatctctcctttgccatgtcatacttcaaacacattcagcgctcgggattgtctgtaagggtcgtgacagcgaacgagcaggcattttctatgcgtgttactggtttcgatatgaaatccagtcgcgtctacttcagcccgatgtcagacgacaacaaagccaaccgcgtcattatccccgttgactacatcatctcggcagaagtcatcgcagcctctgaggtcgacaccacctataagggtcaaacgacactcaagcgtggggatttggagaacgagggttacacgcgctcaggtaaggacttctttcaggtaatccggttcgcgcaccagcaggggaagcctataagggtctatctctcagacaatcgggttttggaaggtgtgtcgaccggcatgaatgatcaatcggtaggtataaggctttcggacggaaagaccatccagatattctatgattgggtcgaccgaatcgtcccccttaattgggaaatataa

SEQ ID NO: 196593 - DNA, 345 bp, Klebsiella oxytoca
atgaagcaacataactcgaacgcagctgactcaaagggacttgtcgatgtttacaagcaagatgaaacaaagtttgttaactgtcatctgaagctgtcaccagttgctgacaggcagctggtcaagattcaacagttattgcgaaatgaaaatataaagttgtctaaaaccggtgtgattaacatccttcttgagaatttaaaaacagaatgcttccttggcgatatatcaaaaataatcggaaacagggttcagaacaaaattgttcaggtctttcttgattcagatatgaacgacgaggatttggaaatattgaagaaaatggaaagaaataagaagaaataa

SEQ ID NO: 196594 - DNA, 696 bp, Klebsiella oxytoca
atggatgttgaaatcagtattttgacggtggagacggcgcatctgcggcctaacccctggaacacgaatgtcgtcggggcgcaaaacttcgacaagctgaaaaactcaatcgaccgtctcggcttctttaagccgatcctcgttcgagatatgggagatggcacttaccagatcctcggcggcgaacaccgctggcgtgctgccatcgagcagggtatgccgactgtgccggtaacatcggtgggtgttgtcgaggacaatatcgccaagcaaatgtcgctggttgataacgagcgttacggcgaagacgatgccgtagagcttcaacgtctgattgagagcatccaggctgagatcgactactcgctggctgaaatcgcgccgtatgacgaggaattgacggcaacgctggcgcgtgagtctcgaatcgacctcgaagagctgggtctgctgggtgaggaaagtgacagtgcagctgaaacggacacccgagaaacgaaagaacgtttgggcgtagagcaccagacaatgcgctttaaggtttcatttgataccgctgaaggtgttgctgaaatcgtaagaaccatcatcagagagcagggtattaagactggcagcgacatggaagacgctggcgaggctctggtgtggttgactcaatattacaaggacgttaccgatggaaaagtcgtttaa

SEQ ID NO: 196595 - DNA, 675 bp, Klebsiella oxytoca
atggaaaagtcgtttaaaattcagtacctcgacccgcgcacgctcatcccgtatgagaagaacgcgaaaaagcacgatgagcgccagattaaagacctggccgcggccattgccaatcgtgggttcgatcagcctatcaccgtagataagcatcgcgtgatcatcaccggccacggccgacgtgaagccgctctgctggccgggcttgcaactgtccctgttatcgtccgtgacgacctgtcagaaactgctgtacgcgccaagcgccttgaagacaaccgcctcgccagtatcgactatgacgccgttcgtatgcaggaagagctgtccgatctactgaaggatgaagacacggagatttacggttttgatgaccgcgagctgaaagtgtttatcgaagacctcactgagaagatggccgacgacacactgattgacgatctgaacgaagaggcgcagcgccagcgtgaagagcataagtcgattactgaagaggtcgccggtggccgtactcgcattatcgacattctgggctttaaagacgtgccgaccagcgatgcaattgtcgtgggcgatctgctggcatggatggaagaagaaaccggtcttctgggtgaagctgccttcctcgcttatgccgccagagtttccgaaggggtggcggagcatggataa

SEQ ID NO: 196596 - DNA, 558 bp, Klebsiella oxytoca
atgagcattgataacaaggtctttccaatcttcgagggcgcccagctgcggcgccgcttcaccactgaaggcgaatggcgtgactggctgcgagcgcacggcgcatacggtttccgcgtcgctccgtattacagccgctgtgtggttgtcttcggtgcggctcgctatatcgaaaccatgaagcagctgtacggcgtggatgatggccggtttattgatgacgtgggtggctgggtcactgatatgggatatttcgaagccgatcgttctgtgcatggggtattcctgccagacagtcaggatgagaaaacgctgtggcatgaggctttgcatattgcgatgtcgacggccgagtctcacggcgtccatctgtccgatcaggaggccattacctacctgcagggctacgtcgcagaaatgctcgatgcagccttccgtcagtttaaggctgataagaaagctggtggcctgccgccgatcgcctcaatcgtcacgcgagatcctcacactattcgccaaggtggttttggtagcgttaggaaggtgatgaagcgatga

SEQ ID NO: 196597 - DNA, 588 bp, Klebsiella oxytoca
atgacagaaaccgccaaaaaaccgcgcctgtcaccggcgcagtgggcagagattgaggcaaagtggcgttcaggcgaatacaccttgtcaatgctcgaagaagagtacggcacccgttcagaaaccttctcgcggtacttcaaaaagaagggtattgcgaaaggctctgacagtgtgggtgagatgatccgcgagtcgcttaaatcggatgcggaaatccgggcgcgggcgcgtgcgcagaaaatcgaagagcgaaaagattcctacgatacgtgggcgcagaaccttggccgtctgaccatgaaagaggtgctgaccgctacccgagagggtaagccattggcgcttatcgaggacaatatcaaatcgcttcagcgtgccagcgcggtcattcaaaagtgctttgatgtgaccagccgtgcgctgggtctggagaaagacgacgacatcactgatgagatcccgaatctggtcttcggtgagctgacttccgcgcaggttagcgaactcaagaagatggacgaggataatctggtcgatgacgttgagatgctggacgcgattgacgaagacgagggggatgactaa

SEQ ID NO: 196598 - DNA, 861 bp, Klebsiella oxytoca
atgaaattatggcagtggatgcagctgacccataccgggtacatggatgttgcaggcaaggaagagttgggcggcggcggcggtgaacccggcgcagtagttccagaaagtgagaagggcgctgcccaaactgacgaactggatggcctaagcgctgaagagctgatcgctaaagtccgtgaagagcgcaaaacctccgcgactttgctgaaagaaagcatgaagcgcaagggcaacgagcaaagcctgaaagagaagctggcacagtacggtgacattgcaccggaacgcgctcttgaactggttcaggctgagtctgctgctcaaaaagctcgtgaagacgcggagcgtcaagagctggaacgccgtggtgagtttgacgctgttaaaaagcagatggtcgaagcgcacggcaaagatctggaaggtcgtgatacccgcatcgctgagcttgaagcggttatcgctggcatgaagggtgagttggttgagaaaaccatcggaacctcttttagcgattccaacttcctgcgtgagaaagtcctgatgaccccagctaaggctcgtgtcatttacggcgctcactttgagattggcgaagacggccgcgtagttggttttgataagccagctggtgcgaaagatcgcacggttatggttgatggacaaggtagtccactggcgtttgaaagtgctattgagcgcattctgcgtgctgaccctgaagctgatgctctgctgcgcagtgaagcgaagcaaggtgctcactccaagaccaccaccaaaccgaaactgaataccgaaaccaaaatgtcgacactggataagttgaccgctggcatcggtaaattgaacaagtaa

SEQ ID NO: 196599 - DNA, 444 bp, Klebsiella oxytoca
atgcctgcgcaaaaaatgaaaatcacggacgagcagttcactgatttcaccggaacgatgtttaacacgccgttcaccaagtcagtgtcgaacacgccgatgactgagtatcgccagaaccgtctggccgcatgtttcaagtctgagccacacgccgatgtagcggctgttattcacgtccagagcgtcacggttgccccgaaggtcgcgacggtactggtgggtgaagctgttcagctgggcggctctatcaagccagataacgccactgaccgctcttaccattgggttactgacaatgccggcattgcgaccgttgacgcgtctggtctggtgaagagtatcgctgaaggcagtgtgaaggttcgtctggtagccaatgacggctctgtgttcgatgaggcagttgtcaccgtcaagcagccagagacagcaccggtttaa

SEQ ID NO: 196600 - DNA, 381 bp, Klebsiella oxytoca
atgtttgtagaagggctggccttgtatctggcggggaagggggtcggtaaagtcggatcaaccatcttcgccgacgcaatgccgcaagacgccaaaagcgctgtaatggtgacatctccgaccagcggcattgaggttgaccacgagcttagcggcttctatatggactcaatgctgatcgtagtgcgtgacgcctcactctccgcagcccagcggaaaatgcaggctgtcagtgcgctgctaccggcagaggatgtcgagtcagccggtgcgttcttcaaaatgctccgaccgatgacattgcccgttgtttatccgcgtaacgacggcgcgatgtttgagatcgggcttccagtggaatttgctgggtatatgctgtaa

SEQ ID NO: 196601 - DNA, 423 bp, Klebsiella oxytoca
atggcggtcgttttgggggcgtctttcatcgtggccggttgcggtgataacaaggtgaaggatgacgccgttagctttgcgaaaagcacaattctggaaaacgttgcagatcctgagtcggttactttttccaacatgaagttcgtggatattaacgctgtagataaattaggctatgccgaatacgttgtttgcgggagtctgagtgggaaaaatgcccgcggcgaagatatgaaaaacgagttcgctgtcgatctggttattggcgcagggcgagtcaacgacgagaaaaaagactacataaaagaaatttacccgcgctatgacttccagactggcctgattaaccgcaagtattacgattacgaaatagcctgctcaaaaggtgccgaagtattcctggaaaaaaacggcattagataa

SEQ ID NO: 196602 - DNA, 234 bp, Klebsiella oxytoca
gtgacgccagccccggcatcggtcaaggtcggcgcgacagtcgcgctgactaagaaagttaccccgtcaaatgctgacgaccagagcggaacgtgggtttcctctgataccaaaattgcgaccgtcgatgccaatggcatcgtgagaggggttgcagcaggtgcggtgaatattacattcacgaccaaagacggctctaaagtggcgacaagtcgcgtcaccgtaacagcttaa

SEQ ID NO: 196603 - DNA, 252 bp, Klebsiella oxytoca
atgctgccactggcaaccttctggatgctgagtcgcaacatcgaccgtctaaaagctgaagatgacctgagaggttttcaggtatcacgagtagcgcaggcgggggcggaagacgccacggcgttcatggagggtttgcaataccggataggaagaccagtcgtaaccgataaagtctacgatccatcgaaagtcaaagcagaccctgacgccaaagagcaattaatggaaatctttggaagaataggataa

SEQ ID NO: 196604 - DNA, 4572 bp, Klebsiella oxytoca
atgtccgatattgtagattttaaattgacgctgaatgacaaggagttcacggcgtcgattaaaaatgcgggaaaattgttagagacattcggtaaaacggcctctaacggttccaaaaaaatgtcatcactggaacggtctgttgttgcaactggccgttctttctccgttctaagtgtcgcgctgggcaaaggcgccgacaaaatggaagacttcgcagccggtgctgagcttgctggtcaaagtctccgaagcattcgcgaaaacatcgccgcaattaaccgtagcctatctgtcttctcaaccagagtagatcagagcgtgggcaaggttggctctctcacttccgcactgaagaaagcacagactgagcttctggacttttccgacttcgctgatcacgctggtcgatcggcaaaaagtttctcaagccatgcctctgaaatgggcagcaccacaagctctctgaatcgtcgtttatccaacaccagcaaagtgtttgaccgatggaagggaacgactgacaaagcgtctgatgggctgaaaaacgtccgtgaccaaatggatgcgctaatcgaacgccagaagcagctaaatggccggcttctgggtggtggccgtgttggtggcggtcgtggtggcaatggcggcggcggcaatggcggcggcggcggcaatggcggtggtcgtcgaggcagcaacggtctgtttgaggggatgcgtggaaacatcttcctgttgggtgagatcggtgacgcagcgcgtacagtcaaagaagttctgtttggctggcaagagccgctaatcgaggccatgagtaagatgcagaacacgcgcatcttacttcaggggctggagaaggacgccagaaacccgcaggatgcagctgagaaagatatgaacttcatcatgggtctttctgagaaagtccatgtatctctcgatgctgtatctgatgccttcgttaagctgaagtctggcgggattgacccgactacgggatcgttaaacgcgctcgtcaactccgtcgcgcagttcggcggcaactcagagatcttgaagcgtgcagcaatcgccatccagcagatgtccggtaagggcgtcatctcgatggaagagttacgtcagcagctgggcgaagcggtcccgacagcaatgcagtcgatggccgacacaatgggcgtcagcatggcgaaactcgtcaaagacgtttccctgggtagcgtcgaggctaaagccgcgttagatatgctcttcctcggcatggagattgatagcgccggtgcagcagatcgtctatcacactcgttcacaggtgcggtcgcgcagatgcagacggcatttatgcgcttctcggacaatatggcgaaaggtggctatctcgatgcgctgtccaatagcctgaaggaattatccacttacctgaatacgaaagacgggcaggtattcgcatacgagttcgggcaaggcatgtcttcaattgtgaagacgctgacggatatggcgaagtggctggggcagaacatcggtctggtgaaaaccatcgcggagatcgtcgggttaggtttgggctttaagttcctgaagacaatcgtcgtcggcacgttgggcacctcgctggagatgctgtcgtcactcaataaatctttgggcttcgcgacaaaggcagttggcgggtttatttccgtcactggccgcattatccaggacataagaaacttcgggctgttcgcggccaccatcattaacgtgacggaagccattcgtggcgcgaaaaccgcatggctggcgtttacagcgactttgcagttcaaccctatcattgttggtattactgctgttgttggtgttgtagctcttctggcgctgacatttgagagtgtttcagagaaagcagctgatgcgcttgagaaaatcaaagccgttcccgaagcaatggggaaaaaagaacaggcagctctgaatcagagactgagccagctggatcaggacgaagaagacctgaaccgcaggaagcgtctttatgaagaggccaatcctgaacagcgcaaaaacatgatgaagggtgatcggtttaatatcgataacatcaacaccagtttgaaggatgttcagggccagcgtcaggatattcagaatgcgatgggcggtgccgttgttgccgtggctcaaaaagagatcacccgcaacatccaatccagtctgaaggctgttgatgaccagttcacgaaagacgctgcggctctgtctacctctgcgaagaattatcgggaccagagtgatgacatcagcaaagacaaaaatctgaccaaagatgagcgagcgtcgaaacttgaagcgctcaacctcagccgtcagaaacagctgctggatgcgacacagaagcgactcgatggctatcaggagttgcagcgaaaccttcaggatcagaaaaagacggttgaagatcagctgaaaagcaccacgctgaccgcagaccagaaaaagagtctcgacactcagaacattgcgctatcccgacagattaatgaactcggggatgaccagattaagatggcgcaggcggatgtcgatcgcgccaagaagtctatgtctggcgacacgccgaagttggacacccaggcaaaaaccggtgatcgcatcagacttattacggccaatgccggtaagaaagtcggtgaatttgttaacccggatacaggcgaagacctgcgcgatgttctgaataacgtgatcaccggccaaaaccagatgagcgttaaccagcgttatctctcggcgctgggcgggaagtctattgatactctgagcaactctgagcagaaatctatcaagcagggtcttgctgacgcagtgaaagctgacaaagcagcggctgataagcgactgatgggcgcaaacattgccgcctcaaagcagcagactatcgacgcaatcatcgctaaagccaatcagcaggttgtttcaagcgcaaatgagctggccgggcagcttggtctgacgtcgaaggcgagtgcgggctttgaagagtcagtcaagaagacactcagtcagattgacaatgcgctgaaggatcaggacatcaacggcaaatcgctgcctgagaatgctcgattcagtgatgaccagaagcgccagatgattcgtgaccgtgacttcatcaaaacgaacgcctctgattattcgcagcgcatcgaccgcgattcagctgagcagacggtttcgaagttcacgaccaccaccagcgggatcatgtcctcgttcgacagtgctaaccgcaagtccacaatggacaagtggcagacagactatcagcgcgacatcaaaacattgcagggctacattgcgaccactcagtcgggcgtaatgaaagaagtgtaccagcgcagtctgaaagcgatgcaggagggtgggaaccgagccttcatcgaacagttcggcactgctacgcagaaaatggcactggaatatgaagatgtagctgggcagattgagagcgtctggggtaatgccttctccaacatgagcgacaccattaccgacttcatcacggaaggtaaagccggctttggtgactttgctcgttcagtgattaaggacatcaccagcgttatcgtgaagtcgcagatcaccgcgccaatcatgaacatgatggggatgggcgctaacggagctggtgggacgggtaacgttgcaggcgcaatactgaatcaaggcgtgagtctggttaagtctggcggtggcagcaatacgacggttaacaacggtgacaagtccatcggtcagtcagcgaaagaaaccagtgtcggtatgtcccagatgagcacagcgacctctgatgccaacagtggtctgacgggcatggtatcgagcgcctggacttccacaaagtctctgtttggcctcggggccgctacgggcaaccagacgaaggctatcggatcgaacatcatgacgatgaacaatctgtcttcagttgccggtggcctgacggccgttttcgcttcaatgggtgcgtctgcaacgtcgtctaaggggcgctggactagcttcggtatgtctttggcttcggccgcagtttctgcctgggctggtgggcgtgcctctacccccgcaaccaccggtggcaacgtggctggtagtggatcagccagcatcccttcgaacggtcaaaatgtcccagccatccctaagtttgagaacggtgggattatggggcctaacggtgttcttcctctgaaggcgtactccaaaggcgggatcgcaaccacgccgcagctggcgctttttggtgagggtcgaagcaatgaagcctatgttccgctaccggatggccgttctattccggtaacgatgactggcagcatgggcggcggcaacgcaacggtggcgcccgtctctatcaatatcagcgtgagttctgacggttcggaatcgtcttcaaactctgatggcgatggcaagagctggaatgacgcggcacagcgcattaaaaacatcgttctcgaaacgattacgcaggaaaagcgcccaggcggttctctgaacaagaatacgaacggcaaccgataa
